United States Patent Application Publication US 2005/0260659 A1 - sequence listing, part 2

SEQ ID NO: 34 - DNA, 197781 bp, Homo sapiens
aattcttgtacactgctggtgggaatgtaaaatggtacagctgctatgagaaacattagaaagcttcctcaaacaacaaaaaatggaattaccatgtccagcaatcccacttctgggtatatgccaatagaattaaaagtaggatctcaaagacatatttgtacacctatgttcattgcagcattattcatgatagccaagagaagcaacccaaatgtccattgatacatgaatggataaacaaaatgtggcatatacattaaatggaatattattcagcctttaacaaaggaaatcccatcacaggccacgtagaaccttgaggatattataccaagtgaaataagccagttacataaagtaaatgctgtatgattctacttatgtgaggtatgtaaagcaatcaaactcatcagaacagaaagtagaatggtggttggcaggggataggaaaaggggaaatcaggagttgtaaataagagcgttacagaccaaattgtgtccctcccaaattcacgtgttgaagtcccaacctcaacaggattgtatttgcagataagacctttaaagaagtaactatgattaaatgaggctttaactggctgggtgtggtggctcacacctgtaatcccagcactttgggaggccgaggtgggcagatcacctgaggtcaggaattcgagaccagcctggccaacatgacaaaaccctgtctctactaaaaatacaaaaaattagccaggcgtggtggcacacgcctgttgtcccagctacttgggaggctgaagcagaagaatcgcttgaacccgggaggcagagattgcaacaagctgagatcacaccactgcactccagccagggtgacagagcgagactgtctcaaacaaaaaataaaaataaaaaaacttacagctatctattgcacaacaatgtgaatataattaacattaccaaactgtacacttagtaattgtcaagactgtaaattaaatattttatttttacaattaaaaattaaaaaataagcactcccctttgggcttcaaaatggtaggcacttctttcaccagtaccacaatgtgcttgttgttcattttcctttatatcacactaattttgcatccaaggaaaggaggcctggatcgaggtcataaaaaaaaaaaaaaaaatcctcctcctaaatctaaagccttggcgaacttcccagcatgtggagcagaatctgaaaatcttcactaagcggttattcaggtcatggactgtcatctgcttagaaagatgatatcttttcctgagaatctgtggcagacagaagttaacctaaaaagcttgaagtttatccatagtgctggtatggtcagtcaagtagtgcgatggctttaaaaggggtggggcctgtgctgccacctgtgtctcagtttgtccaggatatgcaggtccttttacaaggttcccatcagcaacaagagactggagacactcattccagcattgcatagagagagtgtgtcttgctgacccaggccatgccattgctgtttagggtcaccaggctgaggctgagccagattcttaaagggcagcactaccaggccagtgtgcttgttccccttgtcaccttggcatcttccttggtatgggggtcagaaaggagtctgcatatgtgacagccccactcatagaattggtactattgacacaggacttctaagtgtcaaaggagagtgagagctctctccctgcacaccctgggtaggctgaagcatcatgacccctggtccctggctcatgcagctcccagggggatcccaaggaacaaaggacatgtagaatgggagaaaagccagtacaaatgactgtttgctgctgaaaaacttggaaggaggaacgggagcagatctgcccacctctgcctcccaaagtgctgggattacaggcatgagccaccacgcccagccaagtctgacacctttaaaagtctgaaaagaaacatttaccgctgggtgccatggctcattcctataatgctagcactttgggaggccaaggcaagctgatcacttgagctcgggagtttgagaccagcctgggcaatatggcaaaacctcatctctacaaagaaaaaaaaaaaaattggccaggtgtgctggcatgcacctgtagtcccagctactcaggaagctgaggtgggcagattgattgaacctgggaggtcaaggctgcagtaagcaaggatcacaccactgcactccagcctgggtgacagatggcagtcttgtctcaaaacaaaacaaaaaacaacggcttaccatctattctctttgagggaggtatcatccatataacaaggccaactatgctagtccaccttcttcctttctctctcttaacctgtcttgccactaaacctgatttacttgtttcggaccatgctccaagtctatattttttagtggcctcaggatggtatataagtttctgtaactctttgggaagttgggtcttcattctgaagactcctgtgtacacgttaaataaatctgtatgtcgtttctcctgttgtctgagatgtttgaaccagagtggctccatctggaataggggctggttaaaatgaggctgagacctactgggctgcattcccaggtagtcagtcattctcagtcacaggatgagagatggaagtcagcacaagatacaggtcacaaagaccttgctgatagaacagcctgcagtaaagaagccaaccaaaaccaagatggtcacgaaagtgatctccgatcatcctcactgctcattacatgctaattaaaatgcattattttattttttatcttttatttatgtatttatatatttatttattgtcgggttttttttttggatgaagtcttgctctctcatcgaggctggagtgcaatggtgccatctaggctcactgcaacctccgcctcctgggttcaagcaattctcttgcctcagcctcccgagtagctgggattacaggtgggcaccacaacacctggctaattttttgtatttttagtagagatgggcctggtggcgggcacctgcaatcccagctacttgggaggttgagtcaggagaattgcttgaatctaggaggtggaggttgcagtgagccaagatcgtgccactgcactccagcctgagcaacagagcaaaaactccgtctcaaaaaatgaaaaatcaaaaaagataaagagaaaaagaaaaaagaagaaaaaggaaaataagaaaaaaaacccaaaaagttcaaaaacaaaacaaaaaaatacaaaatattttacagagtttaactcttttcatcggcactattgatctgcttttaattcccaagcattgtgctcaaagcctatatctgttatctaaattaattaatcaaaatatttttagataaaaagtcttacacacagctggaatctaaactaatgaatgcctttatgaataccatatgagagctaacagcaccttacattgtttcctggcctttccttctcaccataggttccaacgagctcagtacctctcaggcagccaatcaccaggtcttctcacatgcagcaattttattaccagaatttgagtaaaccctatctcccatacccagaacagatcatctaaacatgaaactgcctttgcaaaagttataacagtgagaaaattatgacagtggaagagatctgaactaaccagcccccaccttgcctttattaattaatttatctacttttgagacagggtcttgctttgcggcccaggctagagtgcagtggtgcaatattggctcactgcaacctccacctcccgggctcaggctactctcctgcctcaacctcccaagtatctgagactacaggtgcatgccactacacccagcccagtttacctttaacctccaaactatccctaggcattcctgggcctgggcgaagctaactttgggagacatttagtttatagtttaaatgataatagcccttccccaaaactgcctttgtaaagctaatgaaagaccaccaggataggaggataagaggagcctgaattctgctgatgtggaggcctaaaggattaccagccattattacacaggtcacaatttccccaattactcctccagataacatcactattgtagaacctaagattggccttttgagatgtcttacaggtttttgcacttctgacaactgatagctccacccagactgccagccaccctgtgggcccacccagatgcagactcagcacaggaggaccatattccacacccgtatgattacatccccacctaatcaggtacatccgttcccttacctgccaaactatccttgaaaaatcctagcctctgaattttcagggaggttgatttaagtaaaaactacttctccacgtggtgaggccaacctcatgtcaattaaattctttattgcaatgccttggtctcagttaattggtttcatctgcacagtaggcaggacgaacccatcaggcaattaaaaacataaaattttatcctcttgagcattttcaaaaattgaggtcattataaccaattaatcagagactgtatattagatgctaacacctgaactcaatttttacccctaaaaagacatatccacttatcttcattggtttaaataccatctcacttgggacaattatatgccttatctctttaataagttaaaaaattatcttagtttaattattgcatcaataattttattcaaaataattcaatatagaatttcttgtgtatgaatcaaattagggacattagcttaaaaaaaattagggccagatgtggtggctcacacctataacctcagcactttgggaaactgaggtgggaagattgcttgagcccaggagtttcagaccagcctgggcaagatggcaagaccatatctatacaaaaactttttaaaattagctgggaccggtgcagtggctcacgcctgtaatcccaacactttgggaggccgaggcaggcggatcacctgaggtcaggagttccagaccagcctggccaacgtggcgaagccctatctactaaaaatatgaaaattagccaggcgtggtggtgcatgcctgtagtcccaactactcaggaggctgaggcagcagaatcgtttgaaccccggaggtggaggctgcagtgagctgagattgcaccactgcattccagcctggacaacagagcaagactcagcctcaaaaaaaaaaaaaaattagtcggtcatggtggcttgtgcctgtagtcccagctacgcagaaggctgaaatgggaggactgattgagcccaggaagtcgaggctgcagtgagctgtgattgagccattacactccagtctgagtgacagagtgacatcctgtctcagaaagaaaaaaaacaagagatatacacagagttattgctcttgttttatttttttcactacataacaggaataaacttcatggcaaaatagagacctaagagaattgcttgaaagtgcttagcctagcttttctctttacttaactttgaaagaaaataaatagaaaccaaatgcctacctgaattctaggctctggaatgccaatttctttggccagttgatccctggcagctataccaggatagggattcttttcaaaccatgcctggagggtatctttttgactctggttcaaaacaatcctctttcgccgggcctctctttctagtgagcctagcaaagacacaaaggaataaaagagtatgaagaatgtgcttatagattaaaattgctggcattatttcagacggaaagccaatatatccattgatgactctatgtttttactttagcaacatatcttaagtcatgctagtaaggacacatataagtgtaaattcatcttttaggaaatatgataggcaatgatctaagtatacagagcaaaagcttacagaaattccacaatagtaacatgcaagaaaataggaagcaacagaattagaaaaatgcgtaaaattaataaaacaggtaaatatcatgtaaaaaactaaaaggttaaaacacatccttctaatcatggtttcatgatttcaactttttttttttttgagacagagtctttctctgtcacccaggctggactgaaatggtgcgatctcggctcactgcaacctccacctcctgggttcaagcaattatcctgcctcagcctccaaagtaactgggattacaggtgcccatcaccacgcccagctgatttttgtatttttagtagagatgaggtttcaccatgttggccaagctggtctcgaactcctgacctcaggtgatcctcccacctcggcctccaaaagtgatgggattacaggcatgagccactgctcccagccgtgatttaaactttcataaactctagaaaacaaacaagccctttggcatcaacacagagaacagccagcaggctgataggaacttaccatttgaacttttggccaaatccatactgggaagagtggcctggattccagaatctagtggcttcacagaacaactgccagagacacaagatacaacaaaacacagggtggcccacccatctctccaaatcctgacctcaggtgatccacccgcctggccaccgaaagtgctgggattacaggcatgagccactgagcctggccacacccatttcttaaatacctttctactgaatcccttcattaaatatttaacaccacttaaaaggattttgaagtaattagattaagggtaagatgaattttaagtagaagtacagattctactacgtaattttgcatctatcatgatacttttccaaatatgactttggttctctgctctctagtttccacatatttaagcattttcttctctgtgttcaggttcttttatttcttaattattttgacttgtccatgctatttaacgaatggagagtctcgccttatcttgtacttttcacattctcctcagcttttcctgcaacttattttattccatcatcaatatggtggtctggccatatgtcaagttagctagtctaaggtttgcagtttttccatcaaacatgaatgcaggtgttgctataaatgcattttgcatgtgtgattaatatataaaatcaattggctttacccaaaacagattattcactgtaatgcgggtgggactggagagcaactttagctcctgcctgagagtgtcatcttacctttccctacaaatttccttcctgcctagtcagtccccacaattgtgtaagtcagtttccttgaaaactgattctgttactctggttgaattttgactgacccagatattggtacagtcagtggctgtataacaaagaatgttacagatgagttttctgaattgattctgggtttctgaaattggttctctaatcaaataaactttaagggcactggccaggcacggtggctcccaactgtaatcccaacactttgggaggccaaggtgagtgaatcacgagttcaagagttcaagaccagcctgaccaacatggtgaaacccccgtctctactaaaaacacaaaaattagccaggcgtggtgtgggcacctgtaatcccagctactcaggaggctgaggcagaagaatcgcttgagccgggaggcagaggttgcagtgagccaagatcactccactgcactccagcgtgggtgacagcaagactccatctcaaaaaaaaaaaaaactttaaaagcactaatgaccagttccagtaatagagagggcactgggttcatcactaaatgtggcaatttatcaccattggacactcctaatcaaacctacagaaagcatcagaggctaacactgagtccccagtatggcaccatcacccagggtgataagctatacctagaggaaaaataattacattagaccactaccattgtagaaggaatgaagtttgttcttactggaatagacatgctgcatatgcttttgccttccctgcacccaatccttcagccaaaagaattatctgtaaactgacagaatgccttatctgctgtcatggtactccatacaacattgcttccaaccaaggagttcagttcctagcaagtgaggtatagcaatgggcccatgctcatggattcactggttttgtcatgttcctcagcatcctacctaaagcagatgacttttttttttttggacagtctcactctgttgcccacgctggagcacagtggcatgatctcggctccctgcaacctccacctcctttgtagctggaattacaggcatgtgccaacatgcctggctaatttttgtatttagtagagatggggttttgccatgttggccaggctgctctcaaactcctgacctcaggagatctgcccacctcagcctcccaaagtgctgggattacaggtatgagccaccacgcctggcccagttgactttaaataagtggtcttgattgttgaattaatcagttggaaaaaaggccttcaaagcagaactgagtcttccataaaaaaaattctgcctatgaacaacaggatcagctcttgcccaacctttcctatggactttggactttctcaagtgatcctccacaatcacataagccagttccttgcaacaaatctctaaatacatactagttccctttcttggttgatactctgatggatacaatcatcccattgtttattttggtaaaatgacataataggaaaacttatatgggtagatttgtctctggagataggccatgggtgatacaaaacttcttcgaatcctagaaagatggcagacgggctgggcacagtggcttatgcctgtaattccaacagtttgggaggccgaggtgggcagattacgaggtcaggagtttgagaccagcctagccaacatgatgaaatcccatttctactaaaaatacaaaaattagcctagcatggtggcacatgcccgtagttccaactactcaggaggctgaggcggagaactgcttgaacctgggaggtggaggttgcagtgagccaaggtagcaccactgcactccaggctggacaacagagactccgtctcaaaaaaaaaaaaaagaaagaaagaaagaaaaaagaaagctggcagcccatcttatgccactgtaaatttttggtaaatctatgtcagttgtgaatacctggaaggcagaagtgaggaaaataatgaaagcagaatatcacgataatgactcacctgctcttagctggtactgtacataaggtatatattgtacatacagtacatattatacatagggtatatattatacatagggtatatgaagaaagaaatgagttcagaaagaaatattttgcttaagagggcgaaggaaatggaatagaaagaatacatcactggcccggcgcggtggctcacgcatgtaatctcagcacttttggaggccgaggcgggcggatcacgaggtcaggagatagagaccatcctggcaaatgtggtgaaatccagtctcaactaaaaatacaaaaaaattagccaggtctggtggcaggcgcctgtagtaccagctactagggaggctgaggtaggagaatggcatgaacccgggagggagagcttacagtaagccgagatcacgccactgcactccagcctgggtgacagagcaagactccatctcaaaaaaaaaaaaaaaaagaaagaaagaaagaatacgtcactgtaaggtaaaacctacagatatacagatatcttttctcattttaaataaggaaataaaagcatagaggcccacatcctaacaacaactatatatatactcaaacctgggttatggccatcacaccattgctttaaagcaaaaaggtgcaatgtggacaactacaagccactggagggtacttcgtccatgacgaggaaacaaagtattgagtaagccttcacaattcaaacagctcttcagaaaacactgagggtcaatggagaggccacacatacaccatggttttagagggaggaagctcacagcctactcagagttgccgggtgccaggaccagtccccggacctggaccagatctaaggaggtggtgatgaaggaacttcagacatcacattccctccatggacccctgtgatcctagctacaggagttcccacgatccccatagacattttgacttccagggagagccgcctggagaacaagcagaggcacagcttgaacctgagcaaagcacagaaggcttcactgagctgtgccgtggtagcaaaacacaaccataaacgctgatttccgaagacgcttcgtcttgcactgagtgtgggaccgaggtgcatctggaccacactccccctaccacctcactcccactacctcccagtccctcccaagactgcccacctggccagtctcacagaaggatacccacagcacacctccactgcactgcacagagaagagtgctatgtgggtccatgtgccagcatgggagctgggtgcccctccctttgcaagactggactgggaagggcatggcctgatagcccaggcttctcccccatggggtgtcatggctgagtatgcctggaacggctcaccaacctggatgcagacagctgagaacaagcctagcctgctgggcctgctgtcagtgtggatgccagagggagactcaccaggtcaggagagcatgagctgggcaggcctcacagtcacttgcagggctgaaaaccccaggtcacaggtagcataacagttgtacaccactggtgccactgcattgcctaactgcccacagacataccccacaacccacttgactccagcaagcacaggggaccagagagaggtcacagaggagttgtggatcccttggtgtcataaccctctgtgcagtccactcaaggttgggggagtgcagcccaccaaagccccctttggaacaaaagaaacatggccacagcactagtcaccgaaggggtcaccataagagcctgggaatggacatggagagggtgtcatctcttgcctctcatctcccctccccagtgcactgttgcagatgaggcaggggcacttccacttgggacccaggaagcatgtgatgaaagaggctgctctggccaggcgtggtggctcatccctgcaatcccagcactttgggaggtggaggtgggcagatcacctgaagtcaggagtttgagaccagcctgaccaacatggagaaaccatgtctctactaaaaatacaaagttatccgggcattatggtgcacgccagtaatcccagctactcgggaggctgaggcagaagaattgcttcaacccgggaggctgaggttgcagtgaggcaagatcgcatcattgcactccagcctgggcaacaagagtgaaactcggtctcaaacaaacaagaaaactaaaaatagaatcaccattcacccagcaatcccactactagatagatgcctaaaggaaaataaacattctacccaaaagacacctgcatttgtatgcttatcacagcactattcacaatagtaaagacatgaaaccaacataggtgcccatcagtggtgtactggataaagaaaatgtggtacatacacaccatggaatactacacagccataaagagaattaaatcatagactttgcagcaacatggatgcagctagaaactattattctagcaaattaaagtagaaacagtaaaccaagtattgcatgttttcacttataacccagagttaaaccctgggtacacacagacataaagatgagaacaaaagacactgggtactccaaaagaggaggaggaagggaggtgggaaggtttgaaaagctatctataggatactaggttcactttttgagtgacaggatcaataatagcctaaacctcaggacaattgatttgcagtatgtacaaatacatccatgtaactaacctgcacatgaaactctgaatctaaaacaaaaactaaagtaaaataaagcaatgactggattaaaacttctaccaagagatcatttcagttgtctacactactacagaggaaaaatagtgtgtgcttttgctacaactgatgagctcaaaataattaagagaaagaagaaatagtgaattggggaagtaactaactgtatctggagctacatctaatcagctgcattaaatggcctttatcaagtattttatatgtgtctgtggatggtataagtgtgttatttcattgaaaatactacaaatatttacaaagaatacttcacttaaatttcacagttgctaagaaaatggtacttgcaaaactgacatatataaagaaataagagtctcttcaaaagagatggtaaattgtaaatataaaatatatcacaatgttaaaatcctcatagtgcaaatcaataaagataacaatctttggagaggaaagtattgagctttacaaatttactgtaaatttacatattaattcaacaaggaatacttttaaaccttgcattgccacagaattactttgtggggaaaaaaaatgaggtactttttgaatgtgtgtacatcaaatccaaaatgttaacttttactttttcctttataggcaactttggatgcatttttcggttttggttcccagagggcatttcttacaaatcttgaagctgcacctctgtccagcttgccagcctttttcttgtctgctatttccttgactctgttcatatatactctgattctttccaattcctgctttactgaatgttccttaggattcactccttgagttgccaaataagcccaaaacattgaatttaatatgtatgcagaaaccaaatccacttttgcttgttcaagtgggtccaacttctgcaacaactcatttctagaaacagacatcatgttcttcagcatctcatccacagcatcaatggaattcgcaaatgctgacaaataatcgtgaatttctactggatagtcctcattaatttcttcagctgcccttatggctgaagcacggcctttgactccagtctcctagaaagcggtcaggcaacgatgacatcaatgacgtgccagatctagaacagagtcttttaaaagtatttctctacattcccagaaatacatttattataattgcatcttatggcccttttttcaacagaagtaaaatttctggaccattagaagagcacaaaatttattttctaaatgaaatattcaaggacacttgtcattctctcaggctcaaagcctaaagaggtacaccaataagacaagattcattatcacattgaagatcatggggagatgtttgctcaggtggtcacgtgatgtgcagaaacagagggagacacaattgaaccaaataaataaagatgcaggctgggcgcagtagctcagcctgtgatcccaagacttcaggaggctgaggcagcagattgctttaacctagcagttccacatttatatatataatgtatatataaatatgttatatataatatatatgttatatgtattatatatatgttataatcatatatgtatatataatgtaatcccagctactcaggaggctgaggcaggagaatggcttgaacccgggaggtcgaggttgcagtgagccaaaatcgtgccactgcactccagcctgggagacagagcgagactccatctcagaaaaaaaaaaaaaactatatatatatatatatatataaaatacacacacactatatatatatataaactatatatataagctatatatatatatataagctatatataagctatatatatatatatataagctatatataagctatatatatatatataagctatatatatataaagaaataaagccccaatgttttctacatgtggaagaaaagatagagtgacccaaatgtttcttcatccttgagtagtggtagataatttgtactttcagagaaaagcacgaaaggtaaaagaaaagcctctttggatttacttttccatgtcctaaagtacttttcaattaaaagtgaagaccaatcaatcctctcagggccattgtaaggcacagcacttggtttcaatgaataagaggacatcacagatttgtccctcaccagtgaggggtgagatattccaatcctgcaagcacagggtcatgttgaaaccatcttcaagaaaacagaaccagggctgggcgtggtggctcatgcctgtaatcccagcaatttgggaggctgaggcaggtgaatcgcctgaggtcaggagttccataccagcctggccaacatggtgaaaccccatgtctaataaaaatacaaaaattagctgggcgtggtggtgggtgcctataatcccagctactccagaggctgaggcaggagaatcacttgaacccgggagctggaggttgcagtgagccaaaatcctgccactgcactccagcctgggagacagagggagactccatctcagaaaaaaaaaaaaaaaaacagaaccagatttcccactggcactgacagggctggtattcttaaagcagtaactttgaatttgtatctggacacatttccataattaaaagaaagaaaagaaaaaataaaaataaaacaacaacaagaacaaaacataaaacaaagaaaaagagatatctcaaggttactttacatcactaggcctacacccaagggtagagaccaaagcaccagctgttcttcagagaagaaacacgatgatccagatgaaagaaagatgtttcccaatgggctcagatgtccttttagaatcaagggaatgtccctagtacatgccaaatcactacttaaagtttatctggtggggcatggtgcctcatacccataatcccagcactttgggaggtcaaggcatgaggatcacttgagcccaggagtttgaggccagccctggcaacacagcaagaccccatctctacaaaaaataaaacgactagctggtgtggtggtgcgacctgtagtcccagctactcaggaggctggagtgagaagatcacttgaggctgagagtcagggctgcagtgattacaggcatgagccaccgtgcctggcctttttttttttttttttttcatcatgtaatacgtccatgtaatgaaatttatttcttacagtgctgaaggctgggaagtccacagtctctgggccgcagctggttggcttctggcaagggcctcatcctgcatcataacatggtggacagcatcacatggagggaagtcgcaggagacagagccgaacaggcttttataacagacccactctcatgataattcacacaccattattcctactcacccattaacccactcactcaggaatggattcacccattcatgaaggcagggacctcatgatccaattatctcttaaaggacccacctcttaatcctgttactttgcagactaagtttcagcatgaatttcagagaggacaaacaaatcatagcaccattttagtcaaatacacctcaataagaatttcaccattttacttaatcttttcagtgaataaagtatttgattttgcaattagattttgattatgggatagaatgtgcaaagaaataaacttttgtagaaaccacaatagttctttttatttccacctatcagtctaggtgtttataaaactcaacttgactttttaaaaaattatagaatggacatggcaacaggcagatattactccatgagactcagcttctcctgttctttttttttttttttttgagacagagtcttgctgtgttgcccaggctgaagtgcagtggcatgatcttggctcgctgcaacctccgcttcccaggttcaaccaattctcctgcctcagcttcccaggtagctgggattacaggcacaggtcaccacgcctggctaattttttggtatttttattagagactgggtttcaccatgttggtcagtctggtctcagactcctgacctcaaacgatctgcccacctcagcctcccaaaatggcttctcctattcttgaagaaatcaacacatctacagctgacatttcaactattgttgtgatgggctaccaagggcatatagtgacagaagatctaagatccagatggagcactgtaagttgatagaaacaccagtgaaatttcctataggaatttctcttggccacatcatatctgagctaagaactataacccacttttcaaaagagtgaatattttattcacctgaaagctgtgcatatctggactccaactggacaggggaggccgcagaggggcaggctagttcctttaaggagacaccatgagatgaccagggactatccaaactatccatatccccacagcaggctccccactgcacctggactgccacctgccacccttctacttctctccaaccttggtttccagctggagctggttggagagtggagggactacgctgtgagccctggagactctgtgtggggtacatactcctttgtttggaaccaaacacaaattatcaactcctgttagcaagagaccatgaggtcagtgaaagaaaaagaaaaagcccttttttttttcttttttttttttttttccgttttttgagaccaggtctcacactctcacctaggctggagtgcagcagcacgttcttggttcactgcaacctctgcttcctgggcttaagcaattctccagcatcagcctcctgagcccctgaaattataggcatggatcaccacaccaggctaatttttatattttttgtagagatggggtttcaccatgttgtccagactggtctcaaattcccgagctcaagtgatctgcccgccttagccttccaaagtgctgggattacaggcatgacctactgcacccggcctaaaggctttattgtctataacaataaataaacaaaaagatctatggatcggggagacacaggctccagtgtaagacaaaaattgagctccaaagaacaaaaagaggtctagggaaaggtcctgccctagacgtcaatatggtctgtacatgcaaatgaggattgaaactggttcagacctcactggttgaaaataactgtgtctcagttgggtagtttctaagcccaaagccagtggtctctgtagggtgcccctttcaagcagctggcaggagatttccagccacgtgtctcggctctggtttcagaagccatcttagctcagaggtacaaacaggatgtttgtctagagctgccctctcctggaaagaggaaggcatgactgctcttctctcaccccaccatggccccttggctcccatcatcttcatttgagtgtcactttcagccacaagacgtccttctcctctggagagcttggggtcatccttagagcttcatttcagactcccaacttgcacaaagtcccagttgctcctgctagggaatgaggcccaacattcccaccagaaccaggctcagacctttctctccaaagctaaaatacaatctcaagtaatgacaagccaatcccaattctgcctctaggcactaactccccatttttggctccaaagacagggccaccttttgaaaccacctttgcaaaattatgacagtaatttgagtctgacataattgactctatcttgtttctaacctccaagctatgttcagtcattcctggacatagatcaagctgctgactttgggagaaatgtagcttatagttttttttatttgacttgattattttattttattttatttttttgagaagaagttttgctctgtcgcccacactggagtgcagtgcactcgggtcactgcaacctctgcctcccaagcctagccagttgggcctgctgccactgcgaatgccagagggagactcaccaggtcaggagagcatgagctgggcaggcctcacggccacatgcagggctgataaccccaggtcacaggtagcataacagttgtacaccactggtgccactgcattgcctaactgcccacagacataccccacaacccacttgactctaggaagcacaggggaccacagagatgtcactggggagttgcggatcccttggtgtcataaccctctgtgcagtcccctcaaggttgggggagtgcagcccaccaaagccacctttggaacaaaagaaacatggccacagcactagtcactgaaggagtcaccataagagcctgggaatggacatggagagggtgtcatctcttgcctctcatttcccctccccagtgcactgttgcagatgaggcaggggcacttccacttgggacccagtaagcacgtgatgaaagaggctgctctggccgggcgtggtggctcatccctgcaatcccagcactgtgggaggtggaggtggaggtgggcagatcacctgaggtcaggtgttctagaccagcctaaccaacgtggagaaaccccatctctagtaaaaatacaaaattagctgggcgttgtggtgcacacctgtaatcccagctactcaggaggctgaggcaggagaattgcttcaatccgggaggcgcaggttgtagtgagccgagatcacgccattgcactccagcctgggcaacaagagtgaaactcagtctcaaacaaacaagaaaactaaaaatagaattaccattcaacccagcaatcccactactagatatatgcctaaaggaaaataaataattctaccaaaagacacctgcattcctatgcttatcacagcactattcacaatagtaaagtcatgaaaccaacttaggtgcccatcagtggtgtactgaataaggaaaatgcggtacatatacaccatggaatactacacagccataaaaagaatgatatcatagactttgcagcaacatggatgcagctagaaaccattattctaagaaaattaatgcagaaacaaaaaaccaagtattgcatgttttcacttataactcagagttaaaccctcggtgcacacagacataaagatgagaacaaaagacactaggtacgccaaaagaagagaaggaagggggggaggaaagggttgaaaaactatctataggatactaggttcactttttgagtgacaggatcaataaaagcccaaacctcaggacaattgatttgcagtatgtgcaaatatatccatgtaactaacctgcacatgaaacttcaaatctaaaataaaaaataaaataaaataaagcaatgactggattaaaacttctaccaagagatcatttcagttgtctacactactacagaggaaaaatagtgtgtgcttttgctacaactgatgagctcaaaataaataagagaaagaagaaatagacagtgaattggggaagtagctaactgtatctggaactgcatccaatcagctacattaaatggcctttattgagtattttatatgtgtctgtggatggcataagtgtgttatttcattgaaaatagtacaaatattttcaaagaacatttcacttaaatttcacagttcctaagaaaatgctacctgcaagactgacctacataaagaaataagagtctcttcaaaagagatggtaaattgtaaatataaaatatatcacaatgttaaaatcctcatagtgcaaatcaataaagataacaacctttggagaggaaagtattgagctttacaaatttactgtaaatttacatattaattcaacaaggaatacatttaaaccttgctctgtcacagaattactttgtgggaaaaaaagagatgtactttttgaatatgtgtacatcaaatccaaaaagttaacttttactttttcctttatgggcaactttggatgtatttttcggttttggttcccagagggcatttcttacaaatcttgaagctgcacctctgtccagcttgccagcctttttcttgtctgttatttccttgactctgttcatatatactctgattctttccaattcctgctttactggatgttccttaggattcactccttgagttgccaaataaacccaaaacattgaatttaatgtgtatgcagaaaccaaatccacttttgcttgttcaagtgggtccaacttctgcaacaactcatttctagaaacagacatcatgttcttcagcatctcatccacagcatcaatggaattcgcaaatgctgacaaataatcgtgaatttctactggatagtcctcattaatttcttcagctgccatcatggctgactcacggccttcgactccagtgtcctagaaagcagttgggcaatgatgacatcaatgacgtgccagatctagaacagagtcttataaaagtatttctctacattcccagaaatacatttattataattgcatcttatggcccttttttcaacagaagtaaacttcctggaacattggaagagcacaaaatttattttctaaatgaaatattctaagacgcttgtcattctctcaggttcaaagcctaaagaggtacaccaataaaacaagattcactatcccatcgaagatcatggggagatgtttgctcaggtggtcacgtgatgtgcagaaacagagggagacacaattgaactaaataaagaaagacgtaggctggacgcagtagctcagcctgtgatcccaagactttaggaggccaaggcagcacactgcttgaacctaggagttctacatatatatatatatatatatatataaaatatatatacataatataaatatatattttataaatataaacatatatttatatacattatatataaatatatatttatatataatatattataaatataaatatatgtaatataaatatatatataatatgtatatatatattaaaaatatgtaatcccggctacgtgggaggctgaggcaggagaatcgcttgaactcaagaggtagagttttcagtgagccgaaatcttgccactgcactgtagcctgggaaacagagggagactccatctcagaaaaaaaaaaacagaaccagatttcccactggcactgacagggctggtattcttaaggcagtaactttgaatttgcatctggacacatttccattattaaaagaaaaaaaagaaaaaataaaaataaataaaacaacaagaacaaaacataaaaccaagaaaaagagatgtctgaagattactttacatcactaggcctacacccaagggtagagaccaaagcaccagctgttcttcagagaagaaacacgatgatccagatgaaagaaagatgtttcccaatgggttcagatgtccttttagaatcaagggaatgtccctagtatatgccaaatcactacttaaagtttatctggtggggcatggtgcctcatacccataatcccagcactttgggaggtcgaggcatgaggatcacttgagcccaggagtttgaggccagccctggcaacacagcaagaccccatctctacaaaaaataaaacgactagctggtgtggtggtgcgacctgtagtcccagctactcaggaggctggagtgagaagatcacttgaggctgagagtcagggctgcagtgattacaggcatgagccaccgcgcccgcctttttttttttttttttttcatcatgtaatacgtccatgtaatgaaatttatttcttacagtgctggagtctgggaagtccacagtccacgggctacagctggttggcttctggcaagggcctcatcctgcatcataacatggtggacagcatcacatggagggaagttcgcaggagacagagccgaacaggcttttataacagaccctctctcatgataattcactccccattattcctactcacccattaacccactcactcaggaatggattcacccattcatgaaggcagggacctcatgatccaattatctcttaaaggacccacctcttaatcctgttactttgcagactaagtttcagcatgaatttcagagaggacaaacaaatcatagcaccattttagtcaaatacacctcaataagaatttcacgattttacttaatcttttcagtgaataaagtatttgattttgcaattagattttgattatgggatagaatgcacaaataaataaactttggtggaaactataattgtttctttttcttccacctatcagtctaggtattcctaaaactcaacttgactttttaaaaaattatagaatgtacatgacatgcaaataggcagatttttccccatgagactcagcttctcctattctttttttttttttttctgagacagagtcttgctatgttgcccaggctggagtgcagtggcacgatctcggctcactgaaacctctgctccccagattcaagcaattctcctgcctcagcctccaaagtaactgggatgactggtttctgtcaccacacccagctaatttttgtatttttagtagaaacagggtttcaccatgttggtcagccaggtctggaactcctgacctcaggtgattctcccacctcagcctcccgaagtgatgagattacaggctcgagccactgcctccagctgtgacttaaactatcataaactctagaaaacaagccctttagcatcaacacagagaacagccagcaggctgataggaacttaccatttgaacttttggccaaatccatactgggaagggaggcctggattccagagtctagtgacttcacagaacaactgccagggacacaagatacaaaaaaacgcagggtggcccacccatctctcaaactgctgacatcaggtgacccgcccccctccggacccaaagtgctgggattacaggcatgagccactgagcctggccacacccatttcttaaatacctttctactgaatcccttcattaaatatttaacaccacttaaaaggattttgaagtaattagattaagggtaagatgaattttaagtagaagtacagattctactacgtaatttttcgtctatcatgatacttttccaaatatgactttggttttctgctctctagtttccacatatttaagcattttcttctctgagttcaggttcttttatttcttaattattttggcttggccatgttatttcacaaatggagagtctcgccttactttatacgtttcacattctccgcagcttttcctgaaaagtattttatcccatcatcaatgtggtggtctggccatatgtcaagttagttagtctaagctctgcagttcatccatcaaacatgaatgcaagtgttgctataaatgcattttgcatgtgtgattaatatataaaatcaattggctttacccaaaacagattattcactgtaatgcgggtgggactggagagcaactttagctcctgcctgagagtgtcagcttacctttccctacaaatttctttcctgcctagtcagtccccacaattgtgtaagtcaatttccttgaaaactggttctgtttctctggtcgaattttgactgacacagatattggtcctgttagtggctgtataacaaagaatgttatagatgagttttctgaattgattctgggtttctaaaattgattctctaatcaaataaactttaagggcactggccaggcacggtggctcaggactgtaatcccaacactttgggaggccaaggtgagtgaatcacgaggtcaggagttcaagaccagcctgaccaacatggtgaaactcccgtctctactaaaaacacaaaaattagccaggcatggtggcaggcacctgtaatcccagctactcaggaggctgaggcaggagaattgcttgagcccggaggcagaggttgcagtgagccaagatcgtgccactggatgccagcctatgtgacagcaagactccatctccaaaaacaaacaaacaaaaacaaactttaaaagcactaatgaccagttccagtaatagagagggcactgggttcctgactaaatgtagcaatttatcaccattggacactcctaatcatacctacagaaagcatcagaggctaacactgagtccccagtatggcaccatcacccagggtgataagctatatctagaggaaaaataattacattagaccactaccattgtagaaggaatgaagtttgttcttactggaatagacacactgggtatgcttttgccttccctgcactcaatccttcagccaaaagaattatctgtaaactgacagaatatcttatctgctgtcatggtactccatacaacattgcttccaaccaaggaactcacttccaagcaagtgagttatagcaatgggcccatactcatggattcattggttttgtcatgttccttagcatcctaaaggagatggctttttatttttttttttttgacagtctcactatgttgcccaggctggagtgcagtggcatgatctcggctccctgcaacctccgtctcccagattcaagggattttccttcctcagccttctgagtagctggaattacaggcacgtgtcatcacgcctggctaattttcatatttttagtagagacggggttttgccatgtttgccaggccgctctcgaactcctgacctcaggtgatgtgcctgcctcagcctcccaaagtgctgggattgcagctgtgagccacctcgcctggcccacttgactttcaataagtggtcctgattattgaattaatcagttggaaaaaaggccttcaaagcagaagtgagtcttccataaaaaaattctgcctatgaacaatggcagcagttcttgtccaacctttcctatggactttggactttctcaagtgatcctccacaatcacataagccagttccttgcaacaaatctctaaatatatactagttctctttcttggttgatactctgatgaatacaatcatcccattgtttattttggtaaaatgacataataggaaaacttgtatgagtagatttgtctctggagataagccatgggtgatacaaaacctttttgaatcctagaaagatggcagatgggctgggcacggtggctcatgactgaaattccaacagtttgggaagccgaggtgggtggatcacttaaggtcaggagtttgagaccagcctagccaacattacgaaaccccatcttgactaaagatgcaaaaattagcccagcatggtggcacatgcctgtagttccaactactcaggaggctgaggcagagaatcgcttgaacctgggaggtggaggttgcagtaggccgaggtagcaccactgcactccaggctggacaacagagactccctcaccaaaaaaagaaaaaaaaaaagaaagaaagatggcaacccatcttatggcactataaatttttggtaaatctgtgtcagttgtgaatacctggaaggcagaagtgaggaaaataatgaaagcagaatatcactatcatgactcacccgctcttagctggtactgtacatggggtacatattatacatagggtatatgaagaaagaaatgagttcagaaagaaacattttgcttaagagggtgaaggaaatggaacaaaaagaatacatcactgtaaggtaagacctacagatgttttttctcattttaaataaggaaataaaaacatagaggcccacatcctaacaacaacaactgtgtatatactcaaacctgggttatggccatcacaccattgctttaaagcaaaaaggtgcaatgtggacaactacaagccactggagggtacttcgtccatgacgaggaaacaaagtattgagtaagacttcacatttcaaacatctcttcagaaaacactgagggtcaatggaaaggccagacatacaccatggttttagagggaggaagctcacagcctactcagagtttccaggtgccaggaccagtccccggacctggaccagatctaaggaggtggtgatgaaggaacttcagacatcacattccctccatggacccctgtgatcctagctacaggagttcccacgatccccatagacattttgacttccagggagagccgcctggagaacaagcagaggcacagcttgaacctgagcaaagcacagaaggcttcactgagctgtgccgtggtagcaaaacacaaccataaacgctgatttccgaagacgcttcgtcttgcactgagtgtgggaccgaggtgcatctggaccacactccccctaccacctcactcccactacctcccagtccctcccaagactgcccacctggccagtctcacagaaggatacccacagcacacctccactgcactgcacagagaagagtgctatgtgggtccatgtgccagcatgggagctgggtgcccctccctttgcaagactggaccgggaagggaatgacctgatagccaaggcttctccccaatggggtctcatagctgagaatgcctggaacagctcagcaacctggatgcagacagctgagaacaagcctagccagttgggcctgctgccactgcgaatgccagagggagactcaccaggtcaggagagcatgagctgggcaggcctcacagtcccttgcagggctgaaaaccccaggtcacaggtaccataacagttgtacaccactggtgccactgcattgcctaagtgcccacagacataccccacaacccacttgactccagcaagcacaggggaccagaaagaggtcactggggagttgcggatcctttggtgtcataatcctcagaacagtccactcaaggttgggggagtgcagcccaccaaagccccctttggaacaaaagaaacatggttgcagcactagtcattgaaggggtcaccataagagcctgggattggacatggagagggcgtcatctcttgcctcttatctcccctccccagtgcactgttgcagatgaggcaggggcacttccacttgggacccattatacatgtgatgaaagaggctgctccaactgggcgtggtggctcacccctgcaatgcaagcactttggtagggagaggcaggcagatcacctgaggtcaggagtttgagatcaggctgaccaacatggagaaatcccaactctactaaaaatacaaaattagctgggcatggtggtgcatgcctgtaatcccagctactccaatggctgaggcaggagaactgcttgaacccaggaggcggaggttgcagtgagccaagatcacgccattgcactccagcatggacgacaagagtgaaactcggttgtaagcaaacaaacaaacaagaaaactaaaaatagaatcaccattcaacccagaattcccactactagatagatgcctaaaggaaaataaatcattccaccaaaaagacacctgcatttgtatgcttatcacagcactattcacaagagtaaagacatgaaaccaacctaggtgcccatcagtggtgtactggataaagaaaatgtggtacatacacaccatggaatactacacagccataaaaagaatgaaaacacagactttgcagcaacatggatgcagctagaaactattattctaagaaaattaatgcagaaacagaaaacctagtattgcatgttttcccttgtaacttggagttaaaccctgggtacacacagacataaagatgagaacaaaagacactgggtactccaaaagaggaggaggaagggaggcgggaagggttgaaaaactatctatagaatactaggttcactttttgagtgacaggatcaataaaagcccaaacctcaggacaattgatttgcagtatgtgcaaatatatccatgtaactaacctgcacatgaaacttcaaatctaaaataaaaaataaaataaaataaagcaatcactggattaaaacttctaccaagagatcatttcagttgtctacactactacagaggaaaaataatgtgtgcttttgctacaactgataagctcaaaataattaagagaaagaagaaatagacagtgaattggggaagtgactaattgtatctggagctacatccaatcagctacattaaatggcctttattgagtattttatatgtgtctgtggatggtataagtgtgttatttcattgaaaatagtacaaatatttacaaagaatatttcacttaaatttcacagttgctaagaaaatggtacttgcaagactgacctatataaagaaataagagtctcttcaaaagagatggtaaattgtaaatataaaatatatcacaatgttaaaatcctcatagtgcaaatcaataaagataacaacctttggagaggaaagtattgagctttacaaatttactgtaaatttacatattaattcaacaaggaatagttttaaaccttgcactgccacagaattattttgtgggaaaaaaagagatgtactttttgaatatgtgtacatcaatatcaaaaagttaacttttactttttcctttatgggcaactttggatgcatttttcggttttggttcccagagggcatttcttacaaatcttgaagctgcacctctgtccagcttgccagcctttttcttgtctgttaattccttgactctgttcatatatactctgattctttccaattcctgctttactggatgttccttaggattcactccttgggttgccaaataaactcaaaacattgaatttaatgtgtatgcagaaaccaaatccacttttgcttgttcaagtgggtccaacttctgcaacaactcatttctagaaacagacatcatgttcttcagcatctcatccacagcatcaatggaattcgcaaatgctgacaaataatcgtgaatttctactggagagtcattaatttcttcagctgccatcatggctgactcacggccttcgactccagtctcctagaaagcggtcaggcaacgaagtcttcaatgaggtgccggatctagaactgagtcttttaaaagtatttctctacattcccagaaatacatttgttataattgcatcttatggcctttttttcaacagaagtaaaatttctggaagattggaagagcacaaaatttaatttctaaatgaaatattcaaggacgcttgtcattctctcaggctcaaagcctaaagaggtacaccaataaaacaagattcattatcacatcgaagatcatggggagatgtttgctcaggtggtcacgtgatgtacagaaacagagggaaacacaattgaactaaataaagacgcaggctgggcgcagtagctcagcctgtgatggcaagattttaggaggccaaggcagcagattgctttaacctaggggttctacatatatatataaaatatataatataaatattttatatatgcaatcccatctactcgggaggctgaggcaagagaatcgcttgaatgccggaggtggactttgcagtcagccaaaatcttgccactgcactccagcctgggagacagagcgagaccccatctcaggaaaaaaaaaaaaaaatatatatatatatatatatatatatatatatatgtatatgtatatgtatatgtatatgtatatgtatatgtatatatataaagaaataaagtcccaatgttttctacatgtggaagaaaaggtagagtgacccaaatatttcttcatccttgagtagtggtagattatttgtacttttagagaaaagcacaaaaggtaaaagaaaagcctctttggatttacttttccatgtcctaaagtacttttcaatcaaaagtgaagatcaatcaatcgtctcagggccattgtaaggaacagcactttgtttcaatgagtaagagggacatcacagatttgtccctcgccagtgaggcgtgagatattccaaccctgcaagcagatggagatgttgaaactatcttcaagaaaacagaaccacagaaccaggactgggcgtggtggcccatgcctgtaatgccagcactttgggaggctgaggcaggtaaatcatctgaggtcaggagttccataccagcctggccagcatggtgaaaccccatctctaataaaaatacaaaaattagctgggcgtggtggtgggtgcctataatcccagctactccagaggctgaggcaggagaatcgcttgaacccgggagctggaggttgcagtgagctgaaatcctgccactgcactccagccttggagacagagcgagactccatctcagaaaaaaaagagaagagaaaacagaaccagatttcccactggcactgacagggctggtattcttaaagcagtaactgtgaatttctatctgaacacatttctattattaaaagaaataaagaaaagaaaaaataaaaataaataaaacaacgacaagaacacaacataaaaccaagaaaaagagatatctcaaggttactttacatcactaggcctacacccaagggtagagaccaaagcaccagctgttcttcagagaagaaacacgatgatccagatgaaagaaagatgtttcccaatgggttcagatgtccttttagaatcaagggaatgtccctagtatatgccaaatcactacttaaagtttatctggtggggcatggtgcctcatacctataatcccagcactttgggaggtcgaggcaggaggatcacttgagcccaggagtttgagaccagccctggcaatacagcaagaccctgtctctacaaaaaataaaacaactagctggtgtggtggtgcgcacttatagtcccagctactcaggaggctggagtgagaagatcacttgaggctgagagtcagggctgcagtgattacaggcatgagttactgggcctgatcttttttttttttcatcatgtaatacatccatgtaatgaaatttatttcttacagtgctggaggctgggaagtccacagtccctgggccgcagctggttggcttctggcaagggcctcatcctgcatcataacatggtggacagcatcacatggagggaagtcgcaggagacagagccgaacaggcttttataacagaccctctctcatgataattcacacaccattattgctactgaaccattaacccactcactcaggaatgcattaatccattcaagaaagcagagacttcatgatataattatctcttaaaggacccaagttttaatcctgttacttcacagattacgtttcagcaggaatttcagagaggacaaacaaatcataggaccatttttttcaattacacttccataagaattcctcaattttacttaatcttttcagtgaataaagtatttgattttgcaattagattttgattatgggatagaaagcacaaagaaataaacttttgtggaaaccatgattgtttatttttcttccacctatcagtctaggtatttataaaactcaacttgactttttaaaaaattatagaatgggcatgcaaataggcagatactcctccatcagaatcagcttctcctattcttttttttctttttttttttttttttttgagacagagtcttgctctgttgcccaggctgaagtgcagtggcatgacctcggctcactgcaacctccacttcccaggttcaagagattctcctgcctcagcctcccaagttcctgggattacaggcacaggccaccttgcctggctaattttttgatatttttattagagacggggcttcaccgtcttggtcaggctggtctcatactcctgacctcaaatgatctgcccacctcagcctcccaaagtggcttctcctattcttgaggatatcaacacatctacagctgacatttcaactattatgatgggctaccaagggcatgaagtgacagaagatctaagatccagatggagaactgtaagttgatagaaacaccagtgaaatttcctataggaatttcttttggccacatcatgtctgagctaagaactataacccacttttcaagagagtgaatactttatttacctgaaagctctccatacctggacttcacctggacaggggaggctgcagagggacaggttagttcctttaaggagacaccatgagatgaccagggactatccaaactatccatatccccacagcaggctccccactgcacctggactgccacctgccacccttctacttctctccaaccttggcttccagctggagctggttggagagtggagggactacactgtgagccctggagactctgtgtggggtacaaagtcctttgtttgcaaccaaacacaaattatcagctcctgttagcaagagaccatgaggtgtgtgaaagaaaaagaaaaaaatctttttttttttttttttgagaccaggtctcacactgttacccaggctggagtgcagtggcacgttcttggttcactgcaacctctgcttcctgggcacaagcaattctccagccttggcctcctgagcagctgagattataggctcagaccactgcaccacgctaatttttgtattttttgtacagatgggatttcactatgttgtccagactggtctcgaattcctgagctcaagtgatctgcccacctcaaccttccaaagtgctgggattacaggcatgacctactgcgcccggcctaaaggctttattgtctataacaataaataaatgcaaaatctacggatcggggagacacaggctccagtgtaagacaaaaattgagctccaaagaacaaaaagaggtcctggcttaaatagggaaaggtcctgcgctagacgtcaatatggtctgtacatgcaaatgaggattgaaactggttcagacctcactggttgaaaataactgtgtctcagttgggtagtttctaagcccaaagccagtggtctctgtagggtgcccctttcaggcagctggcaggagatttccagccacgtgtctcggctctggtttcagaagccatcttagctcagaggtgcaaacaggatgtttgtctagatctgccctctcctgggaagaggaatgcatgactgctcttctctcaccccaccatggccccttggctcccatcatcttcatctgagtgtctctttcagccagaagacgtccatctcctctggacgtctttagagcttcatttcacactcccagcttgctcaaagttccaattgcccctgccggggaatgaggcccaacattcccaccagaaccaggctcagacctttctctctagagcctaaaatacaatctcaagtaatgacaagccaatctcaattctgcctctaggcactaactccccattcttggctccaaagacagggtcaccttctgaaaccacctttgcaaaattatgacagtaatttgagtctgacaaaattgactccatcttgtttctaacctccaagctatgctcggtcattcctggacatagatcaagctgctgactttgagagaaatgtagtttatttatttttattttattgttattatttatttatttactttttgagatggagtttcgctctgtcgcccaggctggagtgcagtgcactcggctcactgcaacctccgcctcccgtgttcaagcaattctcctgcctaggcctcctgagtagctgggactacaggcgcgtgccaccacacccggctaatttttgtatttttagtagagacggggtttcagcatattggctaggctggtctcgaactcctggcttcatgatccacccaccttggcctcccaaagtgctaggattacaggcatgagccaccacgcccagccctggttctgttttcttgaagatagtttcaacatgtacatctgcttgcagggttggaatacctcacccctcactggtgagggacaaatctgtggtatctcttttattcattgaatcaaagtgctgtgcctttgattttacaaggtatgtttcataactttaaagaaaaaaacatttttcttccttatccaaatgtaactttagtaatttagtgaatgtaaaccccattcatttttttgtatcttttccatgtgtgaatgcaggtatatatcgaagaataataattactcgctgctttatcctttattttcatgattatcatattatcaaactactcaataactcgattttttacaaacagtatgtccgagaacactcacacaattacacagatctaggccttttttttttaagctgtcctagcttcttacattatatgatgtgtcttctttgggctcagtgttctataagaatgtccaagagtttgtctatgagacacatccagtaacagaattgctgggcatctatgacttcaataaatattccaattggctgtccaaagtgatagtgcaaatcacactcatcacctgcattggagagttgctctttacctattctcaatcttatagtaagagaaggaagatatttacaaaatgaagtatgtctgcatgttatatgacttggaaatatgtgcaaaacatgctttattctgcaaattagtatcacatgacacaattggttagaatgtaaatatgaaaaacatcatacaatgtagaagaaggaaggggaagggggaatggggaaaggaaaggcaagggaagggattatcaaagtctttacaatatagattatatgatgagtttagagttttcaggactgtaaattcagagtgcgagaataaaagaccaagcttttgtttggttactctctgtattgcttaaactatcataacatacatcattttgtaattaattaaatattgtcaagaaaacaaaatggaaataacacaaattctatgcagtggatgtgttttacacaaagccccgagggaaccctgcagttcaggaaatgttgctcctctagaaggcaggcgccactatgtgaaaggcgccccctagtgggagggatgcagcctgaagcgctgcacagggcagcattggcaggacccgctctgatggacagaactccagaatacttgagaagtgattccacatcctgaagctcaaaattatgaaaattgtttcaaagtttggggcttttttccaaacactcaggtcaacacaaggcattcaacttctcgtctgggcactctcagatcttgtgggcccacgtccagaggtgactcagtcaaaacactggttccaggcagcagctctcagtgaagggggtgaggaggggtctgcacacctgctctagcacagaagccccctggggctctttacagtgcaaagctggggctgcaactccatcgggagtccctgtcttcaacggagaagcctcaggtgattctatgccttaagtgtatgcaggctaggctgatgttgggatgtccttcacagtcagagctttggtgggctgtctgtgaaaggacacatggctgctgttccagcaggccacacatcatggctggagatgctgtcccggtcgatggagatgacagctttgctgtagccaccttagacacccctccatacaaagtctgggcagtggggtccttcatattcttgtactgcttgttaggtatcttttttttttttttttttttttttttttgagatggagtctcactctgttgcccaggctggagtgcagtggcgcaatctcagctcactgcaagctctgcctcccgggttcaggccattctcctgcctcagcctcccaaatagttgagactacaggtgcccgccgccacggctagctaatttttttttgtattttttagtagagacagtgtttcaccgtctctactaaagatcaaggatggtcttgatctcctgacctggtgatccacccacctcagcctcccacagtgctgttgttaggtatcttctaaggaggagacaatgtctgagacagggactgtgcagagcctctgtcttctgaagcacagattgctttggatttggcaactgctgtcatttgggggttgccttgcttgctgccttggtgcttgttagttttgttctccatactctagctccaccttctcaggacactgctgccctaccagaagagaccagcagctcacagagccttcctgagttcagcatctttatgtgcaagctctgcagagcccttttcctcaggcttctgtgtggatggttgtgggatgacctgtggatgatgctctctgaagcctagcaccatttcctagaaacacagtcctggtcccagcagtaaacacttgcagacttctcatccaagagctgctggatttgggaactgggttgctctgcagccagctatgttgctgcatatcttacccaagaggcgtttgtggagatctgatcactatttgcaaaggtgtgtgccacaactgagagcacagggactctccattacttgggaacatcaaccatgctgctgggactgaagggaaagtgcctgcttccctaaatcctgtgactcatatacattagaacctgatcctggaagaccagcttctcctggtaattctgaggctgaggctgctcatgatgacattcccaaccattctgctgatgtccttgaaagagtcagtaaagaaaataacctttctgttcctcctgctgctgcctctctccgtgcacaccatgaacacagcacaaaggggagggccttgcatgctggctttcccccatctcaggcttgtccctttcagaatactgaggaggagatgcagaaggataaggaaataatgctgatctacatcgacaagggccattttctgtatcacctggatactccaaatcacagcttagtttccttttaatccataaggctacagttatttgagccatcatgttaattgggagtcccctgtgtctccacggaagagtggccagctccacccagtagaacttcctgggtacaagaagttctgctcagggtcatcattgggagattccacctggttttcctggattcttgtaaatgggtggcctttggcagaggaatcatgcagttccctggcagtgaacattctgtgtctctctctaagtggtggtctggcttttattttgaaaccagttctaaagagaaagaacagtttgttaattcaatctgttggttaagacatattgtacaatgcatttccacaatgtagaattttacagttaagtttagtctcaggatgatcaccggcttgtttcctgacttgaataagacacaaagaatgaaggcaatcctttgtggggctgcacattatggaggttataaattgtgcacaatcccaaaatttcaactgcctcatagttgcagtggcccttttgtacatgcaaacctggacctttcaaaatctcctaccaacctgtttgcaatcctccgcatttggaaagaacagacttccagcctttccctaacttatttattttactcacgctgacctaccaggataaacttgtgattcaatatactctaaattatactcttaaattcactgtattcaaagactatgcataaaacaagcaagagttggccgggcacagtggctcatgcctgtaatcccagctctttgggaggctgaggcaggtggatcacaaggttgggagttcaagaccagcctggccaactggtgaaaccctgtctttactaaaaaaaaatacaaaaattagctgggcatagtggtgtgtgcctgcaatcctagctacttgggtggctgagggaggagaattgcttgaacccaggagggggaggttgcagtgagatgagattgtgccactgcactctggcatgggttacagagcaagactttatctaaaaaaaaaaaaaaaaaaaggaacaagcaagagtttgtaataacctggcaaggcatcttacacgtgactctaagcattccatttgacacctctagtcttcatttttttccctcctccacaaagagaggataattacacctgccaaccataatccctaggggtttaggggagggagaaatgatcaacactgttttagactctccatcctaataagctctgttgtggtaccgcacctagagccctaccatgcaggtaaggatgtctgggggccttttaatatttgatccctccaggaacccctctgtctgcaagttcagaattgctttaggttaatagcgcttaaagctagaaagatgtctgatccacacctataatgactgcttaaaacaaagttgtgggccaggcgcggtggctcacccctgtgatcctagcactttgggaggctgaggtgggtggatcacctgacatcaggagttcgagaccagcctagccagcatggggaaacctcatctctactaaaaatacaaaaattagctgggcatcatggcgcatgcctgtaatctcagctactcaggaggctgagggaggagaatcccttgaacgcagggggcagaagctgcagtgagctgagattgtgccactacactccagcctgggcaacagagtgagacgccatctcaaaataaataaataataaacaaataaataaaattgtgaccatgcacaatgaacctggcacctccagatatactcattttcttctcacaacaccatcacaacataattatacatattttacaaaaagataaggtgcaagagtcaacttgcaccttataagtcaacttgcacctctataagtcagatgttatagagccattaggaggtagatctcatgaggacccaaccaaaagacaagacctcactctctcatgacagagcctcctgtggccctcccctcaaacatgcttgcttcctgatcacatcatgggcactttctttaagcacatgcaggccagttcaattcagtgtaatttgattagccgttatctatgaacttccttttaggaatctatccctctgacaagtagaaaggataaaacataattaaaaagcacttttgaccatgagcaacccaactgtcacaaagttagaaatgtaaataaatgaacagtataagaacgttcatttaaatgtttgaccaagcccaggcgcaatggctcatgctgtaatcccagcactttgggaggctgaggcaggaggattgcttgaacccaggagtttgagcccaggctaggccatatggcaaaaccccatctctacattaaaaaaaaaaaaaaattaaccaggcatcatgtcctgtggtcccagccactcaggaggctgaggtgggatcacttaagcccagggagtcgatgctgcagtcaaccacaattgcgccactgaaatccagcctgggcaacggagtgagaccctgtcacttaaaaaaaaaaaaaaagaaatcgatcagtccttccatttctatcctggttatttactttatttggattttctacttatttgcaggaaagcatttgtttgtatttcccttgaaatgttctcacttcatgaagctttttttttttttttttttgtgatggagtctccctctgtcacccaggctggagtgcggtggcatcatctcagctcactgcaacctctgtctccaaggttcaagcgattctcctgcctcagcctcctgaatagctgggattacaggtgtctgccaccactcccagctaatttttgtatttttgtagagatgggtttttgccatgttggccaggctggtcttgaactcctaacctcaggtgatccactcacctcggcctcccaaagtgctgggattacaggcatgagccaccatgcctggcctacttcacgaaacttttataaaaatttcattacacaatatttgcctatacttttcctttattctccaaagttgcttatattctttgttttcactaacacaattttgtccttctgtcaagcaaccaatatattcaatagtcaaaggataatcacagatgagaaatatgaaagtctccttaaatgtgtatatataatctgtcaggggattagagaatatattgtatgtgtaaataatataaattcaaatacaataagatgttgtgctttaacaatttacaatgatcatatcagaaaatcaccaaacaaaatattagttcgtgcaataaatggttatgaagcaactactgatgctgtggggttctgtgccaagtcccgtgacactatcaagccaagttcttcctcctgcacttcagacttgcatgcctaactttttacttactccttggagtaagtaaactcttagaagtttaattggcacaccaaacttaacgtgtgcaaagtaaaactccaaatgtctgacacaaaagtgctcttctcccaagctcccctgttagttaaaggcatctccaatcttccatgtcaagccaaaactttggagctatccttacctctggcatccccaataactcagcaaactataagccgctccacctttaaaaattaaaggtcttcccagttctctaattccacagccagcacccttgtcaaaaccatcactgtctctatcctggaaaattacaataatagctttttcttttttttgaaacagagtatcgctctgtcgtccaggctggagtgcagtggcgtgatgttgcctcactgcaacctccacctcctgagtttaagaaattctcctacctcagcctcctgagtaactgtgattacaggcgcgtgccaccatgcccggctaatttttatatttttggtagagacagggtttcaccatgttggccaggctggtcttgaactcctgacctcaggtgatccgctcaccgcagcctcccaaggtgctgggattataggcatgagccaccgcagccagcctacagtagcttcttaacactgctcccaaatttgcctcacaatagtctattttccataaaatgcatatataatatattcacacccacattgagatgaacaacaaccaaaaaaaaaaaatcaaatttttttttttttttttttgagaatctcactgttgcccaggctggagtgtagtggtgccatcttggccctgtgcaacctctgcctctgaggttcaggcaatgctcctgcctcagcctcccaagtagctgggactacaggcacgtgccaacctgcctggctaatttttgtatttttggtagagatggggtgttgccatgttggccaggctggtctcgaactcctggcctcaagtgatctgcccgcctcagcctccctaagtgctgggattacaggcatgagccactgcgcccagcctaaaaaaatcactttgtgctatgtgataaaatgctattaaactttttcatgcttctttacattttccacattatctataaaaagacatacccatgcaaagcttttaatattttacttacatcaattacaaacacaggacaagagactgtccagccagtttttccctggttgtaaaattaggataaggattctgtgcaaatgactgctgaagtacactcagcttatccttggcaaatttaagccacggttttacacttcctcttccccatcttcttgttcttacttcattatgactggttaatgggagatcctgaaaaatgtacaaacagaaagagaaaagcattggagaatactagtaatatccagagtggggggaaaaaaaaggtcaatcattggctatttcataaaatttttaaaaagtggagcccaatctcatacctgtacataataataaagttactaatgagattagccaagtgtagtgactcaggcctgtaatcccattgactcaggaggctaagatgggaggactgcttgaggccaggagttcaaggatcagcttaggcaacatagcaagaccccatctctaaaaaaatagaagttcaaggctgcagtgagtcatgattgtgccactgcactctagcctgggcatctgagcaaggccctggcaaaaaaaaagaggtaaaataaaaatttttaaaaattagctgggcttggtggcacatgcctgttaacctagctgcttgggaggctgaggtgggaggatcatttgagcaagcccaggaggtcaaggctacattgagccatgatcacaccactgcactccagcctggctgacagagtgagaccctgtctcaaaaaaaatttttttttaattaagatacaaagctatcctgtgttcctggattagaagaactaatattgttaagatggctctactacccaaagtgatctatatctttaatgcaattcctatttttaaaatcccagacatgttttgcagaataggaaatttcatcctaaaatgtatgtggaatctcaaggtatccacaatagacaaaacaatctttaaaaaggagaacagagttgaaggtctcacacctcctgattccaaaacttactacaaacctatgatgaaacaatgtggtactagtggatgtacaagtgtaaatatattctgtagatattttcttgaggttaccattgcaattatagtttggtactagcacaaaggcaggcatatagactggtgggatagactagagagctcagaaataaatcctcacaaacatggtcaaatgattcacaagggtgtcaagaccattcactggggaaaggacattcttttcaacaaacagggctgtgggaaactgggtatccacatgcaaaataatcaagttggggccgggtgcagtggctgatgcctgtaatcccagcactttgggaggccaagggggcggatcacgaggtcaggagatcgagaccatcctggctaacacggtgaaaccccgtctctactaaaaaatacaaaaaattagcaggacgtggtggcaggcacctgtagtcccagctactcaggaggttgaggcaggagaatggcgtcaacccaggagggggaggttgcagtgagacgagatctcaccactgcactccagcctggtcaacagagtgagactccatcttaaaaaaaaaaaaaaaagaaactacaacccaacaacaaagaaaaaaaaacctgattttaaaatgggcaaaggacttgaacagatatccctcccaaaaaggtatatgaatggccattaagcacattaaaaatgttcaccatcaataatcattagggaaatgaaaaaaaaaaatcaaatccacagtgacacatcatctcaccccccatctcaccccattaggataggatggctactgtcaaaaacaaaaaaaaaacccagtaagagttgtcaaggatgtgaagaaatgtaaaatggtgtggccacatgaaaaacagtatggtgggccaggcgtggtggctcatgcttgtaatcccagcactttgggaggccgaggtggatggatcacctaaggtcaggagttcgagaccagcctggccaacatggcaaaaccccatctctactaaaaatacaaaattagccgggcatggtggtgtgcaccagtaatcccagctactcaggaggccaaggcaggagaatcccttgaacctgggaggcagaggttgcagtgagccaagatcacaccactgcactccagcttgggtgacagagtgagactctgtctaaaaaaaaaaaaaaagaaaaagaaaaaacattatggtggtttctcaaaaaattaaatattattatatgattcagcaattccacttttgggtaaatacccacaatcattgaaagcatggacttgaacagcaatttgtacacttatgttcataggagcatattgttcccaatgccatgacccaatataaaaacttcccaacatttctaaaaagcaaatgtgcacacgtaacacttgtaaaaaacataagttttttacgataaacactcagttcctatagtaaaaacagcaaccaaaccaacttgctttgtatggccatagacccacagtgaggagcaggacctctggagcctgcctgccagtgattaaatcctggctctgagactgacaggccacagtgtagcactgactgccagtgccctcctgggctactcttcttgtctctggctgctctccaggccctgggatggaggccattcctatggcatcttcttggaggacttcatgttctaaaggcatcacagttgagccatgattgcttccagggctctttgatgcagattcttgcctctgaaatatagtgatgagcccagtggacttctgggcccactgtatattatcggggcacctttgacttaggttattactcattaaacacaacgtattaagatacaaggcaccgctggaactaaccggagacttctctcaaccagggctcatctagaaaaagaaatccagaatccccatactttgcaagcccaccttcccagagaacaggagtgtcagtttcttccatatcccaggtttgaaaagctccaaattatttctgaatttcatgaaatatcaaatctgtgaacaaaagggaaaaaaatgcctagggccatttctacaattcttccagtatagctcttttgctttgaggacgtttttgttttcagtattcaccctgtttacatttaaccatacaggaaagtagacggaagcgtataattagcctgatgatcttatcactgaaatttaatatatagcaatacctggccaattttatctccttgacaccccaccctcattattttgaagtgaatctcagacatgtcattcacccgaaaatacatccatatgtatctctaaaatataaagtctctcttaatgctatgatgggttaagatttaaatacctgagcctctagtaaaatcctatacccaattctaccatacggcaaccacacacaattactctgatgaaatcagctgttcccagcctacaagcttgaacttttgaaaggtgaaagtcaggcctagcagggtggctcatgcctgtaatcccagcactttgtgaggctgaggtgagcagattgctttgagttcaggagtttgagaccagcctgggcaacatagcaaaaccctgtctctacaaaaaaaccaaaattagccaggtgtggtggtgcatgcctgtggtcccagctacttgggaggctgaggctggagaatatagctttgagtccaggaggcagaggttgcagtgagccaagattccccaactccagccggggcaactgagtaagaccctgtctcaaaagaaaaaaaaaaaagtgaaagcccaaacacctattaatacaaaacactaatgcattaggtaaggagcctcctgcaaaagaaacacgctttggtgtccaccacagaaactcaccgttggaagttcagatgaatctctagtccaggttctgaatgataaagtgattaactctgaagcagcaatcatcaaacataaccctgagacgccctccctcacacaccctagacacagccccgccccagacacagccccaccctaggcacagccttgccctagacacacctcttgatggctttacctaacttttcaaatcccattcactcaatgagcacccagtgaaaacaatttgcttatttaatccctacaacacccttataatgtgcatcctattttaatcctacttagacttgaagacagggggacagaaaggtttagagcacagagtgagcctctgacccaggcagtctgaccttgaacctcctgcctgtggccatcactttcacatttatagactgcacgctctgtgaggacggaagccttgtcaggctcacagaagatccacatcacctgatatatcattgcttacagaatactgagattggaggcaggagtgaccagagattaacactgaataaggacattctaagatataaaactaatgttttataaacattaaaccatttgctaattcatcttattctaaaaactaccctatgagataccaaaacctccatattacagacaaggaaactgtgggcttttctgcttttttcacaactctaggacattgtactttcccaaatgtgtggaataaggtaataacacttggagggttttttgtcctccaggtttggaaaatgcagctcatcctcgacaagtgttttatattaatccatcttaattcagagtgatacatatattcttcgttctacttaaactaattgctacaatttatgaggactcattatatggccggcccaaagaacagagttttcagacattatcttacctaaatcttacagtgccttacggagatatatattattatacagatgactactgaagcacagagagattagctaatttacctgaggtcaaactctaagaagaggaaaataactagcaggaattaaagcaggtgaaaataaagtttgaattgggcaaggtaatggctgacttgcaggaaggaaacagccccaaatgatttcggtttctcacttcattccagggtggaccgcgcctctgcaacaacaacaacaacaacagaaaaaaaaaacaggaaaaagcaggaggaacaactcgtggttttcttcatttccgcgcaaggatggttaacataacctcctttcatcctgggactccagcaggtcctttcaagcagtgccagatgctttggggtagttgaagaaatattttgggagctggaagtcttggagaatatcaacgactgagagagtagagcaaaccaaaattagattgggcctatgctgagttctttggcttttttgtcttcccagtaattcgggcccgctttgtggttgttgatttattattttttgagaccgagtcttgctctgtcacccaggctggagtacagtggcaggatctcggcacactgcaagctccgtctcccaggttcaagcaattctcctgcctcagtctcgcgagtagctcggattacaggcacgcgccaccacacccagctaatttttgtattttttgtagacactaggtttacgcaacttcgccgaggccggtctcgaactcctgagctcaagtgatccacccacattggcctcccaaacgctgggattacaggcttgagccaccacgcccactcgtgctttattctcagtaaccttgaaatcacactaggtggcgaccttccccgtccgcccccatcaagctgcttccaaaaacatttttaccaggcaccttcactttctttcttttcattcttttctcaactccagtctctctgttctcactgcattgtttagacatcattggtaaaagttaacaaatcaggtcctaaattgcccgatcatacggttaatcttctttcctaagtcatcgaacattgttagccaatctttgtcttccttgaaagctcccctacttcagattttttttcttcttgctgttgcccaggctggagtgcagtggcgcgatctcggctcactgcaacctccgcctccctggttcaatcgattatcccatctcagcctcctgagtagcttggattacaggcgcaagccacaacgcccggctaattgtatttttagtagaaacagggcttcacaatgttggccaggctggtctccaactcttgacctcaggtgatccgcccacctcagcctcccaaagtgcagggttacttacaggtgtgagattctttcctttttttttttttttttttttttttttttttttttttgagacggagtattgttctgttgcccaggctggagtgcagtagcatgatctcggctcactgcaacctccacctcccgggttcaagcaattctcctgcctcagcctcctgagtagctgggactacaggtgcccgtcaccacgcccggctaatttttttttgcatttttaatagagacgggggtttcactgttagccaggatagtctcgaactcctgaccacgtgatccaaccacctcggcctcccaaagtggtgggattacaggcgtgagccaccacacccggccctggcccagattctttatcaagctcggctttggtggatgtccactgagtccttaatcctttttcaaaatatcgcgaaacagtaagggcccagcttatactgagtgctatgtattgagacctgcaatgcagctgtgaatagcacaaatgcagtctctgaaaatcaacgttctggtgaacttttaaaaatacgtaactcctggccgggcgaggtggctcaggcctgtaatcccagcactttgggaggccgaggcaggtggatcacgaggtcaggagatcgagaccatcctggctaacacggtgaaaccccgtctctgctaaaaatacaaaaaattagccgggcgtggtggcgggcgcctgtattcctagctacttgggaggctgaggcaggagaatggcgtgaacccgggaggcggagcttgcagtgagctgagatcctgccactgcactccagcctgggcgacagagcgagactctgtatcaaaaaacaaaacaaaacaaaacaaaaatatatacatagctcccaattatcacctgcaaagcaaagtcagaatgtattagaatgcctggcagggagtttcatgacctaactactattaaactcccattcagaccaggagtggtggctcacatctgtaatcccagaattttgggaggccaagacagatggatcacttcaggtcaggagttcgagaccggcctgaccaacatggcaaaaccccgtctctactaaaaatacaaaaattagccaggtatggtggcacatgcctgtaatcccagctactcaggaggctgaggcatgataatcgcttgaacctgggagtcggaggttgcagtgagttgagatagtgccactgcactccagcctgggtgacagcaagactctatcccctccaaaaaatattttttaataattaaaatttaaaaaaaattatactaccattcagcttcgcctttgagactcaccacctgcgaaatctttgttctaataaccagccttgtccatttctaggtgctgagatactctcggccctcttggcttcgtccatctgcttcagatgccacagaagagttccaagtgactctggaaaaaaaaaacactttgaccaaaacaaagttatcaacatggcaatttgattttaatggttatctggttaaaatgaaaaagacatcattagcaacaggtgtgtaagattctagtgttctgtaaaatgatcttgttttccttaagtgttctttttttttttttttttccagggttgggggcaggaaattcccagcttttggggacatttttccccactttttggatacaatgaattcattggatacaatgaattcattggatacaatgaatgttaaaagttccattaacttaatgtccaaaagcaagtttagtcctttggtttccctacttcaaaatgtagcatttgccttcttcatgaccaaaagtaaacatgtttgtaaagctatttatcattactattaaagcttgacaaaaccagtgaatttggcaaatcagtgattcagcaaattggctttcaacacattttgttgatgattttatgtcaattgactattcaatacatttatattttctcaaactgaatttcagctacttgtctgcttctttcacatcacaaaacttatttcactaaattgtaacaatacagaataactaacatttattatgtttttaatttgtgccacttttaagctaactgctggccgggcctggtggctcatgcctgtaatcccagcattttgggaggtcgaggcaggcagattacttgaggcgtgaagttcaagaccagcctggccaacatggcgaaatccccatctctactaaaaatacaaaaattagccgggtgtagtggcacacacctataatcccagctattcagaggctgaggcacgacaatcctttgagccggggcatggagtttgcagtgagctaaaatcatgccaatgtactccagcctgagtgacagagggagactccctcttaaaaaaaaataagctattcactttccaaacatagatatatatgtttgaaaagtgatatatatacatattatatatatatatatatatatattttaagttatataggtcaaatttctgcacaaaatctaattatcatcattatcattatttgaagatttttaggaagggcaaacacaccctggtttcctcccttctactacaacaccctcgtggattatccctgccccctcattcattaattcaatgctctgagaacatttctgtttgtaatctttgaatacagaatctcataagtgctaaatagaaacctgtattaaaacattattatgctgcctctagtaaattctttttgattattccgttgtctgtcatatgaactacagtatgctcaacctgagataatttgtcttgttcgcagttgactctacgaaaagagtcaaactctgtaaaacatttgaagagatttattctgagccaaatatgagtgaacatggcctgtgacacagccctcaggatgtcctgagaacgtgtgcccaagctggtcggggtgcagcttagttttatacattttagggagacatgataattccatcaagtatatttaagaaatatggccaggtgcagtgcctcacgcctgcaatctcagcactttgggaggctgaggtgggcaggttgcttgaggccaggagtttaagaccagcctggccaacatggcaaaaccctgtctctactaaaaatataaaaattcgccgggcatggtggcatgcgcctgtgatcccagctcccaggtaggctgaggcacaggaatcgattgaacccgggaggcagaggttgcaatgagccgagattgtgccactgcactccagcctgggcgacagagcaagattctgctcaaaaaaacaaaaacaaaaacaaacaaacaaaaaaaaaaaaacaggaaaagaaagaaatacattggtttggtccaggaaggtgagacaactcaaagctgtgggtgtgtgttggggggtgcttccagcttataggtagatttaaaattttcctggttgacaattggttgagtttatctaaaaccctgggatcaacagaaaggaatgtctaggttaagacaaaggattgtggagacccacattcttatttacagaggaagccttaggtagtaggtttcagagagaataggttgtaaaatgttttttatcagactcaaagtctgtgctgatgttaatgtcagagacgtataacaaggcatgtctcactgccacttcccatcatggtctgaaacagtctctcaggttaaattttaaaagagccgtgactgaggagaaagtacattcagatggttggagggctttagaattttatttttggtttacattctcccccttctggccaatatttaccagaggcaacatcaaaggccatcaaatctttattttgtcccatagcattgccagggtggcgtggctgcctgtcccccatccatcctgtcccttggtgggacttcctatggctgagggccttaagagtcaaaagactggccaggcgtggtggctcacacctgtaatcccagcactttcggaggatgaggcaggtggatcacctgaggtcgagagttcgagaccagcctgaccaacatggggaaacctcatctctactaaaaatacaaaactagccgtgcgtggtggtgcatgcctataatcccaactattcaggaggctgaggcaggagaatcacttgaacccgggaggcggaggttgcagtgagtcgagattgtgctattgcactccagcctgggcaacaagagcaaaacgccatttcaaaaaaaaaaaaaaaaagtcaaaagatttgtagccaattaattgtactaggccagataggaatggacgtggacaggcattcattacctcttaaattattattttaagtaaaacgccaacaaacaaaaacctaaaggcaaagctgcaacactgacttatttcaacttctatgtgttgagctactgtaagcttggttttatagacttacagcaattagctatataaaacattggcgatgttctgagaaaatattttaaatatgtatatgtatatatatgagagacagagagatttatgttctcaactcataactgggataactatacccaggaggctttgttgtaaggtatctttatcctgttagtaaatattttcctttaattttacaggaagcaaaaatttattggccgggtatggtggctcatgcctgtaatcccagcactttgggaggccaaggcgggtggatcatctgaggtcaggagtttgagaccagcctgaccaacatggtgaaaccccatctctattaaaaatacaaaattagctggctgaggtggtgaatgcctgtaattccagctactcaggaggctgagccgagatcacgccactgcactctagcccggacgacagtgccagactccgtctcaaaaacaaaaagtatttatgtttggggtggatgcaacagtgacacataatcatttagaaggcaaagttccttgttttaccagctgttgaggcatctttatactcctccttgatttgaagggtttgaccttgacctaacttgagccctcaaaactggctcttacaatctcatgtacccaactcttccacaaccctgggtctagagggagggtgcttgtatagttttagcagcagggcatttgcagtgaaaaacacactggggcccagtgggatgccaaatgagggagattcacatctctggtcttcagaataccatgattttggtttccttggcaataaaacaaggagaaagaaataacgtttatagtttcacaatcaaaagagtatttgtgtgtcacaacagaaaaagaaacttattccattagggcaccagctaaaaatatgaagaaaaattatcatctggtatctctagaggattatcgtagccaagaaataataattcaatctgaactcaaaaaagcaaaagctaggtctgaaatctagcattaactgttacacttttcctttgaaacaatttctctagcctctttttttctattaaggagaatttatactccttaaacacaaacaaaatttgtgtgcaaagtaagttttaggcttattatactagcctgattatttgcataacatgcagcaacaatcgattggccatataggctccttttaagttggctttgctggaactttacctaaaaatatgctactttggttgggcgtggtggttcatgcctgtaatcccagcactttgggaggccaaggcaggtggatcacaaggtcagtagttcaagaccagcctggccaatatggtaaaaccccatctctactaaaaatacaaaaattatccgggcgtggtggcacgctcctgtaatctcagctactcaggaggctgaggcaggagaatcacttgaacccgggaggcagaggttgtggctgctgagctgagattgtgccactgcactccagccaggcgacagggcaagactccatctcaaaaaaaaaaaaaaaaaaaagctactttagttaaagtcttggtaagataacgagtgtcttcaattgttctgtttcaaaagacttactgaacttatccaaataactgtattgtaataaaactacaatccaaattttgaagaacctagatggaaaggtaaatttgcttacaaaaacatacttctcccggctgggcgcagtggcttacgcctgtaatcccagcagtttgggaggccaaggcaggaggatcgcttgagtccaggctgggcaacgaggcaaaaccccatctccacaaaaaatataaaaattatgccggtgcagtggctcatgcctgaaatcccagaacttgtgggagtcccaggcccgtggatcatctgaggtcaggaagtcgagaccagcctgaccaacatggtgaaaccctgtctctattaaaaatacaaaattagctgggtgaagtggtgcatgcctataatcccagctactcaggaggctgaggcaggagaatcgcttgaaccctggaggcagaggttacagtgagccaagatcatgccattgcactccagcctgggcaacaaaagtgaaactccgtctcaaaaaaaacaaacagttagctgggcatggtggcacgcacctatagtcctagctaccgggaggctgaggtgtgaggattgcttgaccccctgggatggaggctgcaatgagccgagatggcgtcactgcactagagcctgggtgacagagcaggactctgtctcaaaaacaaacaaacaaaaaacatattcacccaaataagtcaaaaagaaaaggattttcttgacccttctttaggcagagaagcagctttcaaacaggatgtttgtttaccttggaaatgccattcacaaatcaagcagctcatgagagctgtctatcaggcactatagaatctagcagctactcacagagttagaattagtcctaagaaaggggctccctgcttatcagtatctcctccttatatcccaaggtagcaagattctatataaaccatttttattttagcatggaactcttttggggaccattatttctattagcatagggtgtggatcacatgaggccaggaattcaaaactccgtatctactaaaaatacaaaaattagccgggcgtggtggctaacatctgtaatcccagcactttgggaggcagaagtgggtggatcacctgaggtcaggagtttgagatcagcctggccaacatggtaaaaccccatttctactaaaaatcaaaaattagccgggcatgatggcaggcacttgtaatcccaaacccaggaggcagaggttgcagtgactggagatcatgccattgcactccagcttgggtgacaagagcgaaactcagtctcaaaaaaaaaaaaatacaaatattagctaggcatggtggcacatgcctataatcccagctactcgggaggctaaggcacaagaatcacgtgaacctgggaggtggaggttgcagtgagccaagatgttgccactgcactccagcctgggcgacagagggagactctttcaaaaacaaacaaacaaacaaacaaacaaaacccattagcataggggtggcttcaattaacattccctagtaaggcaataaatgcctcccaggtggatattctctagttcagtcattgtcattgggaagtactcaccgtcttttgccatcaatcccaataaatgctccacaaagggctatgaagtagagaatttgtcatgactagcactctagcttctactctatgctttgtgggctcaggcaatcttactagttcccacatgcagaataaaaaaaggcaggtccaaagatatttatttgcctattgtcaaaaaaaaaaagattatctcccttactttagataattaataaaaagttacaggagccaaataaaaggcaaaggagagattaatcatccaaggccttttcaaaagagaaagagctgaacttctgagatatcaatctgaagagtgtcaaaaagatagattatagaatttaagaattaaaagcttcttgcattaagtcaatattttaaataaaatcttgttttaaccaattatttagttttgtattagtggttttgctaatgagtactaagctctgacttttttatttatttaaacattttttatttatttaaacatttatttatttatataaaacccaccccaagaaagaatgatctttgcttgtataatttttgataaataagacaataatttttgataaataataaactaaaaaatttatttttattattttatgcccaaattcctatctaaggggtctgtggagtcatgccctcagataggttttatttaaccctatatatcatgatttattttccaacttgactctggcataacattaagagacaaagaagaaaatcaaactattttaccctaaaacgtgtttctttgccatattttgaaatggtcctgcaaagctgttctttgtgggggaaaatttgcatctgtaaagaatctctattaacatagctagatctttttcttccagaccctcccaatcctaaagagattaagatctgaataggaaacatttttcacctattgtctctaaggcagctacaataagacttcaaaagaactttggtctccagtatctttatcttaacctgaacattccctttctatctataccaggtctttagacaaactcaaccaactgtcaaccagagaatgttttaaattcacctataacctggaagcccctgctttgagttgttccatctttctggaccaaaccaatgtatttcttaaatgtatttgattgatgtctcatgcctttctaaaatgtataaaaccaagctgtgctccaaccaccttgggcacatgttctcaggacctcctgaaggctatgtcacaggccatggtcactcatatttggctcagaataagactcttcaaatattttatagagttcaactcttttcattgatattaatatcgaagacccatctctagaaagactatcataatttcttcttaatcacagccaactgaattatataacccctttaaaaaaaattaaattcctttttactaaccttattatgacttacatagaccatttacaacgtgcttagactgtttgttttgtcctaaagatccctctttcttgaaaaaccagttatcttattttaggaaaaatttaccatacaagattctcatataaaaattttttttctttttactttctttaccaaaaataactctttatatctgtagctttccttacatctcatatttcctagttctgtttacactgttttatgcataaccttaaataagctttgaattaaacaaaggtatttacctttttttaaaattttttttaaattcttttttttttttttttttgagacagagtctcgctctgtcacccaggctgtagtgcagtggcatgatctcggctcactgcaacctgcacctcctgggttcaagcaattatctgcctcagccttttgagtagctgggattataggcacccgccactacacctggctaatttttgtacttttagtagagacagggtttcaccatcttggccgggctggccttgaactcctgaactcatgatccacccgcctcagcctctcaaagtgctgggattacaggtgtgagccaccacatctgccatatttaccttttaataagaatatttttaaaaagttttcctataatttttaaattgtaaattacccagatattcaattaatacctattatttaatatgactttagattctaaattttatgacaagtttgtttataagcatttagtctatacatttacttgattatctaatagtttacctaggttatttatgaaaacagtgatagtcatcacttcaagttaattctctgttaattatttttatagctgtgaatttcaggtgtttacttaagtaagaagcttaaggtttaatataagggtgtttttaccaataactcaggatttagctgttttcattaaaccaacaatgttttgtgtcttatttatcaaaaattatacaagcaaagatcattcagttttgggctgggttttatagttttataactcttatggtaaatcttatagcattctgcaggaataaagcatgaaaccacttgatcaataaatgcaaacaaaaatactaacaattcttaagacatttctagtattattttaccaacaattttaaagcaagcttatttattaaagattttacttaagtcacatgtgatacagaagggctgggctcagggctaaaccccaccattcagcctggaccacggccctaagggaaaacagctgaccctgtttttccacctaaataatgcctttttggcctgccacacccctatcctgtgcccataaaaagacttcagttgctaaagaaaaaataaaaataaaaataaacaggaaagaaaaaaacaaagaaaagaaaaaaagatttcaactggcagagcaacacaagcagctgagtggtgggaatacaagtggctgagtggcaagcagagaagcaactgaacattcgagactatggatagacacgacaaacttcagatagtgcggcttcagagagcggcccagccagagacagccaggcttcagggaaagatcaccttcttcccacatcattgccttttcacctccgcatcccgatgagagccacttccattacccagtaaaatcctccttatacactacccttcaatccatttgtgtgacctggatgtcagacaagaacccaagtgcctagaggacagctgctgccaccctgaccctccactgagctagctggcacttggccatctctggacagcagagctgaaagagcattgattgtaatatacttggatgctgctgcggggcccacacagagcctgctcctgccagagaggagcaactagccagttccagcatttgttcgctccagttcctgcactcactagcatgcatgatccctcttgcaaggagtggacagctgctggctcaatgaaaccagccactccagttcccacccatgaaaggggtcaagggaattatcccatctcacatgaacttgaaaaacatttgactagtctttttttttttttgataaagtatttgatttaagcactttcatttttctttaaaccacttaatgcaagctcttttatatctttttagtagtaaaatattatatacacaacacagaaatacatagacatattaggcataccaatagaagtacagcttacagattcataagacctatttttttttccttagacttttaaattcttgataacccattttattaccctaggcagttttagctaaagtactaaatttgcatattaaaggaaacaactcaagtgaaaaatcaattagcaaaatttacatctcaagaggaaaagtcaggtgtgctagagtgaagttaaaatgaatttaattaccaattaaaattatataaatctactataaaagccttttaaatatatatacacacacatatacacacatacacacaaaaaatcccatagcttttacttctgaactttagtcatgagataaatacaaatgcactgggttgaaaaaaaaaaaaagtttagatcaaaaagtggttttaggccaggcactgtgactcatgcctgtaatcccagcactttgggaggccaaggcggtggaccacctgaggtcaggagtttgagacaagcctggccaacatggcaaaaccccgtctctgctaaaaataaaaaaaatagccaggcgtggtggtggatgcctgtaatctcagctactcgggaggctgaggaaggagaatcacttaaacccaggaggtggaggttgcagtgagctgagaccgtgccactgcactctagcctgcatgatggagtgagactccatctcaaaaaaaaaaaaaaccagtgatttttaatctcaatagaaaagtaacagcagatgtaagtcagacagaaaagaaaacaaagaaaaggagaacttaggaactctatagtttgcaggtcaaccttaggtctctttttccttaatgtaaatgtgcacaaacaccataatacttcaatttcacataaactctagtaagtagagccaccataatactgatggagtgcccaaagggggtcattctccttgttttctcctcatacttagattatttgtttcccagtattttttaaaggaggaactgagctgtggcctagggcttttgtggaatgggtggaagtgtgctggttgcaggcaggactccacggtgtcacccctgagtcatcgttgccctcttatgtgtctcaatttctctctctgaagctctagcacctctcagagggctcaaaacctggagctcccatacgtgcttcctggatgagcctttttaaaactaattttgttgggggttccctgtagggctgctgcgctacatgtcatgatgggtgggtgaacctcacagacactcccacaaggcccctggtcacccaggggtgcctttcagctgggaggagtaaaatgccctttctctttggagctaaggaaactcagactctcatttacctacgaaagcaacagttcagtttctcattccatatcttatttatcaaaaattgtacaagagaagattatttgttttctttttttttgttttttgttttttgtttttttttttgagacagagtcttgctgtgtcccccaggctggagtgcagtggtgcaatctcggctcactgcaagctccacctcctgggttcacaccattctcctacctcagcctcccaagtagctgggactacaggcgcccaccaccatgcccggctaattttggtatttttagtagagacggagtttcactgcgttagccaggatggtcttgatctcctgacctcgtgatctggccgcctcggcctcccaaagtgctggcattacaggcgtgagccagcgtgcccagccgaagattattcttttttaaaaaatctaggtagatgtttaatttcctggttgacagttgttattgtattttttatttttattgatttatttatttagagacaggaactcactctgtcacccaggctggagtgcagtggcatgatctcagctcactgcaacctctccctcccagattcaagtgatcctcccacctcagccttccaagtagctggcactacaggcatgcaccagcacacctggctaatttttgcatttttagtagagatggggtttcaccatgttggccaggctggcctcaaactcctggtttcaagtgatctgcccacctcggccactcaaactgctgggattacagacataaaccaccacacgcagccctggttgacaattggttgagtttatctaaatacctgggatcaagagaaaggaatatctgggttaaggattgtggagactcaagttcttatttgcagaggaagctttcaggtagtaggcttcagagagaacaggttgtaaaatgtttcttatcagacttacagtctatgttgatgtcaatgccagaaaggtataatgaggcatgtctgactcccactttcagtcatggcctgaaccagtctctcaggttacattttaaaagagccctggctgagaagaaagtccattcagatagttaggggggggccttagaatattatttttggtttatattcatatttccagagcctagcaccataactgacactacactggtcttcagaaattaaattttattactattttattttattttattatttttgagatggagtcttgctttgtcaccaggctggagtgcagtgacgcaatcttggctcactgcaacctgtgcctcccgggttcaagtgattctcccgcctcagcctcctgagtagctgggactacaggcacgcgccaccacacccagctaatttttgtatttttagtagaggcggggtttcaccacattggccaggatggtctccatctcttgacctcatgatccgcccgcctcagcctcccaaagtcctgggattacaggcgtgagccaccgcgcccagccggtcttcagaaatatttcttgactatttgagtgaatgattccttggtttccctacctaaaaaatgtagcattttccttctccattctcattatactgtttcaataatttttcttcttctcctccttccttccttccaattttacctccatccaatgtacacaagatatgttcactccactagttaaaacaaacagagcaggtatggttgctcatgcctgtaatcccagcattttgggaggccaaggtgggaggatagcttgcgctcaggagttcaaaaccagcctgggctacatagcgagaccctatctctattaaaaataataataataataataataataataataataataataattagctcagcatggtggcccaagcctgacctgtagtcccagcagtttgggaggctgaggcaggaggatcacttgagcccaggagttcaagaccagctgggcaacatagggagactcgtctctacaaataataaatacattaattaaataaaacaaacagaatttcactgactcaccttggctaagggatcaaatcaaaacccctcggtttgataccaaatgccattcatgatcaggactccacctgtctttgcagcctcaacttccttcactcaatttcttcacattgtttttttctagcaacaaaaaatttctcctaattccctggacacacaatattctattcaaatttctgtaaatttgtttaggtcgcccttcccccatcctataatcctgggaaggtgtgggagttttttgctgtatctcagcacttgtccatcctatagccacctcatcataactccccaaggaggactacttattaatacctctgtatctcttgatactgcatcatttgtgtatttgtgtttgggagtggacagtattatttaaaatattttttctggaatagataactaattgccccaaaataatttactgaataatccattattccttccttaatttgaaatgttacctttattataaaataaacgcttggatatgtatataccagatccatgtctggagtctgcattattttttcattgatccatttgttgatttctgcatgtcaagtgccaaatgttttacattattatagctctttacagtgtgtcttgatatctagtaggccaatcttatgaggaaaaacaatgttatttttgctttattttgcgtatcccatagggccattaagattgaaccatcctttcattttgcttggtctcaagttttctcttttgaggatgcccaattcatatcctttaatcatttgtcaattacatatattggagaattccttcttccaggtatttcaactttatttacagtgtcattcatatgaatgaagcttttcatctggatgcagttaaattttcaatctttccttctatggcttttaattttaataacttgctaaaaggtttccttcccctccctcaaaagttgtaaaactattctcccagactttcttcattatttttcatatttaggtcactaatccatctagacagggggataaaaatgtccagggatgagatatttctctgccaattcagatgggacagcagtgtagggtgcctggaccttagagaattcagtcacccctgccgtgtgtgaagggtgactgtaatgaagaaaggaatgccttctgaacatccagttgactgtaagttcttcatgaatttacataaactactcacatctgaacaaagatcttctggtactgtcttctggattccttatctgtgcgtgaggggctaacagtaagatgtttagtgttgagctgttggtggccaggtacagcctctaactataatcccagcactttgggaggctgaggtggaaggattacttaaggctgggagtttgagatctgcctgggcaacatagtgaagcaccgtctctattaaaaaaaaaaaaaatagtgtggagttggaagacataggacactaagtaacaggctgggctccaagcagggttgtagaagacatgaaactaaaacctagctccctgtagtctgttgactgaagccattttgcctctccaacatttcttgtagcatgaataatttctccaatatctccctcgttgcagatttaatacctaaatagaaatactgaaaaacggcagcctaaaattggggaagttcttgaaacttttggtaaggtaggctgggtatggtggctcacacctgtaatctcagcacttggggaagccaaggcaggtggatcacctgaggtcaggagtttgagaccagcctggtcaacatggcgaaaccccatctctactaaaaatacaaaaaattagctgggtgtggtggcatgtgactgtagtcccagctactagagagagtgtggcaggagaatcacttgaacccagaaggccaaggttgcagtgagctgagattgcgccattgcactacaatctgagcaatagagtgagactctgtctcaaaaaaaaaaaaaagttttggtatggtaaaggcttgatcagaactgtacttgaaaaagatgatcctgttatttgtcagacagattcaataaagggactgcatgtgggctgaagtggcaggaagtaggaaggagtgactgactcatgagacagtggagatgaagccatgatttaatctagaaggattagatattgtattacccaatcagtagaactcttgacagctgattagtctgcaatctttatatgatatgggggaagtcaaagcaaggaatctgggtacaaggtagaaagaaagtgctgttcacatagagtaggccgggcgaggtggctcatacttgtaatcccaacactttgggaggccgaggcaggcagatcacctgaggtcaggagttcgagaccagcctggccaacatggtgaaaccccgtctccacaattagccaagcgtggtggtgcacacctgtaatccaagctactcaggaggctgagacaggggaatcacttgaagtggggaggcagaggttgcagtgagccgagatcgcaacactgcactccagcctgggcaacaagagcaaaactccatctcaaaaaaaaaaaaaaaaaaaaaaaaaaccacagacagggtagccttggtgaggatggactctgtggataatgataatggacttcttgtctttgaggtgtgagtaatctttggtaaaggtgaccaactgggaagaggtgagggctgaagagattattttagtcagctgaaggtgaaaattgaatctgataggtactgaaaacacaaagaagataataagcaaaacttattctaggagagaagaaagaaaaggaaagctgagaaaacaaggagttattcagaaggaggagaagaataaagagggtggtgtgatcaaggatgataaggactaagaaaacaccaattgttacaattgttactgttaatcttgatattcaagagcactgtggtctacctgggaaatggatttcctcacatattctgaaattcattctttaagactttatatcccaagatactcacgtaaaaaatgaggaaagagaaccttggttggttccagagtgccctctctggaactggaacactcagctgccaattgttttccagtattcctcacccacttgggcatgacaggaccctgtgctgtttcttcttctttgaaataaggacaatagtttactgcctaggattgttttaagaattaaattagttaattattgtatagtacttagaacaatgccttgaacatagtaggtgttcaataaataccagctacagtatagtaactttttttttttttttttgacggagtctcactctatagcccaagctgaagtgcagtgattggatctcggctcactgcaacctccgcctccggtgctcaagcaattctcgtgcctcagcctcccaagtagttgggactatagacacgcgccaccacccccagctaattttttgtattttagtagagacagggtttcaccatgttctccagggtggtctcgaactcctgagcgatccacccacctcggcctccaaaagtgccaggattataggcttgagccactgcgcttggccagtaacccatttttaaggcccaggtgaaatagtttttctatttctatgattttctatttctatgattaaatagtgtttaatcagacacttcagctgcatatacctcccacagctcattgatgatacaacagttcgcacagggcctggcacacatgctaaaggctcagcagtattgataatcacccacacttacaaagcactatgggccagacactgctgtgctttctttacagatatcaactcatttaacccaccctaaaaaccctgaggttcccaaaactggcatatcctcatgttacagatacagaaactaagacacagccgggctaagtaattaatctaagcttacacaaatagccgagacagagccaggacttaaatccaggcagcctgtttcacagtccctgctcataaccatggtgctgtatagttccaaacatcttaactaatgaggacagcattatttctcaaggtgcacagcacagagaacttcaaaaattagactcttagtaaaacaccatcttttttttttttttttgagacagggtcttgctgtgttgcccaggctggagtgcagtggcgtgatctgggcccactgcaacctgcacctctcaggttcaagagagtcttgtctcagcctctggagttgctgggactacaggcaggcaccaccgcgcccagcaaattttttgtatttttagtacagacggggtttcaccatgttgaccacgctggtctcaaactcctgacctcaagtgatctgcccgactcggcctcccaaattgctggaatttattccaacacctcattcattcattcattcattcgagacagagtctagctatgttacccgggctggtctcaaactcctgggctcaagggatctttctacctcagcctcccaacgtgctgagattacagggacacgccaccgcgccagcccgaacatctttatcttaaacccagaaaagtgacaggagtgtctcccctacaagatgatgaccagccctccagacctgagcccaggtgtgattccaaggcccctgtactggggccagacagggagactcgctctcagggacttcccaaccagcaccatcttctccctgcggggatggcgagggagcgcgggccggccccggccctgcctccgcgctcgcgctcgacggtgtcctgaagcgcgctcccggggaggtgttgcagccatggctacggcagccggcgcgacctactttcagcgaggcagtctgttctggttcacagtcatcaccctcagctttggctactacacagtaaggacagccgctggagcgctacggtctgacgaacgagcgagcgctcggttcaccccaggacctgggctcacaggccgcgggccgggggaagtcgtgcaagcacaatcccgactcccgcgcgctaggagcggaggggaggggaccagactccgcaatgagagcaagcatactggtccgccagggtcttgggcgggcgcccagggccctgagaaaccggctagccaggcttttcttatatgggggcggggacggctggggagctcccagccaactctgtgtctgggtttttcaagaggatggtgaagtcggaggccagcaatgcggctaccgcctatttccgtccagcaagacccttgccctctctggtcacagtcctggggctgggctacttcgcggtgaggcgtggggtggggcggggcgggcctctgttttggcccgccgggccctcgtagggcgaggggagctctgggaacggggcctgtgcgcacgcgcatctgacggttgtctcggttactcatgtaagcggaaattcggtgggctcttaggatagtttctgctttctagtgttcctgtctttgggtcctcacctctgcatggttactaacgggttatccgagcctaagcctctcacgaagcggaaagtcaagttaacagactgccataggcctgccaagtcagaatagggcttccgaagcagaatgtttgagccaataggaattgtttggaaaacggggataaatctaaaggatgggtaggatttaagtggtaagggaggataaagaggctataactgttctgacataggtgtggaagcaagaagaaagctgtacctagaaaaagagcgacgtttgtttggctgagaaataatctgtttaaaggataacgagaaagatgcgtggaaaagtaggttgggggctaaggtggtagttttgtgtttttttgagacggagtctcgctctgtcacccaggctggagtgcagtggggcgatctcggctcactgcaacctctgcttcccaggttcaagcgattctcatgtctttacctgtagctgggattacactatgcccagctatttttttgtgtttttagtagacatgggtattggtgaggctggcctcgaactcctaacgtcaagtgataaggtggtaaaattttgaaggaaggcgaagctatttgggtataccaatagatcctggagattggagatttgtcttgtccacagtgttgtttgttggtgtcaaatctgacaacctatgtcctgatttccccatatgtacaatggaggtgttgaactgaaaattttcaaaggtgcatttctgttctacgatttagtgtctgtgactagttagaatatagttggaggaaagctttggggacttcaaattgggatcttgtggagctggcagatgctcccctttccctttggtttgggaggatgcagtgatatttgtgcattatttaactttcagatgtgaaacaacatcgtgagagaggtagtactgctcttgacaaagatttgaatgggacaatacattttgaaactgttgagttattctcagaaaagtcttagctgacagaagttacaatacagaggctgaaagttaagattacgaaaaatttatgtgattaagcagttgctattaaaatgtcacaaccttatctcacttattttccatctctatgcagtggatcattctcagttttagccgtacaaaaagggaaagccgagaaaggaattctaaattaaacagaggtttggctggagccagtttctgcagtaaagaaactagccaaagcacataaactcaaaatttgctaatatcttttataaaataatggttttggtggaatgtattaataggagtcagccaggcatggtggttcacccctgtaatcccagcactttgggaggccgaggcgggcaaatcgcttgagcccaggagttcgagaccatcctgggcaacatggcaaaacctcatctctacacacacacacacacacaaaattagccatgggcagtggctcacacctgtaatcccagcactttgagaagccgagaagggcggatcacctgatgtcaggagttggagatcagcctggccaacatggtgaaactctgtctgtattaaaaatacaaaaattagctgggcgtggtggcatgcacctgtagtcccagctactctggaggctgagacaggagagtcgtttgaatccgcgaggcggaggttacagagagccgagatcgtgccactgcactccagcctaagcgacagagtgaaactccatctaaaataaataaataaataaataaattagtcagtcgtggtagccatgcctgtattccagctacttggggaagctgagttgggaggatcgcttgagcccgggaagtcaagggtgcagtgagccgtgatcaggccactgcactcaagcctgggtgacaaagcgagatcccttctctacaaagaaaacaaaagaagaaaaggaagaaaaaaagactttaagagtcatccaccgtgggcactgagtctgataaccacatactttcctcagcataagtctcccagtagagttgcttttagaaaatagaagtcatcctggcacagtaggtcatgcctgtaatcccagcactttgggaggccaagattggagaattgcttgagccctggagttggaaaccatcctgggcaacatagtgagaccccatctctatatacaatttttaaaagtagctgggcatggtggcacacacgtgtagtcccatctacttgggaggctgaggtgggaggatggattgagcccagatggtggaggctgcagtgagtcatgatcatgccactgcactccagccccagcagcggagtgagaccctgtcaaaaaaaaaagaaagaaagaaaatagaagccaagaatggagacccaaatgactgttcagagtttcttcggtctgtggtaatttttttactgtttcacagcctttctcaaaaacaaaaacaaaaaacaggttttaagtgacctaataggtattctgtgtctctgcttctctttcagtgggttgtcttctggcctcagagtatcccttatcagaaccttgggcccctgggccccttcactcagtacttggtggaccaccatcacaccctcctgtgcaatgggtaaggagagctgcacaagtggactgtggacactggagctctggtctcatgggaaacctggaaggcctgcagctgccttttggtatctaagagtagtgtcggttcaccttaaggcacttttctttttgagattgctgtgttagatttcatcagcagataactatcaccttaaaaaagattaaccttttttttggtttcaggtattggcttgcctggctgattcatgtgggagagtccttgtatgccatagtattgtgcaagtaagtctttgaagtaggtgtttgttgcctttctcttagtagctaatataaattgagagcagccacatttaaatagttcacacacttgtaggctgagaatattctcagggtagagcggaatccccatgcctgatactgagcctggagcagaggcagtacccagtaaatgtttgatgaatgcattcattttgtttatgttggttaaccaattacttagttatctaattcagatgacttttgttattttttaacaaattttctgggtagccccaactagatcaaaagactaggaataggagcctggcttctagtttacaaaagagctaagtgactgacctaggccgatgactcacaatcctcgttttacaattgagccacctgaggagctttttcaaaatacacacgtctggtttccagacccagagattctgattgggtaagtcttgcctcagagataggaatgtgctctttttaaaagctccacagataattctaggatgcaatgctagttaaaagcccccaaaccagaccccactcaggagatgctagtataggttaatgctatgtgagaatacaagaaaaaattatgtttgtactttatataagcatatacagaaagtatggtacaatgaaaaacatggttatggaaatgccaaattgcttctttccaattaatttctggtcaagataataattaattgaattaatttctggtcaagatatactatcacctctattatttttctattctaaaagtggaaaataagatactgtattgctattactatgtttcaataataaaaataatattgattgggtactgctatgtcagagactgctaagtatgttaaatagaatgatcttactctgttttcttgtttattaaacaaataagctagactttttttttttttttttttgagagggaatcttgctttgtcacccaggctggagtgcagtggcgcaatcttggctccctgcaatctctacgtcctgggttaaaacgattctgcctcagcttccccagtagctaggattacagaagcccaccaccatgcctggctaatttttgtatttttattagagacggggtttcaccatgttggccatgctagtcccgaactcctgacctctcaggtgatccgcctgccttcgcctcccaaagtgctgggattataggcatgagccactgtgcctggccacaagctagactttctatgaagaggagcagaaagtaactttattctttctttctcacccctctccaagtaaatttgttttgtagatcgttccccaccttccaccgtatctctggatggaatttcaaacagatcgtaggatttccagtcaccatctgatattatctattctagcccagtctattgttaaaactataaactttcttctaattcaaaatgtctgttttcatccagctggggctcaggagcctgcagtggggagaagggtgcagttgatatcttctcttgcacttcaccttctcctctattcactaataatcgctgcttgtggtcccttgggatagtgggaatagttagggagaacaaggctcagccttaaatagctgctgctggccaggtgcagtggcttacacctataatcctagcactttaggaggccaaggtgggcagatcatttgagaccaggagtttgaaaccatcctggccaacatgacaaaaccccatctctactaaaaatacaaaaaatactaaaaaagccaggcatggtggtgcgtgcctgcagtcccagctgctcaggaggctgaggcacgagaatcgcttgaatccgggaggcagaggctgcagtgagccgagatcgcaccactgcactctagcctgggtgacagagcaagaccctttctcaaaaaaaataaaagttaaaaaaaaacaataaacagctgctgccttgtgatcaggcagctaggtactgtgtatattgcatatccagtattggctctttctctctagaggggatgtggtagatttttgagacactactcatcaccagggatctcccttctgcagtttccttgatggttcattcagacaccccctccagcatgccacttgcagtttcaccctcagagtctgtgttctagggagaattacccttttattgagatcacttccgtccttcaggtgggtctgtggtacagggtcccttttaaacctactcatgttcagtgccttctccaggatctgtatggctcacagtaaacaacttccgtatccctccagtgggataatctacaagtgcatgcagttatcagtgtggcggtgcttccttctctcccagcaagcagaccaaacagtgtttactctttggaatcagatattaaacccttccccaaattccagagactcatgtcaagctctacaaatggttctgttgaggccattctctgggcttgacttgtgggaaatgccacagcccactaggacctctttccaatggcctctgcagcatcgcagtagaatctcagattggaagtgtccggtccagcccctcaacttggaatgtaggagtgcgtgacacctattttgttgttggcatttggagtatctgatgaaaaccaaaatacaaaaatttttatttttatttttatttatttttttcttttttgagacggagtttcgctctgtcgccaggctggagtgcagtggtgcaatctcagctcactgcaacctctgcctccctggttcaagcgattgtctggcctcagcctcccaagtagctgagattacaggcgcccgccaccaagcctactttttgtatttttagtagagacagagtttcaccatgttggccaggatggtcttgatctcttgacctcgtaatccgcccacctcggtttcccaaagtgctgggattacagacgtgagccaccgcacccggccctcaaatttaatatacaatttttttgaagggcagagggagaacaggcatagaggttaggttactcttatgttcttgaaatcatttatggtctaacatgttagaatgtatcattagtcactatgaatcagaataaatattccttttgaattatgagatgagttgggtacggtggctcatgcctgtaatctcagcacttggggaggctgaggcaggcggatcacctgaggtcaggagttcgagaccagcgtgcccaacatggttgaaactctgtctctactaaaaatatgaaaaaaaaaattagctgggtgtggtggcacatacctgttaccccagctactcaggaggctgaggcaggagaatcgcttggacctgggaggcggaggttgcggtgagctgagatcgtaccactacactttagcctgggcgacaaagtgagactctgtctcaaaaaaaaaaaagacaagaaaaagaaagtgccatttttggtgaggtgagggggcaaaaaaccttttgctattttggtagattaaaaagggtatctagccattttaacctgtatttatttgattacaaagtaaggttcaactcttctttgaaaggtgctgtaattcttgttacataacaatactttaacaagaaaaatagaatgttttttccttagggataaataaaatagtatctctttgaggccaatattcatgttcattgttacctttttatagtctggagttccattcagaatatatggcttattctcttagttcagaaattagattcttgctgcttgcataccccagttggctctgcagcccttagaaaggtttttaaggttttgcaaaaatttgtatgtagagtagattttattacagtgtagaaacagaaaagaagttcttgacaagtagaagtactctgtgacagggcagcctcgaatgaccaaaacaggtaaattgtgaaatttttcaagtatcagaggtaacattttttcttaaggcaggaaaaagtgtactcacaaagagatttttgcatctgcttgggtcttggtggaatcattaagggaaatgtgaattaaattaagaaaactttcttaaaagacttttgtcttttaaataggcaaaatgagctaagaatacggataaaggtatgtgaatgagaacaagttatgatgaccccaggaaaacccttctccgggttacctagccaccaactgtgacccttctgaaggaggaggaaacaagcactgctgttcagtgagcctgctcttccaagatggcaactcatctttatttttctttactaaatatcatacacatttacaggatcatataaatttactttccaaaacaaaatatttttgttgttttgcctatttcaaaacaaacatgtttgtttttaaaagttaataatgttgtgctaaaaactcagctaataaaattgaaagttggctgggcgcggtggctcacgcctgtaatctcagcactttgggaggccaaggcggacggatcaccaggtaaggagtttgagaccagcctggccaatatggtgaaaccccgtctctactaaaatacaaaaaattagccgggcatggtggcgggcacctgtagtcccagctactcaggaggctgaggcaggagaatcacttgaacccaggaggtggaggttgcagtgagccgagatcgcacgactgcactccagcctgggcaacacagcaagactccatttcaaaaaaaaaaaaaaaattgaaagttgctgggcatggtggctgatgcctataatccaattatatatatatacatatagatataatctctttcataattggtttccattgttatatatgcctgttttaaattttattttgttttttaagagatgggtctcactctattgcccaggctggccttgagcacctgtgctcaagtgatcctcctgcctcagcctcccaagtaactgggactacaggtgtgccactgtactgggctaacatatccctatttgtctatgtctatacatataaacttacccatccattaataacagtgcatagtattctgttacatagatgtgccttaacgtatttaaaaaatctttcttctgatggacttttaagtctctacttttttactattacaagcaatatggcagtgaacattaatttcttgcatttgtcccactttggtatttgttcccttagaaaaaaattccaagatctggaatttgaagattaaagaatgaatacttttggctgggtgtggtggctcacacctgtaattccagcactttgagaggctgaggctggtggatcacctgaagttaggagtgcgataccagcctggccaacatggtgaaaccctgtctccactaaaaatacaaaaaaaaaaaaaaattagcagggcgtggtagcgggcacctgtaatcccagctactcaggaggctgaggtaagagaatagcttgaatctgggaggcggaggttgcagtgagctgagatcacaccactgcactctagcctgggcaacagagcaagactctgcctaaaaataaaacgaatgactactttaaattaaatgatatgtattgccatattgccttcaaaagtatggaactaatttattcttctaacataaatatatgatagtgcccatttccccacaatctcaccaatactcttcaaatgggctgtctgtcctattcttacctgtttataggcactccttgttttttatgatcttgagtactttgtcctttaggtgtcttgcaaatatcctttctcacggtctttttattctgttgggccttttgataaacagaagtttatcaatgtagtcagttttattaatttattgatattaaagttatattcttttacagtatcttctaacagttttagaatttttttctttcacatttaagttttcagtctacttagatcttatttttttttaagatctttaccttttccatctggatgccgttatcccagagctacttattgagacattcagtcttcactgatgtgccctatcttatatcatacatactgatatgtgtggatctatttctgaacactctattctgttccattggcctgtttatccttgggctaacacaacactgtcttaatagcagcagctttataatcattgttatctgacaaagcatctcctctcatcttgttcaataggattgcctttgcctacacctttgcatattctgtgcattgtcttgtgccacaaaaacaaaaaataaagatgttgagattttcattggattgaccatgtgaaataatttggagaatattggcatatttccattatgttttttttcttttttttttccttaaggtcaggaaagcatcaaatatttctattattgagtcttctaaatgatgaaatgatctgtttccatttatttagatctcctttaatatatatataatttttaagaggttttacacattgttgttacattaatttccagcaacttctactttgagatgttattataaatgacttttttttaaaaaaagatggagggtctccaggaggctgaggcaggagaatggcatgaacccgggaggccccggagcttgcagttagctgagatcatgccactgcactccagcctgggcgacagagcaagactccgtctcaaaaaaaaaaaaaaaagatagggtatcattatgttgccaaggctgatgtcaaactcctgggctcaagcgatccacctgcgtcggtctcccaaagtgctggaattacaggcctgagccaccacacctggccaacttttgttgttgtttttgtttttgttttttgagatggagtctagctctgtcgcccagactggagttcagtggcatgatcttggctccctttgtttcatttcattttctaattgtctgatggtactttgtatgaatatagtcaattttttatattgaccttatacccagcaatcttgctaaataaatttattaattgtaacagtttatagattattttcagtttttaggtataaaactgtccagaaatacagttttatttctttctttcaattctgtataccttttatttatgtttcttcccttattctactagctagaacttccagcagtgctgactagaagtgtgccttgttcttgacctcaaaggagaactttcaacattttgcatcatgtttattatagagttttgtagatctcctgtgtcaaaattaggaagttccattgtatttctaactttgctgagaagttttattaaaaatggatgttggatgtggatgcaggtggctcacacctgtaatcccagcacttcgggaggctgaggtgggagaatcagttgaagccaggagttcaagaccagcctgggcaacaaagcaagacactgtctctacaaaaaacaaacaaaaaacctagccaggcatggtggtgcgtgcctgtgatgatcccagctacttgggaagctaaggtgggaggatagctttagcccaggagtttgaggctgcagtgagctataattgtaccagtacactccactgtaggtgacagagtgagaccccatctctgggggggttggaaaaagaatggatgttgaaatttgtcaaatgcagccgggcgtggtggctcacgcctgtaataccagcactttgggaggccgaggtgggtggatcacgaggtcaagagatcgagaccatcctggctaacacagtgaaaccccatctctactaaagaaatacaaaaaattagccaggcgtggtggcgggctcctgtaatcccagctactcgggaggctgaggcaggagaatggcatcaacccgggaggcagagcttgcagtgagtcaagatcgcgccactgcactccagcctgggtgacagagcgagactccatctcaaaaaaaaaaaaaaaaagaaatttgtcaaatgccacttctgcatttattaagatattcatatgatctttctgttttaatctgttactgtagaaaattatattgcttttacatatattgtttttaaagtttgttttaaataaaagtcatccaagtgagacttatttatgtacagatgagactgtagcaagccattcccttccattgggtcatcttttttttgcacttcattttaggcagttgaatttgaatgacaatataagcaggtgtttatcatgactgtgtgccaggctccttcctgagcatgttgtgtgtattatcccataaatcatctcaactgactcagtgagatagctactgctgttcctgtttttcagatgagaaaactgattctgagagattctgagtgatttgcccaggtcacagctggtaggtagccacgctaggatttatatctggtctatttgcaaaacatttgctctgaaaccataccagtgctttttactccatccgctcatcagaatcacatgagaaacagtcttataatactgtgccctagacagtagccagactagttctcagggaatagtttaccatccaaaatacatttgttagaaaacaagaaagatgaaaaataaatgaaccatccaagataagccagagaaaagcagcaaaataaacccaatgaaagtagtggaaggtataatttaaaaaatatatatatagaagacaataactcccatgaaactgtaagattaacatctcgtgtttaaattttgttttttctgttttaggcataaaggcatcacaagtggtcgggctcagctactctggttcctacagactttcttctttgggatagcgtctctcaccatcttgattgcttacaaacggaagcgccaaaaacaaacttgaagttgtctgaaagcttgctctacacttttacattcatcctcacccttttttttgtggggtagaggaggtgcagtaatttactcagtgatctttctactttctagaaactgtccttcaaagctctttaagaccccctcgttagtcagttttttctcttatatgctctggttgagcttgaatagaccagttgttacttaagaaagaaacagagaaagattttagcttttcaatcctatttggcagaggacttcagctaccttcttacagtctttggctgtgttggtaccctcgtgtgctctgagctaagccacatactaaactgactttttggtttgtatacccttgctcccgccttctgatgaaaacaccttaccctcacaaccaccatctttcctctcctttccaaagctctttccaccttgctgcactaagataaagtgacacttccactatatgtcaattccacacacatttattaggtacctgtgaggtaggatcctatcctctcaaacttccatttctcatgctacagagaaagataaggaagatgagcaagtgcctggaatggggcaggctgagcagtcacacaggcatagaggcacgctgagaacctggaggggagactgcagagtgccttccctgatgctgcagccggaagtgatccttccctccacctggcccctgggacactgtgctctgcagtgtgcagggcctgatggcactgctagattgctccttcagctcagggccacagcttaaacagctttacctttcccctcagcacctgtcccactatcttgcacacaggtgctctaaccatgtttattgaacaaaggagggaaactgatttcactttcacttgttcattatcattccaatttttatgtgaaaatggcacaacccatttggggtaccctcaccccaaaataaaagcccaagtctacctttgactggtaccaccttttttgtggtttcgttggtgagaaacctttatctttttcatacctttctattctcaatcacttctccaaaagtgtgtctttccagctctgatttattcaaaacacaagcatttctgtttagagattctagcccatgggttatctggctagttattacctctcctgttcacttagttatactttattattgctcacaggctggggaggcagaatgactctgtcaccactaggagccattagggcttcttccctggaggactgcctgcttgctttctggggacactagccctcatttcccttctgtggtacagtggggcaaattatttgtattaagcaaacatttatgggaaacaacccgctcccgaaaacggagcccccaagtaaagcacaaccctgaaagattatgaactatgaattgtctctggtagagataaatttctgcaaacatatctcagtcttccctctgtttctctggtgattaagaagttcctttttggtaaggaaaaggatttttaaccatagagttaggcatcatggaaattcaaaccagatttcttaatacctggtcttcctcaaagagaaataataacagtaatagtggtgctgggaacaatatggcagattattgaatgaaattgattaacttgaataaaatgctgtgaattttctctagctgaatgcttttcttgtatttgtcagttttaacatattgatgcacatttgatactttttctcaaatagactactagggaactgtttatacacttcagatatcagtttgtttttcactgataaagaaatgcaaaacactgtggttgtcgggtatatacgtactatattttagaactgtccatgtcccacttacctcctccacatacaaggaatcactagggtggacctgagtgtctccttttcattgtaggattgtctcctttttgtttctgtttttattcaacatttgataaagtctatgcactaagtaaggagtgttctggcatttttttaaatgcatgaagtccggtatgcatcacttaacaatggggatgccttctgagaaatgcactattaggtgagtgcattgttgtgcagatatcatagggtgtactcacaaaccaaatggtagagccgactacacacctagtttatatgatacagtctgttgcccctaggctacaaacctgtacagcatgtagagtagtactgaatactgaaggtaactgtaacacagtggtaagcatttgtgtactagcttttctttaggatgggattaaaaatatatatatatatatatatatatatatatatatatatatattttgggaggctgaggcaggcagatcacctgaggtaaggagttcaagaccagcctggccaacatggtgaaaccccgtctctactaaaaatacaaaaattagccagtcatggtggcaggtgtctgtaatcctagctactcaggaggctgaggcaggaggcaggagaattgcttgaacccaggaggcagaggttgtagtgagctgcgattgtagcatttcactccagcctgggcaacagagtgagactccgtctcaagcaaaacaaaaaaaatagctaaacatagaaaagatactgtaaaaatgtgttccaatcctatggaaccagtgtcatatgtgctgtctgtgattgatcaaaacgtcaatatgcagccgggtgtggtggctcacacctgtaatcccagcactttgggaggccgaggcgggcagatcatgaggtcaggagatcgagactatcctggctaacatggtgaaaccccgtctctactaaaaatacaaaaaattagccgggcatggtggcaggcgcctgtagtcccagctactcgggaggctgaggcaggagaatggcatgaacccgggaagcggagcttgcagtgagccaagatcatgccactgcactccagcctgggcaacagtgcaagactccaactcaaaaaggtcaatacacaggcacgcctgtataaaatcctatcatcttatttggagtattatcatggcttagatgtaaagggggatctagtgagcaaatgatgcagatcattcctttcatagacccataaacatctcagcgaggtgaagtaacttacccaatatcacacagagatgcatgattctgggcctcatgttgccacctcccccatcacccctgagtttagtagtaagtctgtgaagcaaaaaatttaaaaatggagacatcttggctttgtgtggtagtcatggtggtgatatgcgagaaagagctttatgttgcatttggatgagaaaaggccagaggcatcttggtggaagcaaccatggaaaaaaaacagactaaactgttttcttacccaccccttagatttccaaagcacgtatagtttggaaaaataaaaagaaaggaccaaaaaaaaaaaaaaaaaaactaatgacctcagaacttaatagcaggcccaatttataaactaaccgtgtttcctacattcaacatgtttatggttccatgcagtctaagcatggtttatgagccatggtgttaacataaacctgggttaggtttaagaggttatattccagatgtgtgaagaggcttctttgcaaaacagcttgccatctcagagagcccttatatctttacactgaaggtctacaaacaaacacaaaagagaagtcagagaacctgcagttgaggtcagagaacacagtgcaatcaaatttttatcttgctagggccctttctggagtctcattaattaaagctcttagtttagcaacctggttgtgagtatttttcctttcttgtcagcacagtgaaaaaaaatgctagtagggtaggtgggtaatacccttgtaagaccatggaaacgttctctctgccaggctccttgtccgcaacaaattgtgaattatgtttctgttttcatccacactggacaataagagtctttaatgttcacatttctcttcttcaaaaggagatttgtgctccgaatccccagtaaacatttgaaaaccctattcaaaatactgtatttgcaatttctgtgaaacattttaagatggcttccaagtttttataaaggattataaaaatgcctcatttctatttgtagtaagtcataatgttggattaagggaaatacttttggtatacaatgaatactgttcagttacattggtgtgggaaatggaaaagtaatttttaaaagtaagaaagacaaatgctgttgaggaaaatattcatgaaataacttttacttaccttttccttgtattaatacattgcacaggatgaatcgctactaaaattgatgaaatcttaacattgttataaataagaggaatagcatctataatataaggtagggaacagttccctaaatctcaagcacatagaggccacctccacaactttaatcatgtctacactccatctgaatttattatttattatttaaagcaattcacttttttttctttagactgagtcttgctgtattgtccaggctggagttgagtggcgtgatctcggctcactgcaatctccacctcccaggttcaagcgattctcctgcctcagcctcccaagtaactgggattacaggtgcccatcaccatacccggctaatttttgtatttttagtagagatgggttttcaccatgttggccaggctggtctcaaactcctgacctcaaatgatctgccggcctcagcctcccaaagtgttgggtttacaggcatgagccactgcacctggccagaaattcacttaaaaaaaaaaattcctaaacaagaataactatgaagtcccaggcttggtttgttcattatattttttctaatacgtacgagaagaaaggataattattacctaaaataccatgcatactagggatacatttgacacacttaaaaatcagaaagtattaccctactagttgaggctgaagcatgggatttaacctggctctagccacaggattttagacaagtttgtttctgtacctcagtttcatcattaaaagaattgatgttttagacatgaagcctttgcccatgcctatgtcctgaatggtattgcccaggttttcttctaggatttttatggtcctaggtcttacgtttaagtctttgatccatcttgagttgatttttgtataaggtgtaaggaaggggtccagtttcagttttctgcatatggctagccagttttccaacaacatttattaaacagggactcttttccccattgcttgtttgtgtcaggtttgtcaaagatcagatggttgtagatgtgtggtgttatttcttgggcctctgttctgttccattggtctatatgtctgttttggtaccagtactatgctgttttggttactgtagccttgtagtagagtttgaagtcaggtagcatgatgcctccagctttgctattcttgcccaggattcacttggctatgcgggtcttttttggttccatatgaagtttaaagtagttttttccaattctgtgaagaaagtccgtggtagcttgatggggacagcattgaatgtataaattactttgggaaatatggccattttcgtgatattgattcttcctatccatgagcatggaattttttttccatttgtttgtgtcctctcttatttccttgagcagtggtttgtaattctccgtgaagaagtccttcacatcccttgtaaggtgtattcctaggtattttattctctttgtagcaatcgtgaatgggagttcactcatgatttggctctctgtttgtctgttattggtgtataggaatgcttgtgatttttgcacattgattttgtatcctgagactttgttgaagttgcttatcagcttaaggagattttgggctgagacgacagatttttctaaattatacaatcatgtcatctgcaaacagacaatttgactttctctcttcctatttgaatacctttatttctttctcttgcctgattgccctggccagaacttccaatattgtgttgaataggagtggtgagagagggcatccttgtcttgtgctggttttcaaagggaatgcttccagttttttcccattcagtatgatattggctgtgggtttgtcataaataactcttattattttgagatatgttccattgacacctagtttattgggagtttttagcatgaagcggtgttgaattttgtcaaaggccttttctgcatctattgagataatcgtggtttttgtcattgcttctgtttatgtgatggattacgtttattgattgtgtatgttgaaccagccttgcatcccaggtatgaagcctacttgatcatagtggataagctttttgatgtgctgctggattcagtttgccagtattttactgaggattttcacattgatgttcaccaggaaattggcctgaaattttctttttgtgttgtgtctctgccaggttttggtatcaggatgatgctgtcctcataaaatgagttagggaggattccctctttttctattgtttggaatagtttcagaaggaatggtaccagctcctctttgtacctctggtagaattcagctgtaaatccatctggtcctggactttttttggttggtaggctaataattactgcctcaatttcagaacttgctattggtttattcagggatttgacttcctggtttagacttggaagggtgtgtgtgtcctggaatttatccatttcttctagattttctagtttatttgtatagaggtgtttatagtactctctgatggtagtttgtatttctgtgggatcagaggtgatatcccctatatcattttttattgcatctttttgatttttctctgttttcttctttattagtctggctagcggtctatcaacaaaagccaaaattgacaaatgggatctaattaaactaaagagcttctgcacagcaaaagaaactatcatcagagtgaacaggcaacctacagaatgggagaaaatttttgcaatctatccattggacaaagggctaatatccagaatctacaaagaaattaaacaaatttgcaagaaaaaaaaactccatcaaaaagtgggcaaaggatatgaacagacacatctcaaaagaagacatttatgcagccaacagacatgaaaaaatgctcatcatcactggtcattagagaaatgcaaatcaaaaccacaatgagataccatctcacgccggttagaatggcgatcattaaaaagtgaggaaacaacagatgctggagaggatgtgcagaaataggaacacttttacactgttggtgggagtgtaaattagttcaaccattgtggaagacagtgtggcgattcctgaaggatctagaactagaagtaccatttgacccagcaatcccattactgggcatatacccaaaggattataaatcattctactataaagacacatacacatgtatgtttactgtggcactattcacaatagcaaagacttggaaccaaaccaaatgtccatcaataatagactggataaagaaaatatggcacatatacaccatggaatactatgcagccataaaaaaggatgagttcatatcctttgcaaggacatggatgaagctggaaaccatcattctcagcaaactatcacaagaacagaaaaccaaacaccacgtgttcttacttataagtgggagctgaacaatgagaacacatggacatagggaggggaacatcaaacaccagggcctgtcggtgggtggggggctaggggagggataacattaggagaaatacctaatgtaggtgacgggttgatgggtgcagcaaaccaccatggcacatgtatacctatgtaacaaaactgcacattctgcacatgtatcccagaacttaaagtataataataataaaagaattgaaatgccactcaaaacctgttagaacttatagacaaattcaataaagttgcaagatacgaagtcaaaatacaaaaatcagtagcattttcatacaccaacaacaagttatccacaaacagaaggaaagaaagcaatcccatttacagtagttaaaaagaagttaaatacctaggagtacattcaaccaaggaagtgaaaggtctctacactgaaaactacaaaacattggcgaaaggaactgaagacgcaaataaatggaaagacatgccatgttcatgtattgaaagatttaatattgtttaaatatccataccacccaaagcaatctacagattcaatgccatccccatcataattcaaacaatactttttctcagaaattaaaaaaaaaagtcctgaaatttgtatggcactttgggaggctgaggcaggtggatcacttgaggtcaggagttcgagaccaacctgaccaacatggtgaaaccccgtctccactaaaaatacaaaaagtagccaggtatgctagcgcccgcttgtaatcccagctactcaggaggctaaggcaggagaatcgcttgaacccaagaggtggaggaagagaaagaaagaaaaagagagaagaaaggaaagatagaagaaagaaaaagaaagagaaagaaagaaagaaaggaaggaaggaaggaaggaaggaaggaaggaaggaaggaaggaaggaagagaagaaaagaaaggagggagggaggaagggaaactttgtaaactgtaacatgtaaagcacgagtagttttcctggaaagtgtgggattgcccacgatgcagcctgtgctcctcaaacttgaccacacgggtggatcacacgggatcttgtgaaaaggggagttctgattaagtgtggagccagtaggagattctgcatgctagcaggatccctggtgatgttaatgctgctgacctgtagaccactttgagtagcaaaatagagaaaatttaaaactacaaatcacatggttcagccttgatttctgagtcttagggttgatttctgtatgtaccaacactgtcaataagaaaaactgctatgcactgttcctgggagcttagtagttaatgcaaacagtatttggagtcataacacaatctggcaaagagcgttgttccagggctgaaaatgctgatggaattaaccaactcacctatctgcatattcctccctcctggagaagaaaaattagggattgggtcttttgaaagtaaaaagaacttaatacgtttcaaatatttattttgttctagacacggatataaaatatccaaaatccacaactgctttgaggtaaccattatccccacttcatagttgaaggtactacaaaatactatagatgaagatactggccgggtgccgtgactcacacctataatctcagcacttcaggaaggtgaggcaggaggatcgcttgagcccaggagttcaagaaaagcctgaggcaacatggccagacccagtctccacaaaatttagccagacgtggcggcgcatgcctgtggtgcccgctgcttgggaggctgcagtggggggatcacctaagcccagggaggtcgaggcttaagtgagccgtgatcatgccactgctctccagcctgggccacagagtgagatcctgtctcaaaaaagaggaaaagaaaaagacagtaacaccccacctcattcattcattctaaataaatacataaataagatactatatggcggcagggcgcggtggctcacgcctgtaatcccagcactttgggaggccgaggcaggtggatcacaaggtcaggagatcgagaccatcctggctaacacggtgaaaccctgtctctactaaaaatacaaaaataattagccgggcatggtggcgggcgcctatagtcccagctactcgggaggctgaggcaggagaatggcttgaacccgggaggcggagcttgcagtgagcggagatcgcgccattgcaccccagcctgggtgacagagcaagactcagtctcaaaaaaaaaatactatacggcagagaatccctgccaagatcctcaaaatcaaccctaaacaaatagtggaaggacaagagagagacacatgaattcctaacactaagtggggaaattagggaataactcactacccgcctccgggactgaagactactgacattggtgtgggggtggggagggctaatggctgtagcctgggtatcatgaagaactggttgggcagcctttacattctgctcttgttccctcaagctgccttgagagagacagtcatcagcctgactccttcagcatgacagttaacatagtgcccggagcagtgtccacccatatcagcaacacaaactccgcaggggcatgggagagagttcacaaaaatagacgcagacagccctcaggtagttcctccaccggtgcttccaaccaaatcgccaggattgtggattatcttactttctcctaagggtttaaaagtgaaaattccagccaaaggagcgactagtggattggtggtcgctggattctcaatccttacatcgctgggaccaacataggtgaaactgtccttggcccctctcagtacgtatgatcagactttttcccaagggaaaacgagcccacagccaaataactggacagctggggaggacaagtctccacaagcaacacgtatcatctgatcacacatgttgaagcagaaggacccaaaatctaaaaatgctccttaaatacgaggcaagagaaaatgttagtaatatgcagcaaaaacaagacatcctaaaaaaaaaaaaaactaagtgaaaatattaggtaggaaaaataaaatagttaaaatgaagaattcgataaatggaaatagcacaaatgaaatagaatggatatagctgaagaaataatatgtgaacacacgattgtggcagtctcacaataagactaaaacatgaaatagaaaagaaaagcttggaaatgtggatgataaacattaaagtgcaaacacctgagcaatagttccagctggagtaagaaataaaaataaagtggaggaactacttgaacaaataatggagatacatttccaaaaaatgaccttatttgaaaggacttataaagagacaataagagatcaggaaaaatcaattcctaggtacaactataaaatttaaaaataataagtaaaaaaaaaatataataagtaaaaataatgaggagactgggcacagtggtttatgcctctaataccaacactctgggaggccaaggcaggaggatcacttgaggccaggaattcaagacaagcctgaacaacattttgagacactatctatctctacaaaaaaaaataaggctgggagcggtggctcatgcctgtaatcccagcactttgggaggccgaggcaggtggatcatgaggtcaggagattgagaccatcctggccaaatggtgaaacttcatctctactaaaaatacaaaaaattagccaggcatggtggcacgcgccggtggtcccagctactcgggaggctgaggcaggagaatcacttgatcctgggagggggaggttgcagtaagccaagatcgtgccactgcactccagcccgggcgacagagtgagactccatctaaaaaaaaaaaaaaaaaattagctagtcatggtggcacttggctgtagtcctacctacttgggaggctgaggcaagaggatcactttagcccaggaggtcaaggctgcagtgagctgtgatcacacaccactgcactccagcctgggccacagagtgagaccctctctcaaaataataataatagtaataaagacaaggagaaagttctaaaagcttccaaagagagagcagatcacctccaaaggaatgacaatgagatagacatcaaatagctacatgagatcctgggaggcagtgtagtataatggttaactgtaactacatagtagttataaagtattaggagacagtaattttgagggtagaattttattttattttattttttatttttttgagacagagtcacgctctgtcacccaggctggagtgcggtggcgaaatcctggcttactgcaaactccacctcccgggttcaagtgattctccttcctcggcctcctgaataggtgggattataggcgcctgccaccattcccagctaatttttgtatttttagtagagacggggttttaccatattggccaggctggtctggaactcccaacctcaggtgatccacctgccttggcctcccaaagtgctgggattacaggtgtgagttaccacgcctggtcttgaaggtagaattttatattcagccaaattatcatacaaatgggagagagtgatgggaagaatcacctgcattcaagggctcagagcacttgccacacacagacccacactaaaaacacttttggaagaagatctcaaaaaatgaaaggaaaaaaaacccaggtaatgctgcaggaggcaaaggggaagaagagaggagagagtcatcaaagaaaaataaaaagagagataataatgttttcaaaacaaccctggtttagaactatatttgttccatataacctccatagtggcacatgtatgtgtgcatgtgtgtgtgtggtgggatcagtgggggggtataaattaactgggcaggagagcaatgctgaattagttgcatttttttttttttttttttttttgagacagagtcttgctctatcacccaggctggagtgcagtggcacaatctcagctcatcgcagcctccgcatcctgagttcaagcaattctcctgcctcagcctcctgggtagctgggattacaggcacatattactactcctggctaatttttgtatttttagtagagatggggtttcaccacgttggccgggcttgtctcgaactcctgacctcaagcaatctgcccgcctcggcctcccaaactgctgggattataggcgtgagcgcccacgccctggcctgtactggctgcattattaagggcaatatagatgctaataaatgtaagaaagcaactggaataaataaacatgaaatgaggaattcaatgcaactaccataagaataaaaatagaatctatgtataattgtttctatttggaaaaaattatttttcctttacttcttgacaattttccaacaagagctaagttgcccacattccatgttgctgtcttggagtggggagaaatctgtcttcaagagagcgtgagagccaactggatctgcatggtgtgtgaacaagacgggttacaatagaaaaacaaagtccaggctggccacttagcgtagctcatcttggatgcctccaaaaatctctaaatgctgctcaacttagccagaattgtgttaaacaacacaggataagagatgaaatcatgtttgagctccacttgtaatcagaatgccggaagggatggcagaaatctcctcccccaactcccgccatggagggagctaggtcatatgaaggaaggcaaccaccaatgacacccagctagctaatttggtgacagacctaggtccttgacaccttgatatttcaccaagctgcctgtcagtggtgtcgggtgaaacatccaaagtaatgttctcaacagcatgcctcacctcccaaatattttacaaatattatccaagaatgatgtattaagagtgagagtagtttctgtgattgttaactgccttaaacccccacatcctgttcatgttactggcgtctgcctttgatactgtatccatagcaatgtgcaaatattgtaaacactctgctgacccaggggttttcttgccattggctgaaggtgcagcactaatatgttgcacatgtacacagaatggccgtagttacagcatttatgaagctttgacatctgcacagccagagagcttgctggcttacgttctgcatatcagagtatttcctaggaaactgaaaataaatacattatgaaatttcaattttcagtgtgtcactagtgttgttctggcgtcctgtcatgcctgctgcaaaacacactttgaccaggaagggatgccttatgaaatctcattatatcctttcaatctgcagaagtcccacagaattccttctgtgttaataacaggaagatccaacatgaattaaaaactcactatgtgctgggtgttatgctagagccttgcttgcattctttcatttaattatcactttaaaccctaggaagtaggtgctgctaacccatttttcccagttagaaaacgggggccggccagatgcggcggctcacacctgtaatcccaacatttagggaggccgaggcaggcggatcatctgaggtcaggactccaagaccatctctactaaaaatacaaaaattagccgggcatcatggcgcacacctgcagccccagctactcgagaggctgaggcaggaaaatcgcttgaacctgggaggtggaggttgtagtgagccaagattgctccactgcactccagcctgggtgacagagtaagactctgcctcaaaaaaaagaaaagaaaagaaaactggggccaaatgaattaaataccttgtttacagtcagagctagtgagtgtaaaaacaaaaacaaaaacaaaacctagtgagtggtaggaaccaggaatcaaacctagatttcaaggcctgcatttgtatcatgtgttcacagcctaactattgtaaattgcagaggtgactgtagcacaaaatcgctccccagtattaatatattcacagtggggcgacgaagaccctggtgaaggaatgatagagtgtgtaaaagcagaggacccttcgtcagaggacacctgaggatgactgaaagaagctcggtgggaaagctgagcacttggaagaaccagggtaacaatgggacaaagtgaaagcaaacattctgcttctttgaatttcttaaggcatttattatgaaaagggggaatgaaaagttagtactcaggatttgttgtcactctttagcacagaaaagcagttttgcccatggtttccggaacaagggactatggagttggatgagtgggagagaattggaagagattttaaaaaggcgtataaagatggagcagaaattccagtttccatttggtcaatgtgggcactaataaaggcagctcttgagccatttcaaacagaagatgaggcagattcagatgaggaagaggaggacgagtgtaaaaaactaacttcagattctgagtgtgaggaacagctactggaggagattaaagaaaagaaaggaaaacttagaaaagcatgttttactagcccgtcagctccatctgctgaattaagtgaatggccacctcctctctctccccttaatgggagagaaaatgaattagctgaaaaacttactgctcctgtagttgcaacattaaaacctggagcaactggtggtgttgtataaaattctattcaaaaagctagagctgagggagaccttgaaacatggcaatttccagttactataacccagcaaggaggacagaatatagctaattgggccacttttccttttaagttactaaagaaatttaagcaagccattagtcaatacggaccaaactctccttttgtgcaaactttgtggaaaaatgtggctcttgataataggttattaccatatgattgggatacaaaatctgttctcactctgtctcagtatttacagtttaaaacctggtgggctgatgaagctcaaactcaggcaagggaaaacacacaagcgcatccacctgtgcctgtttcctttgaacagttaatgggagtttgccctaattggggtcgattagagaatcaagcagtaatggaggatgttgccattgttcagctgcgctctgtgtgcttacgggcatgggaaaggataaatgttacaggggaaaaatatccttctcccagttctgtccaacaaggacctaaagaaccatatattgattttattgcttggctccaagaggctgtatataaagccataactgataaaacagctgaggatgttgcaatacagcttcttgtatacgataatgctaatgcagagtgtcaaactgctattagaaccctgagagggaaagttcatttagctgaatatattaaggctggcaatggcattggaggtaacttacataaggctactcttttagctcaggctatgtctggattgaaagtaggaaagagtatgccccatttctcaggctcttgctttaattgtgggcaatttggacacacaaaaaaggaatgtaggaaaggaaatgctctctagtaatggaaaagcctcaaaaggttcaaattcaaagagataattttaaaaccttaaatgatttccaaaaattcagctgaacaacacctgacaggacaaaaggaaaataaaaaggctagacaagatatatggtggagggatgcacatataaagagctgggaaaaaagaaatataattatatggggaagaggatttgcttatgtctctccagatgacaatcaggtgcctgtgtggctgctcaccaaaaatctgaagatctatcatgaaccacagcatctagtggatccacttgtacagtgcaaattgaagttttaaggattgcttttttgctatactgttgcacaagaaggataagcctcgattggcttcctctatgccttctgttaatcagaaaaagcctgcttctcattatcagtggtaagttttaccccatggtaattaaccaaagaggcagaagctgggttacaaatgcttcagcaattaaaaaaaacagaaaaggcctttgcttctgtttcagcagatttactaacgtggggatgaggatatgcttgtgtttttgcaggagatgaacaaactgtgtgggtgccctcaagatgtgtatgaccatggaacgggagactggagggacccatggatcccaaccatggaccaggttcccccagtacgagccatgagccagttgaatctgaatgcaaagatggaatgaggactgaccagagtcacgctgacatcaacccccataacatggggagagatcaagaaaaccacacaggaagctgagaaactgctggagcgccagggttttaccttttgctgggattcagaggtacagtagatgcttaacggaccaacgctttctgactgaactcctctctaccctgaataaaagagaccctaatagctaggctggaatatcattgcccctattcagcatgaaaaagttacagaagacgggccttcatccttctgcaacccttagaattaagggtcctcttgtgaaagggaaaggggaaatatgtaagaagcattcaaaccagagcaactccattttgaataaggactaagaaaaatgaagctggatcaccaactggcaattaagggctgcacagcctgcaattgccttgctcaattaatttaaaaacaaagaggaccttttggattcaaagctgtgttatgttactgttaaatgccatctggagggcagagatgaaaatctcaccctcgatacagtaaagctaaaacagcaggtttttgaagcctctcaggctcacttgaacctgctccctggaactgatactttgaacaagacagccaatgggttgtctgcaattgatcctcttaaatggactaaggtcattggaagctctacacttgcagattttattctaataattatgtgcttgtgctgtctccttttagtctgcagatgcaggagctgccactggagagaaagctgccatcgagaacaagcaatgatagctatgctggttttacaaaaaagaaaagagggacatgttgggagaaaagctgagtgttgggagagaagctgaggcagggcttggaacatgtccaggatccagggtaaaaccactggtggcctttggaatgcgcccagacttactggctccttgcttctagcactcccattatctcaagtagccatatgtttcaaagaaaatgctaaaccattacagctgtagttcattccttgatacaccacttccttttaacccccacatcctcgccatctgtttctttgtttgatcaccaatgaatagcatgggctctcagagctcgaggccttcacggcctccatactagcattggccccctggtcccactttctctctcaacttgtcttttctcattcctttgactccaccagacttcatagcccccacggtctggtgttgggtctgatcaccccaacatccaccaccatgcctggctaatttttgtatttttaatacagacgggatttcaccatgttggccaggctggtctcgaactcctcccaaagtgctgggattacatgtgtgagccaccatgcccaaccatcagtaaacctttaatattgtctgggatccaaacaggcccagcaaacaaacagccttgccaggaattgttcttcatgggtggggatttgtggatgcagtgccaagactctcaaatggaaaagagtaaggacttagagagcaagattagaaggcagaagatgtggcacttcactagccatgcaaccttgaacaaattatttcacctcttttttattttgagacaaagtctctcctctctatcacccaggctggagtgccgtggcactatctcagctcactgcaacctctgcctcccaagtccaagtgattctcatgcctcagcctccaagtaggtgggattacaggcatgcaccaccatgcccggctaacttttgtatttctagtagacatggggtttcaccatgttgcccaggcaagtctcgaactcctgacctcaggtgacccacccgctttgacctcctaatgtgctggtactacaggcatgatccaccatgcctggcctcatttcacctcttaaacttgggttttcttgtgaggcacttacacttgatttataagattcctctcagttttaaaattccataaaattccagaagcactatctgggagaattagtgagtcccctgggagaagtagtgagtcccctgtctctggaagcattcaagcagagtgagaatagtccgttgtctgatctgctgtagacaaaattcgtacattaggtaggaggttaatatttgatttgaataattaagtcaataataaaaaatagcattgagtatgtaatatgtgcccagccctgttctaagcatttacacgtctcatttatttgatcctttcagtaattgcaaggggggtggggggtagatactatccctattgtacagaggatagtctgatcagaggcagcactaaccagagatctcacagctagggagagatggagattggaaatcagattgctgtggcccccaccaagtcctaatccccacccaattctgtcagcagactccgggctctggggtgggcgtgtcttcccactggcctgggatctgggtgcaaggtgacctgcctgcctcctatctgtctccctctgaggcagggaattgagtgtggaatgcagacagcaggcttgccaacaaagccgctttcccacagcctgcagcagaaagctgccttctgctgcttggggctacaaatgctctgagcccttcaccagcagccttattttacagaaggcgaaactaacacccagaaacggcaagctacctacccaaggtcacagaacaaacaagtggcacagttgcctggagtcctcacttcctggccagtgctcgatgttctgttttttttttttttaatctaaatcatatgactgcaatcgcttgcatatggcagtccctcggttttctgttctgaatatacatattttctttgtttcgttttgttttgttttttcctttgagacagagtttcactcttgttgcccaggctggagtgcaatggcgtgatctcagctcactgaaacctccacctcctgagttcaagcgattctcctgcctcagcctcccgagtagctgggattacaggtgcctgccacaatgcctggctaattttgtatttttagtagagacagggtttctccatgttggtcaggctggtctcgaactcctgacttcaggtgatccgcccacctcagctcccaaagtgctgggattacaggcatgagccaccatgcctggcgtgaatatacatattttctaatcaaggcctatgtatcaactacagcaaattggagattcacaacagcggcaattattcaaaatgaaactctctgcctattatattctaaaaattctaatccaacctcactgctgcacaagatatttatctcttgttggtcctgaatccacacttgtgctcctttgaggcaagtttcctcactaacattgagccccctaattacatattaacctttgccccagctgtcacccagccagaattctccctgcagtcctctgcttatctggcctgctgggaactcaggatcaaacagcactgagaattcaacaattatttctttcttcttctttttttttttttctcaagatctgcttttaggagaagcaatcatttcaacactgcattacaaatgaatttatacctcagtcagaaacaagcaaccccacaccccactccactccccactaagcttctctctttttttttttttttggagatggtctcatgctgttgccaaggctggagtgcagtggtgccatcttgactcactgcaacctccgcctcccgggttcaagcaattctcccacctcaggctccagagtagctgggactacaggtgcgtgccaccaagccaggctaataattgcattttttttttttttttttttttgagacagaggctcgctctgtcgcccaggctggagtgcagtggcgcaatctcggctcactgcaagctccgcctcccaggttcacgccattctcctgcctcagcctcccgagtagctggaacaacaggcgtccgccaccacgcctggctaattttctgtatttttagtagagacgaggtttcaccatgttagccaggatggtctcgatctcctgcctcgtgatctgcccacctcggcctcccaaagtgctgggagtacaggcgtgagccactgcgcccagccaattattgtatttttagtagagacagagtttcaccatgttggccaggctgctctcgaactcctgacctcaagtgatccactcacctcagcctgtcaaagtgtcaggattacatgcatgagccactgcacctggcctcttttttggtttttatgggcaatgtgtactctcagatcacacgttggtttggggatcaacctcagagtaagatgcacattcacattctggaggatgacacagttaggaacaggctttagaatccagtgtgaccttgggcagatctttcatctgttctcaatcgcatttgtaaaacacaggcaaagactgtcgcaacctcacaaacaatgtttgctgaaaggagaaatgagtggttttctgggccactccattctcatcccgtcactctcatgtcgcacttcatcctcaagtgtagttggagattgtcatcaacttcatccctcccgcccacccctcgttggcatcaaggtcacctccagtgggtactccacactgaggaactgtgccctttgccactcagctggggcccaaagctctgttctccacaaaagtcataaagggacactaatggagatactggaaaatcttactacatagaaatatgaaaagttctgtgttaaaactattgtaagcaaactgagaaaacaatcatgaaactgggagaaatatgtgcaactcatagcacgggcagaggtgaacttccctaatacaatgaagcctactaacacaaaaagaataaaaagaaataaaggatataaacatctaggtcacagaaaaggaaatacaaacagttctggacattttatttctttttttattttatttctttttatttgagatggagtttcactcttgttgcccaagctggagtgcaatggtgtgatctcggctcaccacaacctgcacctcgcaggttcaaccgattctcctgcctcagcctcctgagtagctgggattacaggcatgctccactacactgggctaattttgtatttttagtagatacaaggtttctccatgttggtcaggctggtctcgaactcctgaactcaggtgatccacccacctcggcctcccaaagtgctgggattacaggcatgagccactgtgcctggccagccactgagcctggccttattttttaattaaaaaaaaaaattgccaggcacaatggctcacatctgtaatcccagcactttgggaggcagatcatgaggtcaagagatcgagaccatcctggccaacatggtgaaacccccactctactaaaaatacaaaaattagctgggtgtggtggtgtgcacctgcagtcccagctacttgggtggctgaggcaggagaatcgcttcaacccgggaggtggaggttgcagtgagccgagatcacagccactgcactccagcttggtgacagtgagtctccgtctcaaaacaacaacaacaacaacaacaaaacctaactaacaaaaagcaaaaacgactgaactaagagaacaattttccatcacgttgaggaacatgtttaagagttttatggccaggcgcggtggctcacacctgtaatcccagtactttgggaggctgaggcaggcagatcatctgaggtcgggagttcgagaccagcctgaccaacatggagacaccccaactctactaaaactaccaaattacccaggtgggatggcgcatgcctgtaacctcagctacttgtaaggcttaggcaggagagtcacttgaacccagaaggcggaggttgcggtgagccgagatcgcgccattgtactccagcctgggcaacaagagtgaaactccgactcaaaaaagaaaaaaaagagttttatgggccggtcgtggtggttcactcctgtaatcccatcactttgggaggctgagcctggtggatcacctgaggtcagaagtttaaggctagcccggctaacatggtgaaacctcgtctctactaaaaatacaaaaattagctgggcatggtggtgggcccctgtaatcccagctactcaggaggctgaggcaggagaatcgcttgaacctgggaggcagaggtggcagtgagccgagatctcgccattgcactccagcctgggtgacgagagtgaaactccatctccaaaaaaaaaaaagagttttatgacatgcttgttggagccgtgggaggaaaaaggcattttatacactgaggatgacagtgtatattaaagtcagttctgtaaggcaatttggcattatcagtcaaaatcacaaatgcacagaccctttgactcaggaatacagatatattctgattcatgcaaaaaatgtatggacaagatttttcattgcaaaattgtcatatcatataataggattttctgcacctgtaaaaaaagaatgagaaagttctctcatatactgataggaaagatctctaagatgtaagcagagacaaatgtgtataagtatgctaacatacacatatgtatcttcttatgtagtgtatgaataaaataactgtggaaatgtataccatattattgtataatgcaagcatacatttttattctgcttgtatatgattttcctaaacttatacatatttactgataatctacataatgtttatgtagatttcaatctgcgtttaacaaaattgaattattacgctaatgaattttatttcaaaaattatcttttggctgggtgaggtgactcacacctgtaatcccagcactgtgggaggctgaggcaggtggatcacctgaggtcaggagtttgagaccagcatgactgatatgatgagaccctgtctttactaaaaatactaaaattagctgggcgtggtggtgtgggcctgtagtcccagctactcaggaggctgaaacaggagaattgcttgaacccgggaggcgggggttgcagtgagcggagattgcacctctgcactccagcctgggtgacacagcgaaactccatctcaaaagaaaaaagttatctttcatggtatgtctactttagaataatttcaaagatctttaggtaactcaaaaccttgtactcatttaattgatggatatctgctgggtacataaataatttctaggaaaaatgaaagactaaaacatgcattatgaagcataatttaagtgtatatactttttttttacacttgtgggtttttcggggttttttttgtctttttttttcctttttgtggagatcagggtttcactatattgcccagccaggtctcaaactcctgggctcaagctatcctcctgcctctgcctccctaagagttgggattacaggcctgagccaccacacccggccttatttatttatatatattttttgagacagagtttcactcttggttgcccaggctggagtacaatggcatgatctcggctcactgcaacctccacctcccaggttcaagtgatcctcctgcccccagcctcccaaatagctgggattacaagtgcccgccaccatgcctggctaatttttgtatttttcgtagagatggggtttcaccattttgaccaggctggtcttgaactcctgacctcaggtgatccgctcacctcagcctcccaaagtgttggattacaggcgtgagccaccgcacccggccttctgtattttaaggaaaacaaagaactgtagttttatcttaaagcagcagttttgtcttaaagtacccagatttggtttggggcagggggtttgggagttttttgtggttggtttgtttggtgaaacctctttacacacctccaacatattgaggacaccaaagagctttctttgtggattatagctattagtatttactgttaaacatttaaacataactttctaaaaaacattttttcattcctctcagcacatacctataaaacatactttttttttttttttgagatggaatctcgctctgacacccaggctggagtgcggtggcatgatcttggctcagtgaacccaagacatcccaggttcaagtgattctcgtgcctcagcctcctgagtagctggaactacaggcacctgccaccacatccacctaatttttatatttttagtagagacggggtttcaccatgttggccgggctgatcttgaactcctcaggtaatccactcactttggcctcccaaagtgctgggattacaggcgtgagccaccatgcccagctgctataaaacataacttttaagaaagcttatttaatgattcatttaaaaatagcaacaatgaatgaagtacaataaatatacctcagcagtattatgaaattagttctgacctcatgggccccttgagattggtcctaaaataaagggcgagtttactatagaatgcaaaagagcatgctgacatgattttttttttttttagatggcgtctagctctcttgcctcggctggagtacagtggcactatcttggcttactgcaacctctgcctctcgtgttcaaacaattctccttcctcagccccctgagtagctggaaatacaggcatgcaccaccatgcctggctaatttttgtatttttagtagagacaagggtttcgtcatgttggccaggctggtcttgaactcctgatctcaggtgatccacccaccttgacctccctaagtgctgggattacaggcatgagccatgcgcctggcctgaagtgaattttatttgctttgatttataatacctgagtttgggggctggacgcagtggctcacacctgtaatcccagcactttgggaggccaaggccagcgaatcatttgagcccaggagttcccagtccagcctagccagcatgggaaaacctactaaaaaatacaaaaagtagccaggtgtggtggtgtgtgtctgtaagttccaaactattcgggaggcttaggtgggaggatcacctgatcccaagaggcggaggttgcagtgaacagagatcgcaccagtgcactccagcttgtgcgacagagtgagaccctgtctcgattaaatctatatttatatatataatgtgtgtgtatatatatatacacacacgtaacacattatatatataaataaaatacttgattctgaaatatgttagacactatgaaatgttattaagatcttatagggccgggcgcggtgactcacgcctgtaatcccaacactttaggaggcggaggcgggcagatcacgaggtcaggagattgagaccatcctggctaacacggtgaaaccccgtctctactaaaaagtacaataaattagacgggcgtggtggcagacgcctgtagtcccagctactcaggaggctgaggcaggagaatggcgtgaacccaggaggcagagcttgcagtgaagccgagatcgcgccactgcactccaacctgggcgacagagggagactctgtctcaaaaaaaaaaaaaaaaaaaaaaatcttataaaagtttgcttttataagaccatacggtttatcatataatgtataatattttataatatataatgcatataaaacacatcatatgcattttaacacatgaaatttactaacaatcttaaaaaattttgtttaatattcatggccttgtttccctagtttactgtttgttgtcttcacctatactatgaagggttattctttttttctatgtaaatctacctagatagcaaagattcagtgttttaccagaattattttttgattttcatgttgattttattatgcccttggttatttaaagaaacaagatttgttatttaggagggagctaaagttctttatgatcatgttattttctatctttatttttatttatttttatttattttcttttttttttagagacagagtttcactcctgttgctcaggctggagtgcagtcatgtgatctctgctcactgcaatctcagcctcctggattcaagtgattctcctgcctcagcctcccaagtagctgggattacaggtgcctgccaccacgcccagctaattttttgtattttcagtagaggtggactttcaccatgttggtctcaaactcctgacctcagctgatccatctgcctcggcctcccaaagtgctgggattacaggagtgagccactgcacctggcctatttttaaatgttgtattgtctcttacaaatgggtaggcaagtactacttctcagatgcctatgatcctacactaagtattcaaatctcctgacaattttgtattttgcattcccaaaattagtcctaaatgtgaaataaaataaaataaaaggaatgatagctgagctttcccagacataccattgaaaatcacaaaagatttgttacttccccttatgaaaagagaggtgccagaaataaataggtgtatttgatatgttactattggtgaattacacaggaatagatgagattattttttatcaaaagagagggaaagtgtaggaaaattttctttcaatggaaaattaagtattgtctatagcacaccctttcactttatctgcttttgattccatgggagccattttacagcttgtaaaatgtagataactgatagaaatgaaaactaattcttggctctagatctgtacatttaatcctgccagtagaggttcaattgacttccctttcccaccctggaagaagctggcttgagctctgttggtgaatgtgtttcaacattcctttgctccatataattgagcttttctgacttctcctttgaattagttataatctgccattggagagtcatgattttatcttttttttttttttttgagatagcgtcttgctctgtcgcccaggcttgagtgaagggatgcaagcttggctcactgaagccttgacctcctgggctcaagtgattctccaaactcagccccctgagtagctagaactacatacatgagccaccatgcctggctaatgacgatgatgatgatgatgatgatgatgatgatgatgatgtagcagggggttgcactatattgcccaagctggtcttgaactcccagccttaagcgatcttctcacctcagtttcccaaaatgctgctattataggcatgagctgccactccaggctgatgattttatctttttaataaatgaatcttttaacaataaggacaatataagttagttcattacaaatgatggaagcttattgcattagagttttattctcctccttaatccttgttgcaaatacctggaaggcagtaacggaaagaccattagctggtattaaccttcaactctggaatatggcaccatctcctaccttgcccctggcagttactttcctcccctacacttatgcagcctcctagctggttggggctatactatcttccctccctacaccagcaggtgggactggatcaagagtcctaggcagaaaagagagggagagagagagagagaaatcaaacttgtgaaaagaagggggaagctgggcgcggtggctcacgcctgtaatcccagcactttgggaggccaagtggggtggatcatttgaggttaggagttcaagaccagcctggccaacatggtgaaaccctgtctttactaaaaatacagaaattagacaggtgtggtggcgcacacctgtgatcccaactactcgggaggctgaggcaggaaaattgcttgaacccaggagatagaggtgcagtgagctgagattgcgccattgcactccagcctgggcaacagagtgagactccgtctcaaaaaaaaaaaagaagaagagggaataaaagaaaattaaacaagagtcccagtcctggaaggaaaatatcaatcctagtctggaagggaagagaagcggagcaggtttagaggttagtcctattgtattcattttatggggtcggtgcagcagctgagttgacataaagatataaatgaggcttagggcaaggagatgaatattttaagaaactttttattgatggatcatgtatatacattttaagaattaaacacacccatgaaatcagcacccagaccaaatgacagaacattaccagcagctcagaagcccccccatttctcttgcaggaaattgatactgagttcttgtggcatggattaattttgcttggtttgtactttatatcaattgtattatacagcattttttgagaaaatttctttcatcaattgtattttcatccataatgttgcatgtagtggtaggtcattcattctttagtctgatgtcaatgggaatttgagtagtttccagcttaggactattataatagtgcagctatgatcattcttgtttttcttttctcttccttccttccttccttcctctctttctgtctttctctttctttctctctttctttctttctctctttctttctttctttctttctttctttctttctttctttctttctttctttctatctagggtctcactctgttccccaggttggagtgcagtgatacgatctcggctcactgcagtctctgactcccaggctcaagccatcctcctacctcagcctcccgagtagctgggactacaggcatgcaccaccacacccagctaattttgtatttttagtggagatggggtttcgccatgttgcccaggctggactcaagcaatctgcctgcctcagcctcccaaagtgttgggattacaggcgtgagccaccacacccatcttgatcatttttatccatattttttatgaccatgcatttctgctaggtttatgcctaggaatggaattgccaggtcatatttatttctatgtctgtcaatctgtgtatatattaaatacgaggagctcatgccaatgcctcttattctaatttaacacaacagggttcactctgcccttcccttttcatttgtagttctttctttgacagtgagaagcctacctcccactaaatacaatatatttacttaattgctcaatcccagaataccgataaaatagtttcagagttggtaacctatattccctagctctgtctgctgagagggcctagaggcagtgacaccccagtaacaatgaggacatccagtacccagatcttagtttctaaataccattccctcaaaaaaggaagcagagttttttggagaaatgattaagtatagggcggggtcagtgaaattataaaataatcctggaacatcttatgtcagaaagaaagtgctcaaaatacaataagggcatttcaaacaaacacaggggggtgacttgaagactctcacagtggctgtacctgggacaactggagcaatgagacaaatgatgttggtcatgaattatcactggcagaataaactaaatatccacgagtctatactgaaataattgcaaaagtaattgggaggcaagggacagctgttccttaccaatgaattacaattaataaatagagaaggaattgtgaaagtagaaaaatcacctgttggaaaacacagcggtaatgattattgcagacaagaatcgccaatgaatgccaaaattgctgggtgaaagtatgataataaacaagatatttgcatagtgtccaagatatctcctcataagatactcattaagttcaaaaggaaaaataggattttgcaatggagaaatctttgccacatcgtctctcaaagttatcatctccagtaatgggatgctgcaatattacatgtgcctcctgatataatgcatggggaagggtataacctcactcctgtggtgttctcaccaaaaacacataacgtcattctcattttgagaaagcattatacaaactcaagttggaggacattctacaaaataattggccagtactcttcaagagtgtcaagtttacgaaaaacaaaaataactagcctggatgcttcaaaactgtcaaaattatgagaggaggagaaagactgaggagctgtcctgaatggaaggatcctactgagacacggcagcggaatgccacttgcagtcctggattgcattctggagcagaaaaaggacgtcagtggcgctactggcaatactgaataaggcttgtggattctcacacagtattgcattaatgtttgtttcctgactttgataattctgtagctatgtaagatgttaatatttggggagggtgatgaaggttgtacaataatttgctgtactctttttgtaagctcaaaattatttccaaggaaaaagacaaaaagaaagagggaattggatgggattgtgtcattcttcagccaaaaaccctgctggcacctctgcctacagcaagaaagtttactcttttgagagtggcatttgaggccctccctaatctgaccaaaacttcccccagatttactgcccactcacctgtcacccacccacctttgttaaactccatggcatgcaggatgcactgcttagaaaactcctactcatgttcaaagacccctttgtgaggcctttactttacacctccttcaggaagcagagttagctgccagctcctccttggtcaccagtcatctctcctggaaaccttgatcctcctccaggaccactgcaggcctagctggcattactcacaaccctttctgccctcaggagatttataacctacaagtacatacagcaaagaaaacatagtgacaggcccaggaaagcaggttagaggcaggtgagcaagagaatttacattgtgttgtgaccatagatgttattattactccatctttgttgatgaggctcagggagaggaggtgaactgcctgaggctacaccaccaataaggacaaagtcacgatttgaactcaattcctctgcctcctttactaagagatactaactcagaaatgctctgaacagtcagccaagcaatgtcttcagacagtttatattttacttcaactctcacctcaaggagccaaaataagatcatctccctagagagcattgcagagaaaattctcaaagagcttgagggaaatgccaacccactcctacccgctgagcccacagggaattcaggaatcatagcttgacagattctcaggaaatagtcatggatttcacaatgaactgaattgacacttagcaatgtgaatctgctgcaaaaacatctcaaaaccgagtaagtggataccaggcactatgggtggctgagttcttttgctggaccctccatttaggccagttttctcctcttctaaacatggatttatcacttcaaaagacactggttagaaaactgctattgctaagctctgggataatcacagaacccatcacatagggtagcagccaagattaactgaaaaatagactatgtagccatggaatactactcagccataaaaaggaataaaataatggcatttgcagcagcgtggatggaggtggagaccattattctaagtgaagtaacccaggaatgaaaaaccaaaaatcatatgttctcatttgtaagtgggaactaagctatgaggacgcaatgcataagagtgatataatggacttggggactgggggaagagagtgtgggagggggtgagggatagaagactacacattgaatacagtatacactgctcaggtgacaggtgcaccaaaatctcagaaattgccactaaataacttatccatgttggccaggcacagtggctcacacctgtaatcccagccactaaataacttttcttttttatttttactgtaccctttcttttttctttttttttttttttggagacagagtctcactctgttgcccaggctggagcgcagtggcgcgcagtctctgctcactgcaagctctgcctcccaggttcacgccattgtcctgcctcagcctcccgagtagctgggactacaggtgcatgccaccacgcccagctaattttttgtatattttttagtagagacggggtttcaccgtgttagccaggatggtctcgatctcctgacctcgtgatccacccgcctcagcctcccaaggtgctgggattacaggtgtgagccaccatgctcagcctactgtaccttttctatgttcatttaaaagtaactgaaagagtacatacaattggaatgtttgtaacacagaaaatgataaatgcttgaggtgatagataccccatttaccttgatgtaattattacacattgtatgcctgcatcaaaacatctcatgtgccccataaatatatatctactatgtacccataaaaattaaaaaaattttaatcagaagaaaataaatctataacaaaatttttacaaattaaaaaaaccagactatgtagtacttcacactgggttagacgatgaattcgaaatcatgaatgttggctgttaggaatataactatttattataactgttaatattatgattattattattattgagacagagtctggctctgcacccagactggagtgcagtggcacgatctcggctcactgcaacctctgcctcccatgttcaagcgattctcctgcctcagtcttcctgtagctgggattacaggtgcacaccaccacatccagctaattttttaagaatatttttggtagagatggggtttcaccatgttgaccaggctggtctcgaactcctgacctagagtgatccacccacctcggccttccaaagtgcgaggattacaagataagccactgtgcctggccaatatcattattattattattattattattattattattattttgagacagtcttgctctgtcatacaggctggaatgcagtgatgcaatctcagctcactgcaacctctgcttcccgggtttaagcaattctcgtgcctcagcctcccaagtagctgggattacaggcatgtgccaccacccctggctaattttttttttttttttttctttctttctttctttttttttttcttttttttttagtagagacagggtttcaccatgttggccaggctggtctcaaactcctgatttcaggtgatccgcccacctcacctcctgaagtgctgggattataggcgtgagccaccacacccggccataactgttaatattaaacctctaccctcattctacactttgcttctccctgtaccaagcggatcttcctatcttcctacatcttctcctacctgggaggattcagggccacatgtaagaaagggggcaaaataaaggggttatgcctattgcagcacaattcataattcccaaggtacagaaccaccttaagtgcccattgatcaatgaatggataaagaaaatgtggtatatatgcactatggactactactcagtcataaaaaggaacgaaataatgtcttttttgttttttttttttgagatgaagtctcgctctgtcacccaggctggagtgcagtggcgcgatctcggctcactgcaaactctgcctcccgggttcacgccattctcctgcctcagcctcccgagtagctgggactacagatgccggcaaccatgcctggctaattttttttttttttttttttttttttttagtagagacagggtttcaccgtgttagccaggacggtctcgatctcctgacctcatgatccgcctgcttcggcctcccaaagtgctgggaatacaggcgtgagccactgcacccagcagaaataatgtcttttgaagcaacttggatggagttggagaccattattttaagtgacgtaactcaggaatggaaaaccaaataccatatgttctcacttataagtgagagataagctatgaggacacagagacatacagagtgatataatggactctggaaactcagaacggggaggatgggtggggagtgtggaataaaatacgacatgttgggtacgatgaacactacttgggtggtgcacgcactaaaatctcagaattcaccattatacaattcattcatgcaaccaaatataacttgtacccccaaagctactgaaattttataaaattaataacaatttaaaaagaaacagttctctttctgcctccactgccaccatggctcccgggaaaaagcttgtggtgaagaggggcaaaaaaaagaagcaggttctgaagttcagtcttgattgcacccaccccgtagaatatggaatcatagacgctgccaattttgagcagtttctgcaagagaggatcaaagtgaactgaaaagctgggaaacttggcggaggggtggtgaccatcgaaaggagcaagagaaagatcgccatgatatctgaggtgactttttccaaaaggtatttgaaatattacaccaaaaaatattcaaagaagaataatctatgtgattggttttcgtagctgctaacagcaaagagagttatggattacattatttctaaactaatcaggacgaggaagatgaggattaaatttcatttatctggaatattttgtatgagttcttgaataaaacttgggaacaaaaaaaaaaaaaagaaaaagaaacaaaaaacttcttatttttttctttttttgagatgggtctcactctgtcacccaggctggcatatgcagtaatgtaatcatagtttactgccgcctcgacttcccaagctcctgccatccttccacatcagccccctgaatagctgggactacaagtgtgtgccaccacacccggctaatttttaaattttttttgtagagacagggtatggctatgttgtccaggctggtcttgaactcctgaactcaagccaccctcctgcctcagcctcctaaagtgctaggattacaggagtgagccactacttccaacttcaaaaaaacaaatctcaacccatcaagtcgccccctccttttccttcccccgagagacatccacattcacacttcactggctcactttctctggctataacttctgtgccttgggttagtagcccctcttcatctgtgcagaatgggctaggtttgcccagtgctcactgagagctctcccggcgtgggtctttctggtacctctggaaatcttctcttgtgccaaaggaagaagacaaggaggctttgtacagctcaggccctcccagccactgacgctcttttaattgggctgtcctctcaccccatctctctccccaaagagatgaccagcccctatttcctgtttcctttggccctttgcctttgggtatggattgggagagcaagcccctgccagatttcccaccacttgtgccccggcccagccaggctgggaggacctgagcacatcctgtagcattgcctgtggaggcagtacaggtgcctgggaggcaaatccctaactagtctctgtgtgccctgggcccacctcctaacttctccaagccttacattctgtatgctcccatgaccctggcaggtagcctcacagtccacgcagattgtgacggtatctgccagggtcatgggagcattaagtgaaagagaaacgtctgcacattagggcacttcattcatgcaggtggttatgagcgttctcccctaactgcacagggcttgccactctgcgccccccatatcccattcatccctttctcacctccactcttcagattctctatttagtgcctttcctgggacttcagagtcaagaggcctgatcatgcagaggaccatgaattttggaatcggatccacctagcttccaaactgggatctgccaccctctactcttgaatcagatatacttaatagatcttatttttttaaatggggataaggatatctacttgataggtttactgatgcaaggattaaatagggtaatgcatatacagccttagcacaataccaggttcagagaagtttagcaaataatagaataataataaataataagaggtatgactagatccagctggctacccaccttgctttgaggcctggtatatggttggcatatttctctagttcctgccactgatgccggtctcccctatctttaatttcactggtcactttcaagaatattggaaggaggaggtttgtcaactgggtccactggctccatactatcattttgcccaggagtttccctttacatgtttgggccagtttctgttggtatacagaaataaattgatttccaaacacttatcttaattttttttttttttttgagacaaattctcactctgtcgcccaggctggagtgcagtggcacgatctcggctcactgaaacctccgccccctgggttcaagcaattctcctgcctgagcctccctagtagctgggattataggcgtgtgctaccacgcctggctaatttttgtatttttagtggagacagggtttctccatgttggccaggctggtctcgaactcctgacctcaagtgatccacctgcctctgcctcccaaagtgctgggattaacaggcatgagccactgcacccagccaaacacttgttgatagtggcatctttttttattttttaaatttttaatttaattttaagtttttaaattatttatttattttttagaacagtgtctcactctgtcacccaggctggggtgcagtggtgtgattatagctcactgcagcctcaaactactaggcttaagcgatcttcctgcttcagcctccccagtaataggtgtgtgccacaacgccccgctaatgtgtgtgtgttttttttaatttttagtagagatgggatcatgctgtgttcccaaggttggtttcaaactcctgggctcaagtgatcctcccaccttggcctcccaaagtgctgggattataggcatgagccaccatgcctggccaataatggcatctttacctcattcctgatttaataaagaatacatttctcctttctctgttatgtacagatgaactatttaagataaaagtagttggcggggcatggtggctcattcctgtaatcccagcactttgggaagctgaggcgggaggattacttgagcccaggtgctcaagaccagcctgggcaacacagcaagacccctcgtctctatttttattatttttttaatttgaaaaactataaatataaaaattaaaggtagttatcttgttaaggaaatgtcccattatttcctttatttttatcctaagtttgttgttattactgtttttaagttagggaggcctgtttaatttcatcaaatatggtttcagtatttattgaaattatatgtctgttttgcatttttgtttccttgaccttgtgacagacatgatgtagagagattttcccagaactcccctcggaaatgagtagctagccaactactttatgttcaaagtagtggtaaaaggatggactaggcaataaagagcattaggacatttagatacccatttagggaaaaatttaagtttgattccttccttgcaaccacataaaaattctagatggattagacattagaccttgagaaaaccttaaaactgtttgaaggaaacatagaaaaatatctttacagccttgattcgaggaatcataagcaagttgtaaactctataagccataaaagaaaatattgggaggccgaggcgggcggatcacgaggtcaggagattaagaccatcctggctaacacggtgaaaccccgtctctacaaaaaatacaaaaaatacaaaaaattagccgggcgcggtggcgggcgcctgtagtcccagctactcgggaggctgaggcaggagaatggcgtgaacccaggagggcggaagttgcagtgagccgagataacgccactgcagtccggcctgggcgaaagagagggactccgtctcaaaaaagaaaaaaaaaaaaaaaaaaaaagaaaagaaaatattgagagatttggctacctaatatttaaaacttctgaatgatgaaagacaccaccaagaaacttaaatataatggaaggctggaagaagacattgccaacatatataacaggcattgcattaataatcagagtatataaaggaaagggaggaaaatagaaaaaagtaatcgaagaagcaaataaagcttaacctcactcataacaagtagcatgtaaataacaataacaacaaggtaacattttccatcatcaagctgtcaaaattttaaataataaatatccagtgttggagaatgtaggtgactgataggtttacacttcaggtatctccaatccagaagggttttttttgtttttttgttctgttttgtttttgagacggagtctcactctgtcacccagtgcagtgggtgacactgcaggagtgcagtggcgcaatctcggctcacggcaagctccgcctcccgggttcatgccattctcctgcctcagcctcccgagtagttgggactacaggcgcccgccaccacgcccggctaattttttgtgtttttagtagagacggggtttcaccatgttagccaggatggtctcaatctcctgacctcgtgatccacccgcctcggcctcccaaagtgctgggattacaggcgtgagccgccgcgcccagcgcagaagtattttatgtaaatggcgccccctgcagcccaattcctacctagactaacatgctcaggtgcaccttggaacagcgctggaagaccccttgcccctcctgtgggcttagtaacaatttggggaacagtttttggcctatctggcaaaatgtaaaaggcctttgacgcaatgattcctcttccagcctttcagaaatatgtacatacaggaatatgtactacgtacatgaagatatatgcaaaggaatgtttattaaagcttattttatattggagagaaaaaggaagcaatctacatgtctgtcaataggggactgtttggataaataatgctccttgtatccattcatgggatattttaactcttaaaaggaatgaagtggatttatctgtacccacatagactgatctccaagattattttcttttattttaagatggagtcttgctctgttgcccaggctggagtgcagtggtgcaatcttggctcactgccacttccgcctcctgggttctgattctcctgcctcagcctcctgagtagctgggactacaggcgcccaacaccacgccctgctaattttttgtatttttagcagagacggagtttcaccacgttggccaggttggtctcaaactcctggcctcaggtgatccacccacctcggcctaccaaagtgctgggattacaggcgtgagccactgcacccagccaagatttaatgttatgactgagataaacatgaatgaaagcaaatcttcaaaatatctatgacttgatctcatgtatatacatttgtgtctgaatatacattaggtagatggggaatgcatagacgtggaacaggcagagcctaccaagttgaggggactggacctgaatcattggacggagggaattcgtaacagaaaagactttcatgttttactctgtatacttaattactttatgctctaccgcaacaataatgtattgtatatgtttttgtgtgtgtgtgtgttttcttagtcttaaattcaaaatataaggtagcccactggctctaagctacaagaatccttatgagttgggcagttctttgacaactttttttcccacctggcgaaactatcaaggaatgtcctaccaccaagcgtgagaaatttttggcattcctgaaataaattcttcttctgagccagctcatgtgggcatcataatctccttgaaggcttttaaaagatttagatctgagtctgtctcagattctcgggctcagaaccagaatttctccgtctgaggctactatcttgctctggaggagggagtgagaactggatcactggttagcgtggtaactgttttggacaattgcatagccacagccaggaacacagaaggcagagaggcagccttgatctgcaagagctccaggtaatcccaacggggacccttgatggacaaaggcattctcccaggcttggtgatgaatgtgttccacttacagccagacgagacactcactcagggctctgcagcagagaagttagagctacagcttttttgctttgtgtttttactaaaacttaatttgttgttgcacttgttggatgggcatgtcccataggggaagtttccactactgtgctctaaactttgggctgcttgtaccatcttacttatcccctcattaataatgaattgaataaaatctttagtatatgctaatttcatatctttgcgagagttacgattttaccttttctttttaaaattaccttttcatatttctatcactcccttaccagagcagtgagtttctgggtctccctcttaggggcagacactgttccatgtaattagaattaatttcttgttcgtaggtagacagagaaaagctgccaaactcccaggagacaggggttcagatcctgtgctatggctgagagtgatgccgaggaagacacttccctccgagtcttagtctgcccgcctgtgaaactggctcgtaacaaacccctgaccccaggctcggtcgccttgagcccaagacctcacccaatgccccccgccccgccttccctcccgggctcccaggaggtgcggggactcggggggcggccccttcctcgggaggcgcccaggtggcacgtcggtgcctcagctcccggggtctctgggctccgcgctgcccacggggtgccgaggggcctctggagggggcgggttctctcgagccagaaagtccggagccgcccaggaattttggctcgaactgagtgcatttcctctcgggccggccgggtgcgatccgggaagggcggctgcgggcagacgcggcgctgcgctcggccaggccggcaccatgcggcccctgctctgcgcgctgaccggactggccctgctccgcgccgcgggctctttggccggtgagtggggcgcagggcgcggcaggggacctggagccggggagacccgcagatggcgaggaaggaatgagcgagagagacggagagagagctggacacagcagcgagatggacagagaggcagatgcagggagggagggatggagagaaagattgagaggaaacagactcagaaaaaggcagagaagtagagcaacggagagataaaggagatagggaagaatacacagtgaaaaggaaaaaggagaggctgagacagaaagaggcttcccctgaacagatatgaactaagatagaaagaaaaaggagtttgagagacaaaagagaagaaggaaagagaaaaagtgattaaaatggcaaggggtggagggagagaggatattgaagaaaagagaaagatttgagagagaccaaaaaggagagagagggaagctcgatgcccggagtagagctggcaagagagaaggagccaggatctggagtgggaggtcacagctgctgggtggggcagccccggaggccagctccatctcagagggcctgtggaggctcaggcctggctttataggacattgcataagaagccacactccaaaggatgagtgacccaggctagcccagcacagccttaaggaaccaggcagtcgggcccaggagaaaggccaccgattcacctgccaggtggcctcaggtggatctgcagtcagtgaagaagtcagcctcccggtttccagggagcttctctgggaaactgagctatgttgggtggagatgggggactgggtggaggtggagagctgtgcggaggagagaggctgtctgggtactccattagctgggttccttgcttttcactgtccgctttcttcccctcacctacccctcaggcgggcggatcacaagctcaggagatcaagaccagcctcgctaacatggtgaaatgctgtctctattaaaaatacaaaaaattaatcgggcgtggtggcacatgcctgtagtcccagctactcggcaggctgaggcaggagaatcacttgaacctgggaggcggaggttgcagtgagccgagatcaagccaccgcaatccagcctgggtgacagagcaagactcagtttcaaaaaaaaaaaaaaaagaagaaggaaaggaggaaagtattcatgtattagtgtaatttcacactgatttcatatatttttgtgcataatctttcagattttagatgatatatcttaacttttgattatgaaaacttttggatacaaaaaaatacaaagtaatagtatgtgaaagaatcatgtaatatacttatcaacgctgcttcaagaagtatcagttcatgggcagttttatctcatctatagcctccaccctctctcccctccctggattattttaaaggaaatccaggcattgtatattttctttctttctttctttcttttttttttttttttgagacaggatttcattctgtcacccatgctagaatgcagtggcacaatctcagctcactgcaacctccgtctcccgggttcaactgattctcctgcctcagcctcctgagtagctgggactacaggcacgcaccaccacacctgactaattttggtatttttagtagagatagggtttcaccatgttggccaggctggtctcgaactcctgggctcaagtgatccacctgccttggcctcccaaagtgctgggattacaggtgtgagccacaatgcctggcctggcatcatgtattttcatctataaatatttctttgtgtacctctaagagataagcactcttaataaacataactgcaatgctatgatcatactccaaaaactgtgtgtgattgaatatcattaaatattcaatcactgttcaaatgtccttgattgattgtgtcatatctttttgcaattcatttgtttgatccaaataaggttacatacactgcatttggtcaatatgtctgttagatctctttaaatatgtaagtcttctctcccctttttttacttaattttttgtttttgttgaagaaactaagtttgtcctgtaaagttttccacatttagattttgctaattgcatcccttttatgtcatttaaatacctccaccccttatattttctataaattgagagctatctctagcacgtccaacttccaaccttggtttgtttgtttgtttatttatttatttatttatttgagatggagtctcgctctgtctcccaggctggagtgcagtggtgcgatctccgctcactgcaagctccgcctcccgggttcacaccattctcctgcctcagcctcccaagcagctgggactacggacggctgcaaccatgcccggctaaattttttttgtatttttagtagacatgaggtttcactgtgttagccaggatggtctcgatctcctgaccttgtgatttgcccgcctcggcctcccaaagtgctgggattacaggtgtgagccactgcgcccggccttttttttttttttttttttttgagacagagtcttgttttgtcatccaggctggagtgcagtggtgcgatctcagctcatcacaacctctgcctcctgggttcaagcaattctcgtgcctcagtctcccaagtagctgggattacaggtgtgcaccaccacacccagctaatttttgcattttttagtagagacgggggctgcgggggagtttcaccatgttggctaggctggtctcaaactcctgacatcaagtgatcagcctgccccggcctcccaaagtgctgggattacaggcatgagccaccgcgctgggcccaagtcttggtttcttttagcagcactcagagaaacctttatccctgatggctttttagaccatgagccaccacgcccggcccatattttggagttttttataaaatcacttgaagaatagttttctgctgctttcaaaaatgatcaaaacccgtggatggttttgagtgaatcatacattttaatacaaatattggatgtggtaaatttattattctattatgttgaatgtggtcaaatataattaacccccaagtggccagggttgcttttcaaagcagagtgtgactttgacaattcagaagatacagcggcacctttcagatgccactgagaaaacatttctcaacccccagcatgcagaaatcatctgtgttgtggccctttcttactgtttgggtccagatacaaaaggtctccccataaggcctgtaagtagaagcacccgtacttccgcctcagaggatgggacccaggggccacgtctctttaactggggcagccagcccagccgagccctcctctggggcctccgggctccacagcagcgtgttctcaccagcacaggatgccccacccatggccaccatccagggtgcacatcaggcccctagcaggagccgggccagagaaaacaacgcagcatccaaggaggtccatttcccaactggcagggcctgggagagcgggaggaaaggaaggaagggagccctgaggagccacagccttggctgctcagggttaatcatcataatccttcagtcttttccactccccttgtctgagccactgacagccctgtggtgcatgtgcgtgtctactattttttattcatttatttattttcttacaagacacagtctttcactgtcaccctggctgcagtgcagtggtgcaatcgtagctgactgtagtctcaaactcctgggctcaagcgattctcccgcctcagctttccaaatacctgagactacaagtatataccaccaatcctggctaatttttttttaatttttattttatttatttatttatttatttatttatttatttttgtagagacagagtctcactatgttgcccagagtgacctcaaacttctggcttcaagcgatcctcttgcctcagcctcctaaagctctgggattacaggtgtgaaccaccgagcccagctcgtctagctaattcttgaggcctctctgcagcctccaaaagacagaagaattaaggatgcgctacacgggggagtcagggcctcaggcctaccctaccccattttatgtaagaggcagcagaggctcagggagcagaagaaactttctcacaatcccacaatcattagtggctgaaccaggctgagaaaaggggtctccagcatgttttctaccatgatgcgttcaagtcagcgctgtggtgaggatgctggcagtacaatgtcaggccctgctccaagcttgctctctcagatgcactctgtggaggccccgatgagctcacggacagttgctccagggtgcacaaagcacagttttgtccagatgtgaaggattagtgctgagccatgttgggagcgacctcagcccagccttttccctggaggggttttggagccaagttagacctcatcacagacacgtagagaacagggtggtttaggccagtggaggggagcaggctctggttgttctgacttccaaagcagccagactcccatttggctggcagggtcacactgcatccccctggcctgagccttacacgggagagtggctagggtctgggagagggcaggtgagcctcagagaaaaggcttggccaaaggcctctggacagagccagcaggggggtatgtgtatccacagactcatgacaacaggccctcccctaggacggccactctgtgggtgacaacagaggccccctcagagcttttcctctccaagctgagcagcccagtttcagctgagagaattgagttaaaatttggagtcccagactgggtgcggttgttcactcctataatcccagcactttgggaggccgagacaggcggatcacttaagcccaggggtttgagcttagcctgggcaacgtagtgaaatcctatctctacaaaaaatacaaaacgtagccaggcatggtagtgtgtgcctgtagtcccagctactctggaggctgaggtgggagaattgcttgaacccgggaagaagaggttgcagtgagccatgattgtgccactgcacttcagcctgggtgacagagtgagaccctgtctaaaaaaaaaaaaaaaaaagaggagtcccttcccatagcctcctctagacctgctcctgcctctcaagggccttctcaggatgtggggccaggatggagcatagcccccaggggcctctctctctctgaatattttacatgaatgcctgcagcccacaatggctgctgctttctgctgacaacctcgtcagacagccagcttttgttatggaacatttcaaatcgtgcacacaacagtagacagaatcgctgaatgcacccccatttgctcatcacccagcttcaacaatcagcaactctcagcccatcctgtttgctctaaacatccacgcatgcctctccaccatccccactgaggcctggattatttactttggaagtaaatccaagacagcacagcctttcatctgtaaatatttcagtataggtctttaaaatacttgcattaaaaaaataaccaaagggccattataatgtcctcctccctccccagattcagcaataacaccattatcttttgaagagtattttctaagttcagtggagggaaataatgaaaaggataatttggaaaacagattgttctccacaaaagatgctcagagtggaaggacattttgtctctggtcctgttctcatctctgagtggaagtgctgagagctagatagagttggaatcagaaaatcacagggcagggggtccccaccttgctgagatgagaacaggaggtcagggtgcctgaggtccaggcatttgcagatggtgtgaccttggggaaatcactcagcctctcagagttacacatccatcatcagctctgtcctacctcaagacctgccccacttctagacaactgcagatggccccttggccaacccatccaataccaaggccttacagctacaagcattgcacgtagagagatcaagttccataactccccctattgagctttggatgcccgcatccatggccacagccttaatattgtcactctctgaagctgctcgacctctaaaagttaaattgcaatattccttttttttttttttttttgagacggagtctagctctgtcacccaggctggagtgcagtggcgcgatctccactcactgcaagctctgcctcccgggttcacgccattctcctgcctcagcctccctagtagctgggactacaggtgcccaccgccacgcccggctaatttttttgtatttttagtagagacggggtttcaccgtgttagccaggatggtctcgatctcctgacctcatgatctgcccgcctcggcctcccaaagtgctgggattacaggcgtgagccaccgcgcctggctaaaattgcaacattctttacctcttgttcctcctgtgattcctaagacctccagtctcttcagcccccatttctcccaattcattggccctcttcttggcctcatttccttcctcatcccagctggattccaggcctcctctcctaaacctctggccaaatctcagttccttggccccttgcctccaccacatccatcctgcagactcctaggtttcagctccatccagccatctgtctttgctgccctgcacccagactgtggagcactgctgggggaggactcgtgcttccaggattccttgttgatgccggctcattctgcatagccctcctacactgcatccctcattctgcacatccccttttgaagccctctctttattcaagtcccttacctagtggtgcactgatggactggctctcaaaaaaaagtggggaggggggtcgttgatttccgtggtgtaaatgttctcatcatggccaccattttttttttaacttaaaattttttttctttttagaaatggggtctcactatgttgatcaggctggtcttgaactcctggcctcaagcgaccctcccactcggcctcccaaagtgctaggattacaggcacgagctaccatttccagacaccatggtcactattttaatgtctgtgtttagcaacctactcatagaattcttgtaattttaacatctagctctcctccctacgtgatctccatcttactgcacagagtaaatagaggccatcaggtgggagctcactccactttttggccctctagttagatggtttgcctttgcccatttttgctgcattccctctgtcttccttcgagatgtggtcccaccccctctggatccagggcctcccatcagttcaggaagttcatccttgggttctcctgtcttcctcctgtccctcaggctgtaagcatgattgtgttttccaatgctttaaaaaaaaaaatgacaaccataaatactcctctagaccttgcgatccaatctcccttccttcacagccaagcttcgtgaaattttccagaatccaagtttccacccccaacctcaccttccctcctcatctcatggtaatccaaactctgcttttccaccactcctaaaagtgctggggtgaaatttagcagggcctttctgtgctctctttccagtccttatcttgctagacctctccgctgctttcggccctgctgacgcttttcatcctctgcagaatctgtaaagctcttggcttctcttgacttctggggcagcaccctccttcctgagtgtcagcgttctccaaggttccagccaaccctgatgccccacaggcatctcagggttaccaactctgaaacccaagctcggcatcagggctctgagacttctgctctgagggttgatggtgcctggaagagctaactcaaggagaacaatggtgaatcaagagttgagaggggtttcaccatgttagccaggatggtctcaatctcctgacctcgtgcgcctacctcgccctcccaaagtgctgggattacaggtgtgagccaccatgcctggctaaaattgcaatattctttacctcttgttcctcctgtgattcctaagacctccagcctcttcagcccccatttctcccaatttattggccctcttcttggcctcatgagtcctctgcttatgagtagtgactttggacacatcctttcacccttctgtgcatcagttttcctacgtgtagattgggcataacaacaggttgttggagaggttaagttagcaccctacatggtgcatggtaagcactcatcacatgccagctgttactaacgggttcccagtgtcaacgctgctactgaaatatctcctttcattttcttcctcactattcctacagctcctgcctctgctcatcacttctccttcacccctcttatcctgattgctgcagtaacctcctgccttcaaaggcatctccctccaatctattccctatatttaaaaaattcatgtttggctctgtgacttttctgttaaaataaccccccttggcctggcttggtggcttacacctgtaatcccagcactttggaaggctgaggcgggtggatcacctgaggtcaggagtttgagaccaggctgaccaacatggtgaaaccctgtctctgctaaaaatacaaaaattagcagggcgtggtggcaggtgcttgtaatcccagctactcaggaggctgaggcaggagaatcgcttgaacccaggaggcggaggttggagtgagctgagatcgcaccattgcactccagcctgggcgacagagcgagactccatctcaaaacaaacaaacaaacacacaaaaaaacaaacaagcatcagaactggtttattaaagcccctgggttaaagctctgcccccttggcttcatttccaggacttccctctccagtctctctctcccgcccaccctgtatctccagccaccgcgggctccctgcaggttttgcacagtgagccctgctctttcagacctctccattgttgcaggtgccattctgcctggctgaagcccatcctcccttcctccctgggcttcacctccttgaggaagttcatctgggtctgtaggtgactgtggctgtagagactggtgggattgagatggctgacactcgcacactgacccccacctgggccgtcctccgcttgctcctgagtttgctttgaggactgacctcatttgagcccagtgtttacaggagtctctggcattatggaaaactaagggtcccacagtgacaagacttgttttcccacagctgccgaacccttcagccctccgcgaggagactcagctcagagcacagcgtgtgacagacacatggctgtgcaacgccgtctagatgtcatggaggaggtaacagggtggtttggaaggacatgcgagttcaggaccaccttctaggatggtgtttttatgggcagatgcaagcttgctttggaatgtgaggacatccgggccgatcctgccctgtggccacctcgtccaacatcaccctcccatctaggctgccgggctgcccagcccccagtggaccctgcctcccctaaggccttgcttacccccacccggatatttcaacatcattactggatgggaaggtggaaattcagtcactgttttgttatatagccacgattcctaacttgtgtggggaaaagtttacatctttattgtcacaagcctttaactgaaattgagcattctcattcatcataaatacaaacagcgagccgtggtattaacagtactataactttgtcatcaatagaaatccagataatttcatcttctagttatgaatatctcaacatataatttttatccttccttatgtcaaaatttcagttgttattaggcctgatgttaaatcatgtgatttagtgagttaataaatacattttattttttttgaggcagggtctctgtctgtctaccaggctggagtgccgtggtgcagtctcggctcactgcaacttccacctcccaggctcaagcaatcctcccacctcagtctcccaagtagctgagactacagacacatgtgccaccatgcctagctaatttctgtatttattttgtagaggcaaggttttgctatgttgcccaggctggtctcgaactcctgagctcaagccatctgcccacctcggcctcccaaggtgctgggattacaggcatgagccactgtgcccggccaatacatatattacatcaaaaatttaaatttttttttgacagagtcttgccctgtcacccaggctggagcccatggtacaatcttggctcactgcaacctctgcctcccaggttccagtgattctcatgcctcaacctcccgagtagctgggactacaggcatgcaccaccatgcccagctaattttttgtacttaccatgcccggctaattttttgtacctctggtagagatggggtttcaccatgttggccaggctagtctcaaactcctgacctcaagtgatctcgcctcaacctcccaaagtgctgggattacaggcgtgagccaccatgctgggccaaaaagtttaattttaaatacttgaattttttttttttttttttttttttttgaggcagagtctcactctgtcacccaggctggagtgcaatggtgtgatctcggctcactgcaacctccacctcccggttcaagtgattctcttgcctcagcctcccgagtagctgagactacagacgcgcaccaccatgcccggcttctttttgtatttttagtagagacagggtttcgccacgttggctaggctgatcttgaactcctgacctccgatgatctgccccccttggcctcccaaagtgctgggattacaggcgtgagccaccacgcccggcctaatacttgaataatattttaatgcaattggtgcccttagtaattctatatgttttattttttgcatttaaggcattattctgagaagaggtctgtaggcttcaccacactgccaatggggtccatggcatacacagggaaaaaccattaagaactcagtaaatttcagaatcccaaacctgtcatttggcagagataccaccagggggcggaacaacaaaaggaatgtgagctccaggctgcaaagtccaaaagggagaaggtattctacaggcgcttcatccaaatctgtgactaagtgccaaaaaagaaggagccttagagagcaagccccctaggatattgtcatctggggaaactgaggcaggtaggggcagagcctgagtgaggaaaacccaggtcacttagcgcccagtcctttcccactgcaccgcactggaccgccagctgctctcttaggacctagctgatgaagcggaacgtggaaccacttctgtcctcgactttaccccacttcccactctagatggtagagaagaccgtggatcacctggggacagaggtgaaaggcctgctgggcctgctggaggagctggcctggaacctgcccccgggacccttcagccccgctcccgaccttctcggaggtgagcagtgcaggtggcagaggacagcctctgggcggctgtcatctggcgctgggcaggcgagacagggacggctgctccactgcacaggtgtagcctggctggcagggagggccccagcgctccctggggacggaagcgggacggcatcatccctgctccccgcccgccccgccccacctgccacacccggtggctgccgcccagtgtcaaatgaggttctggaagagccggccctagatgccatctcagcacaacccctgcgcggagaaactgcctccttcattagccttctcacgactggagcttctcagctcctttaattttcccctgagcagccactcctgttccaccccaaaactctcgcagggaagacgggcgtccccactgatcaggcagggttggggttgcactctgctctctccttgatccttgtgtcccgcgcgcagtagttcctgggggccggggagggaagggaaggaactgctgggcaccacgggggcaggtactctgcggcaccccagcttgctcactgggggcctctgctttctttcagatggcttctgagccctggagctggagcccagcagttggaggtggtgcacctgccaggcagcgcccacagaaccagccctgtcctctcgacttccttccttagcttcatgtgaaataaaagctattctggtctcctctgtgtctgctgacagagtaacccgtttaactacagcctcctctcactccacttccatgcctggaggaagcctgcaaccccctccaggctcagacctggggacacccccactcctgtcatttataggggcagatggagcaggggttgattcacacagatgggggccctttgagtggccttgcttctcaaaatgtggccataggtgaaaagcaaggggatcagggtctcaggacccacccagactgtttaatccaaatctgcattgcaatgagacccccagggattttatgtgtccattaaagtggtttgttgttgtttttaaaaatttttcctatgaagtgaaattcaatgtaaaattcatcattttaaccattttaaattgtacaaggctgggggcggtggcttacacctataatcctagccctttgggaggccaaggtaggaggatcacttgagcccagaagtttgagaccagcctgggcaacatggtgaaaccccatccctacaaaaaaatacaaaaattagccgggcatagtggcacgtgcctgtagtcccagctactcaggaggctgaggtgggaggatcacctgagccctggaggtcaaggctgtggtgagccatgatcatgccactgcactccagcctgggagacagtgagaccttgtctcaaaaaaaaaaaaaagaaaaagaaaaaaaattgtacaaatgcagtggcttccagtacattcagaagttgtgcagtcatcaccaccagttccagaacattgttctctctctagaaagaaactgtgtatctattaagcagtcacatcccattcccgctccccacaccccactggaaaccactgatctctgtcttcacgaacttgcctattctggacattttaaatacagtagtccggctttatctgtggtttcaccttccatggtttcagttacctgcagtcaaccacagtcctaaaatattaaactccagaaataaacaatatatgagttttcaattgcacatcattctaagtggcgtgatgaaatctcttgccatcccacttcatcccgccccggatgtgaatgctccctttgtccagcatggtccacgccgtctacacttcctgcctgttagtcacttagcagccttctcagttaccagatcaatggccacagtatcacagtgcttgtgttccagcaacacttctttctcttaatcaagacccaaagtgcaagagcagtgctgctggcatatggttgttgtttttcacacaactctcccttcacagaagctggcatattgttctaattgttctattttattcttagctatcgttgctaatttcttatggtgcctaatttataaattaaacttcataggtatgcatgcataggaaaaaacatagtataataggattagatactattgtggtttcaggcatctgctaggggtattgaaatttatcccctgaaggtaagggggtagtactgtaggtagaatcacacaatacgtagtctagctgtatctggcttctttctctgagcataatgttttcaagggccatctgtattgtagcatgtatcggtacttaattccttcttacggatgaataatgtttcattgtatgaatataccacattttattcttttatttttttagacagagtctcgctctgtcacccatgctgtagtgcagtggcatgatctcagctcactgcaacctctgcctcccgggttcaggcaattctcctgcctcagcttcctgggtagctggaattacaggtgcacaccaccacgcctggctaatttttgtattttcagtagagacagggtttcaccatgttggtcaggctggtcttgaacttctgacttcttgatccacccgcctcagcctcccaaagtgctgggattacaggtgtgagccaccacacctggcccacattttattcatttattcgacaattgagggacatttgggttgtttgcattttttagctatcatgaataatgttgctatgaacatccgtatgagtttttgtgtgaatatttgttttttaatttgttttgggtctatatgtaggaatgaaattgctgagtcacatggtaactcttacgtttaactttttgaagaaccaccaaactcttttgtattgcagctgtactattttacattcccacctgcaatattagctgtggcttattcatagatgccctctagcaggttgagacattttccttctagtcttagttgagtgtttttttaatcatgaaaggatgttgggttttttcaaatgctttttctgcatcaattgagatgatcatgtgattttcccctttcattttattaattacatgcattacatcgatttttttttttttttttttaagacagagtctcactctgttgctcaggctggagtgcagtggcacgatctcagctcactgcaacctctgcctcccaggtttaagcaattctcctgccttagcctcccgagtagctgggattacaggcacccaccaccatacccggctaatttttgtatttttagtagagacagggtttcgccatgttggccaggctggtcttgaacttctgacctcaggtgatccacccgccttggcctcccaaagtgctgggattacaggcatgagtgagccactgtgcttggcctgattttcatatattaaatgacctttgcagtcctgggataaatttcacttggtcatggtgtataatgcttttaatatgctgctggatttagtctgccagcatgttgttcaggattttcgttcctgggccacaattctagacacaccctgggctggaagggaacccactgccttgaaggaaaggacccagtcttggctgcattcattgcctgttaactgaagagcccttggtccctgaataaccagcagagatacctgggtactatgctgagggccttgggtgagactcggtcttgtcggtttcaggttcagattcagccagcacattcccagctgtggtggttacaaggcaagattcctgctagagaaaagtggagggaaaagtaaagtgggctttgtcttacaccttagataccagctcaaccacaggacagtaaagcaccaaatggttcttgggaatgccaattccaggacttgtctcttagatggcatttatggacctaccctgggccagaggggcgcccactgccctggaggggggggtcccatgccaggcagcattcaccaccagctggttgaagactccctgggccttaagagaacatcagcagtagtctggcagtactccctgtgggcctgtggtggcggtggccatggagtgaggcacctctgccttgggaaagcggaagcaagagagggaaggactgcatcttgtggattcagtgccagctcacctgcagtataacagaacaccaggtagacttctaagattttttaccctagttgctggctcccagatggcacctttgggcccagctggggcctggaggaccttgctgttctgaagggaaggacacaagcctggctggctctgccaccagccgattgtagagccccagggccttgagcagacacaggcagtagccagggagtggtaactgcaggccttgggtgagagccagtgctgtgctggctttcaggtctgacccagtgcagtcctagtggtggtggccacaggggtgcttgtgtcctttcacccccagcttcaggtggcttagaacagagaaagggactccctttgtttgggagacagtaacggaatgaacaagagtctctgtatggtaatacagagaatcctgaatcttgtccaagaccatcaaggcagtaactctatgaggctaaaaaaaaaccaaagtgttattgggcttggggtgaatccttaagcagatacagcttagagcacaacacccaagccattcaaatatctggaaagccttcccaagaaggataggtacaaacaagcacagactgtgaagactatgataaatacctaactcttcaatgctcagacacagatgaacatctacaagtatcaagaccacccaagattttcctttcagcacactgaatatgtcatctcattgccttctcacttccatgatgttggatgagaaattggctattaatcttatcgaagatttcttgtacgtgtccagtggctctttctgctttcaggatttgctttgcttttggacagtatgattataatgtgtttcaatgtcacactgagtgtctctttgagttgaccctacttacaattcattgagctttttgtatgtgtagattaatgtctttcattatgttttcagccattgtttctttaaaaatttcttctacattcactcttctcttgattcttattaggtgtatgttggtacacttgatggtgtcctgcaggtgtcttaggctcagttagcttttttgttgttgttgttttctttctgcacctcagaatgggtaatctcaattgacctatcttgaagtttgctgatttttgtcttcttcctttttaagtctgctctggaacccttccaatgaattttttatttgtgtacttctcaattccagaacttctatttggttcctttttataattccagtctctttaccaatattggtgagacatcattctcctggtttcctttagttctttgacctttctgaaaataattgacttaaagtcttgtctgttaagtccaatgtctgagctttcctcagtttctattaacagattttttttctatgtatgagccatactttgtttcttcgcatacctcatagtttttgttgaaaactgaacattctgaatattatttataatgtggcaagtttggaaataaaattattcctccactgtgtcacctaggctggagtgcaatggcaggattatggctcactacagcctggacctcccagggtcaggtgatcctcccacctcagcctcctgggcagctgggactataagtgtgtgccaccaggccctgcaaatttttagtattttttgcagagatggggttttgccatgttgcccaggctggtctcaaagtcctgggttcaagtgatccacctgcctcagcctcccaaagtgctgggattaccgatgtgagccactgtgcccagcctgttattttcttgaactacatttttagttttttagtttgtattctttgtcaggtgtggccactaagtctttggttagcttagtggtcagctagtgattcaaaagatttctttgaacacttggaacaacaaaatgcctcgtagcatttgcagatgtgttctgtgttgggacacacctttcaaccttcacccatgcagtttataactatgccttagccttcacttcctgcttgcacggagcctgaaggtcaggcagaggtgacagcatagggccctctcaagtctttttaagcacatgcccagccctaggcatgtgtatggtctttcagattcccaggaatatgtggaatctctttaaagtccttattctcacccaaagaatcttatttcctagcctttcctcctgaagcttttcaatttgtctcctgtttgctccaaatgttattccttcccctaggcatgagccactaatacactgaccttgaaacgtctttccaggctgccatcttcactttaggagagctccaaattaggcaaaataaaagaaaggcatttgaaccagtccttcagggagcaacaaatcaaatcaaaatcaacatacttcttgaaaataaggtctaatctgctacctccagtgacaggaacctatacagggaatgagggatattgtttttgatgctgctgccatgctggggagtgggggatggggccagggtaagctaaaacacaacaaagctctcttactaaatccagcttttattcttaggtattcacctgattgctgtaaactttcaattcgtttccagagttcccataaatttgagtttttgccaccttatttgctgcttttgtggaaggacagacttgtggaatttcctattccatttcgttgaccacattaaagttttagaagctctcctctagtctacccttcattttaaaaagtcaaaaagacaggaagtgacatatccagggtcacacaacaaatcaggggctgagctgagatcagaataaggatgtttgactctcaggtcagagctctttctgcttcaggacttcatcagctcttagtgttgagaaggagtcaggctcaagctaaacaccaatattaggccaaggggcagctttccaaggagtaggggctgagggtaagagtccttggtatacctggtgggcttgactgactcctttactgacaggggaccctacatgagtccaggttgtggactgagtaatgatgtccctatcccttagaaaaacacaggcagagagctttcagatttgatgggggtgaaaatgtaaacctttatctttctgaggacatgtatttagcttgatgtttctaggtctcattccactccatctcggccagggcaggaaagagcctacagcagaaataaggagccaggtcctaaggtagggctgtaactccctgccaaggccaacagaaaatgggcatggcatggcattaaaccaccactttgaccgtgggcacctgcaaaggttcatctttcagctccctcttcccaaagctaggagtgcctcatctcatctctcatcacctgactgaattccaagcagactgtgccatctgctcacctgccctctggaggaacacctctacttttgcggtgttctctgtgtgagcacagtagtatttagataagcgttagattacagcaggttacagatgcagtttcccagtccccacacctgctcaaaatgcatgagggtctgaccgcaggaactgctctttagcaagctcccctgatgatcctgatacacactcaggcttgaaaaccaccactttaggaccatctacccagccacagggtgagcactccaaggtttctttcttaaattttgcacctgagacaaatgccaccaggactagggtgaggcgagtgaggctatctgtctcaggtgcaaaactatttaatagtgtttcctccagcgcccccacagctgctgaaaattctctcagggctgaattcatctggtgcttctattttagaagtcagactagatgtgtagcatggactggccttgactaacatatccaggaggcaggagaagacccattgtgttctatcccagaaagatgacctgtaaggttgcacatctttctccctatcttttttgtcctaagcataataaacagtgttgatcccaacctcccactgaccttggaaggcagtaggtgcctttgcctctgggaagatcatgaggcattcatgcagtcctccagcccatacttaacatgggttggatctcttgggagtgaccatgagggcagcgagaggaacaggaaggcagggagaaacaggactaggacaaacacaggtgtcaggtccacaactatgccaaatgtcatgcccagggtcaggttccagcccatgctgaggttcgaggggactgggtggatgggcgatagctgaaagaaaacctggcgggccataggcaggtaaaatgtagttttattcagcagctatctcatcagcagctctcacactgtccacctttacctaggctgtcttctccagatctgcagctcctctcagcagccagctctgtggctcctgccacccccatgcttgcaggtgcactccctggctacagggtcagcggcttaactctccctctgggcacaagctgagccatgtcctggctcccctctatctatctgccagatggtcactctcccttacaggggtcaatagcttcactctctctgggtgctagtgcacaccacgtggagccatgcccatccgagcccaagaacatctgtacagcgtcagcagggcagttataccttttccaaacaatagtggctttgagccaagtatgaacttacacaagcaggttatataacaagtggagtatacgcctgtgacctaaactcgctgagtcactctggcctggatatccaccttggtctattccttgaccaaagcacatccatgtactttacaacaggtggtctccaagtgtgtagaccagggtctcaaacccaaaggcctgcaggagccaaatgggtgacatgggcttagtgtaatacaagacggagcctatagcaaataaggagtacaggcctaaaggggcagctgcaactcagctccagccatgcaggaatgcaagccccatagtgccagaatttctgagttttcaagagaagccagaattccagatttttaaaaatatgaaatctctcaatgtttaaatgttggcaacaaattcaaatgtctaaaaacactttggaaaccaaagtaaatgtgtctgtaggtgcaatattgcctgctgggcaccaggctgggaactttggagtaaacagggcaaggtaatgtcacagaatatggtcacatcagagcacattggttctaggccccatcacaattcaggaggcccccagggtcaccttgagttcatggcaagttgtatatgccaagcaccccatcccatcaggcaggtcccacctggcacccaagggcaaggggcctgccctagcagaggagttcttgggagagcagcagggatggggcttcagcttgggcttgaggcatggactctgacgcagagctgacgtgttgaccaggacctgccatcaatctcaggtagaccaggctagttctcagctcatggctgctccacacccttcggatgtcattcttcctttatgtttagggggtagtcctcaagcaaatgtctgcagatgagctactccctggggctcctgccaggacccagcaggcttgatctagcctagtctctctggattctcccatttctttttgtttttttctcatttgagacaaggtctcgctctgttgtccaggctggagtgcagtggtgtaatcacagcttactacggcctcaatttcttgggctctaaggatcttcctgcctcagcctccagagtagccgactatagggaatgcactacaatgccaggtaaatttttttttttttttgagacagagtctcactctgtccacccaggttgaagtgcaatggtgtgatctcagctcactacaacctctgcctcctgggttcaagtgattctcctgcctcagcatcctgtgtagctgggattacaggaatgtgccaccatgcctggctaatttttgtatttttagtagagatggggtttcaccatgttggccaggctgggtctcgaactcctgacctcaggtgatctgcccgcctcacctcccaaagtgctgggattacagccgtgagccaccacgcctggccaaattttttagtagagacaggggtctcgctgttggctaggctagtcttgaactcctgagctcaagtgatcctctcacctcagcttcccaaagtccttggattacaggcgtgagccatagtgcctagtcgattctctcttttctaaacctcaacgcaggaggttggaaaaggagtgggtggagacccctgatgcaaggtaagctctagcttctggacatgacaccataattctcagaaactctcttatggattctcttccctcacaccaccaaccaacgggcacagggtccccagagaccagagccaggagcccctttcagcctggaggcaccctgaggggaggcactggtcttgtgactctctgggttgtccccatccttctctctggcccccgccgaggggcaccaggaattagcacacacccttcttccctcctgggacctgggtgaaggactgcattcttcgcaccacaccttcagtggacttcactgcacctgcaaccaaccaagatccctttgcctttcaggtgtctgggcctcctgcctggatttcgggaacctcccttcccatgtccttacgagtccctgcaaactagtgtatgctcagggtttcctgcacacaaatctctacgtaaggttacatgaactttcactggctgataaggccagacctctgagccacagggcagaatcaagcagaagaaaacaagttggtaccaggaagacatttccagaccattccagagctggctgactcttaatgtggaaacaagttttggctacagacattcaggtttaaggcacataccacaaattacaagaagccctgtcactgacagggaactggctttgttctcgtggtttctgcaaggaagatggaaggaatgactttctggccctttttttttgttttttctaaaaaggagtgagtttggcagtaacaaagctcgtgacacactcaccagatgcacaggctaccttctcaggcacgcctccctttctctcctcagcgaggacacggtgcttcacccacccagtcgccctcaccagaaatgtgtatgcagcaaacagacttgtatgcctctgtctggcaatgactgtaagaaaagaaaatatgcctccaaataaaaatatacaattacatgacgaaatgaagccaagtcttagccacaggcaaaggggaatgattgcatgagtcagaaaaatgaaacatctattttagcagcaagaggctgtgagggatggggtagaaaaggcatcctgagagagttctagaccgacccaggtcctgtggcacactatacgggtcaggaggggtggaagacaggcctaagctctaggacggtgaatctcggggctatttgtggatttgttagaaacagacattcttttggccttttcctggcactggtgttgccggcaggtgggcagaagtgagccaccagtcactgttcagtcattgccaccacagatcttcagcagaatcttccggtaatcccctgaagtatctccctggccacagaaacaaggaagacatccgttaagggagggacagtcactttcagccttctgggtcctgatattcagccctgagcacccttatagggagaaagccccaccctggggaattttctcccactgcaggtcctgcagcaggcgtcacagaccttaaaaaatgcagttcagccttctccaggcccccatcagaagacggaaagcagcactcaccccagctatccacatcaaatgaatacccacaaaaaaaaattataatcatcctaaaaaccacttcccagggctaaccaatattgctgttttcccagtgcatttatgctgccttaaattggggttaccaatgtaacgcaacacagtgtcctgctcaggaaatgcaatctcctcacacatgactgtccagtggaaggctcagactgcccaggtcccagggatctctcctctgtctgaggccactacacttactctaagagtgcaggctcggcttggctcatttctaatcatttccttccaccctaagcaacttgagggcaaggcatgtggcttcttccagatgtccatagcttgctggcatgcaggagatactctgtaatgaattattaactctctttttttttttgagacgaagtctcactctgtcaccaagactgaagtggaatggcgtgatcccagctcactgcaacctctgtctcccgggttcaagcaattctcctgccgcagcctacctaattagctgggattacaggcaagcccagctaattttgtatttttagtagagacagggttttaccttgttggccaggctggtctcgaactcctgacctcaaatgatccacctgcctcagcctcccaaagtgctgggattacaggcgtgagccactgtgcccagcctagaatcactaattctctaacaacagcttcattcatacagccaaggaaacacagtgagtttcctgtgatgacatgcccaccatcatcaaatgctactgagtctaaggtgggaggacgtggtccccatggtgcaattgcaaggctcatgtgagttcagaatttgagcgttagaccacacagctgagaatgtattttgtcagactggctctgccacacagcgatacaactgtggctagtgtttaatagacacttgacctgcactgcctcactcaatactcacaacattcccaggaaggaacgattattttctcatcttaaagacaatggagctggggttcagggagatttaagggagccattcaaggtcacacagttagcaagtagaaaagctggactccaagtggcgtgacccccagggccctcgctctgaacggccttactatgtggcctacgccataaagctgagtgcaggaagtgctttgtcagggagtgacagcagagctccacagagcctttgggacatgagttctcactgacagatcaaggaatcacacggtgatcggaacgctgaaggtcacggtcaaggttggggaggtcccgagtgttctctgatgctgctgggggatgcaaggtgggggcgacagcaaggtcatgatccacctgccctcagaaatttataatctgtttaagggcaaggggatgaacaagtccgaggtccataatcaagatgcccacacacagcacagaggccaagcatatggccactccaaggagggaggttccacaggtgactgagatgccaaaagggagcccagttggcctgcagcaggcccgtaccgagatgtcgtggtacagcgacttgccgtacatccgcttatactctgatctgatgtccaggaggtcggtctcgctgcgagacaccatgatgcgaatcagggtccggtcctttgttcctgccccctaaagagagtccacccaagagcatgagcaccaggcctcctcaccttcccacctgccctgggccctccagtcccctccctacccaggtcctcggaactctcagctgagatttagctctccccaggccttctgccctcagcccttggtcccaggcacaggcgaggctaaggttccatcgcaacctgcacatggaagttacataccctcatggccttgttgagcctctccgcaaagaaggctggggtattcttgagacatttcactagaagagagaaactcggcataaccagatctgcagaaaattctcagcccaagcagggcatggagtctacaagtgtcctcttagaggcccagatgtcaaacccatcactgcatccatcttttctcctcctccttctgttccaggctcaactatcccatgatcttggctccagctatttggaacagaaacacgcaaagcctggaaaccaacccaccctctttcctggcaaccactgcggtgaaaggaccaagagtcagaggggcgggggtcttagtggggctaggagctacacagggaagcaatgtggatggtgatgaggaactgtgctgctgctcaggcaggaggggcagactggagaggccatgaccgtcatggagaaaccgtggctgagtggaatgtgcatctccctaggcttcccaggccatgagacctactatgggggacaggcagggaaatgaggattttccatctctcccatccagaaagctccaaaaaaagcataatgaaaaaaggggcagactgattttcccaagtgagtagaaagaggggttgtgagggcctcagggcagggacccaactctgcacagtgggagggccctgctagaggacatgggcaatgtaagaggcacaccaccatcctggagccaagccagctttcctcagcatgggcctgtttcgctgctgcaagtaaaaatctttccacgtgtttccatcacaaacatctgacaactgcctgcagggatgtatttttagaggaaacgtggcaggatatgagtcatactcctccgggagcgcagttggatgccctcccactaatacccacactgcagttccctactccagagctgcaccgcaaacacacacaagacacctccaggacagctaggggttcaactgcacagggaaccgggaagcagcatgacttcccagcatctggacactctgggctgagcgatcttggatcctgtggtcccttcacggtgtcacccatcagctggaggacaggcgagcagcctgaacactcacgatacacgttagcccctggcaggtgggcggcaaacctgagacacttacccacggccagcatgccctcctccaggtccccggacatctcccggcagatgctcttctcaatgtcccggcctgtcattctctggtactcattgaaaactatggggatgacagaggcttatattatgaactgaaatgtgtctccccaaagttcatatgtggaagtcccaactcccaggacttcagaatataaccgtgtttggagataagatctttaaagaggtaattaagttaaaacatgctgctagggtgtaccctaatccaattcgcctggtctccttagaagaagagaagattaggacacacacagagatcccagggatgtgcacatgcagaggaaagaccatgtgagcacagtgattgtcacgaagaggccacgggagaaaccggcaccccactcttggatatctggccttcaaaactgtaacaaaatgagtatctgctgcttaagccacccagtctgtggtattttgtcatggcagcatgagcagactaacagaggactcacatgaggtggcctctgccccaaaatctcccacctgccactctgctcccacaccctgcacgtccccaggcctgctagcgctcaaggaagtcagagtcttcgtcacaagttacatgcaccacctgatgtccctccctgtgtggtccctttctcaggactgccaatctgcttaaccaaatcgcaccttaatacccctccagggcccactcccatgtactccaagacagtgtcccctcttctcaaatcctccacacctccagtctctgccattccttggctttattcatgcatccatctgtcttcctcagcctgcctgtgagctgaggcccagcctgccccagccagcctggcttcttgctgctcacctcgacctaggacacgctaagcacccacaggagtggatggctggctcctagagagacaggtggcatgatggagaccttggtcctgactccagttctgacccaggacataaaactctccttccccagcctgagtctcagctaccatttgcattttaaagttgtgatttctgctctgtgtgtatctgtctcaattaatatcttcttccaatcagctactcttttctcctaagtaataatgtttgtgaagccatgggcttgatgcactacttacatgttctgtactcattaaaagaaataatgattaagatgaaaatgctttcactcaggctccattacaggatagtgcagaggttaaaaagtgtgctctggggtcgggtggtctgggttcaaatcccagctcagctgttactagctgtgcacccctacttcctctaccaccctgtgcctgctttcacagctgcgaatggggagagccacagcgcctgtctctgtgtgcagcacagagcggtcgctgggttttcaccctcactgcccactggagcagccctggccacagcccaccagttgctccgtgtggtcaccatcctcagtccttgcctgccacctcacactggcctccaggacccccttcctctgcgtcctcctccctccctagctgctccttcttagtctcctcacaccggtgggctccccacagtctccctcctgaggggacctcctgcagtcccagagcctcagataacttcaactacccatagctcccttaccttccacaaccaggccagacctctcctgacctccacactcagcaacccagcagcctccctgcagctccaccctacaggcacctaaagccagctccacctacagtccccctgtctcagttgagggccattctcccactgcttggcctaaagaaaccctgtataatcctcgaaccctctctctcccacacgtcacgtgtccaattcatcagcaaacatggccggaacctgacacctcctcaccacaagcccctattaccaccattcctccccgggtccctgcagcagcctcccgacaggcttcgctgcttggccttgcacccttcactccattctcggcaccacagccagggattctgcacagcctcctctgctcagggccctccactggcttcctcttttgctcaggataaatacccagctccgggaagtcatcagcagggccctctcccctctctgccctcacctcccactcctcttgctcactccacctgctccacatggtcccccttcactgttctcagtcgtgctgggagccccaggcaggcctctgcccctgcatctccctttaggtttttaaatcaaatgtcacgacctcagtggggactggcccaagcacctcccggtggaccctaccatcactccctacctgtttccagcttgattttcctctacaggatttcccatctgatacagattttatttcattgttgtttactgtctgtctccccaaatgagaaagtgcagcccatggaacacactctgcagtgccctgccccccaccgtggccccacacctgctccaccacctgacagactgacccatgcgggagcgcgatttacatctgttgaatgaatgagtaaatgaatggcacccagttttattgttatgactgtttcttatgccaggctttggaaaacactggattgggtgctcccgaaggaccctcccaactctgacgttccacattcccacgtacaaagacaccaggtttctacaccggtagaacctccagaactggatgtttgccagaactcaggaaaccctctgacagtgtcttttaaattcccaccagggggctcttttgaggaggcgaaagccccacgcagggaggaacgaccaagtgttcccatagctttgtttccccacaatcccctgactgccctcatctaactggcctctgagggaccccagcctgccttacctgctaccaggtgggcccggctccgggagcacagaaccgcattgaacttggactcgtctgttcccaggcggttctccccggccgcatacagctcctggagagagaggaagacgcacatgtggcacaggccacacccagaccccaggcccaggtcacccaggagagcctggtaaacttctgaaggtttgagcctaaagtatttgccaatttgcaacctctgaactagatggcctctaaagtgcctgctaggcctcaggtagcagccctgaaaaagagcagaaagcagcaatcaggggctgagatcccacaggtcaagatgaggccaaagcagctctggactgagaaggcagagcatgagacaatttttgccccgctaaaagtggcatgcaaaactctcgctggagcaaaagccagagccctgagccccaggcgtgtccagccctgactcccagaatgggaatggatgttaccagccagagagacactgaataaggcagaccctgcaggagcagcaggtctgagaccagggcagaggcaagtgctgactgggcacagaagaccgagccaggagtataggcccttgtccgggctctgcttctagctttcagttgggaacagtgctcaacctttttgagcctcagtttcctcctccggaaaaggaggaccagcaaaaggaccagaccagaggagtagctctcctccagccctaacaagggggcattccttgaggtctcattccaatcccgcagatggtagagataatttagaccactggcagctcctggtgaatgccctgccgtggatgacaagagcagtgaagggagacagagaggtatggccaactccaccccaccaggaagtaatggctctgccctgccataatactacggttgaaattcattagtgggaaacccaaacttttcgagagagtagctcagatgcctggactttgcttggacttttccccttttgtctgcaactcacaagagggacaacgacagaattctaagggtgctcaactaatgtggcagctggtttctaggctcaaatcctcaaaaacttaataagcaagtgcaaattttgcccctttgcaaacataatgctatgtgcaactaaacatggggaaagtacgctgtcacacaaaatcccacgtccaaaaccatgatctatcaactatcgaaatactaattatctcacatgttccctcctataggtggggaagctgaagccctggaggtcagattacctgttctaggtcatacagttgaacagttcagcgcgtctgaaactcacagcatctgcaacccactgcttatctattgttctttccaccctagggtacctctctcaggaagcaagaaagcggggtgcatccctgctttaggaagtccaggggcttggccatcacactcacctgggcatctctctgggcgagtgacatgtccacgtttgtgctttcatcacggtttccctgaaaggaagcaggtgtatggtcatgcccactccttccccatttattttccctttcctcattgcggggatcccatctctttgacttccatggcttgggggccccgagccctgtcgtgggaaaagtacctgagagagagagatgaggagccgctggaagtgccctgatgtgtcgcttcgaatggcctcttccagggtctttttgaattctgaaagggagaagcaaggaaggtccatcctgtagctctctttatggagctgcccattgcaaaacactatcaaaagtgggtactggggagaaaaaggctggaggtcttggctcgggctcaagagaacaaatagcccatatggccctccagggatatacaagcctgtgacctccaggctgacctggcctctagtcagccttggcccaaaccacatccaggttttccctgcctctcccttacattagtcatttgcaccatgtataaacagaaggaagggctgggtcttgggtcaaagcccaaagtattgggggtggcagaagatgggttgataagaaggccaggaaggagtaaaaggccctaggagagaatgaggccacagccccaagagcacagggatctgcagagggcagagggcagagggcagagggagcggcctcacctgctttgtaggctctgtttaattctcggatgtgctcattgctgcgggaagcgaggatctcaatcaggcaggcttcatcagtgccaaccccctgcaggggcagagaatacaaccaaccatgtgcttgttccagcagcctcaccagcactcgggaagaagggtgggggctacgctgctgccttaatcccagcaacagaggcccctgacacagagacacaccctccagccactcccaggctcgagggcatcagctcttctccacagcccgggcaagcacaatgacagtggcagtggtgatgagtagggctcacacaaaggggcatccccatggatcagaaaactgagcatcagagaggggtactggctggtccgaggccacacagtaaatggttgggttaaaatgtggaccgaggcctgctttattcagagttcagccggaagcgagatgacaacaactgaaaaaaatgggtaaaaagcaagagagatccaagtggacatacgaaaccctggtcctagaggggatggtggaatgtctgaaaacaactaggaaaaggtaggaacaacaaggatgaatcggacaaccacgccagggacagtaagaccatagaggacaggctgggcagcctggcttgtatgttggtttgaatcctggctctgcagcttaccagctgtgtgacctcgggcacattacttaacctctctgtgcttccagttccttgtctgtaagatgggagtgatactaggacctacctcacaggaaagtcatgaggattaagtgagttaatgtacgtagagcacttagggcctgtcaggcaggacgtgcgacattgtgtcagctgtttcctgctacagctactattgggttactacacgttagcccctcacccagtattcccagcatgtcctgagacagcatccactgtccccatttcacaggtgctcaaggacacacagctggtgagtgacagctgccccaaacctgtgtggtttctaacactccacaaccaccagctcatgactccggctgaagacgggggccagggagatgtctgggtccactccctggggccccgggccatcgccctgcctgatggcctcctgaccccctccctagaataacacatgtagatgtgtttcagcggagacccctctcctttccaggccaccacactgaagtctctgcttctcctgaaggagggaacattcactgtgcttatcaggcctctgagtgacaggctccttctgggctccagcctgactcatgggattccctttccaagggagctgcctgcccctgcctgcagggtgcacacagagctgtgggactgcacagaatggacaggacccaaccctcagtcaaaacccgcaggactggagggaacagtgagtccaagccgggcccgtcagaacctgcccgtttggagaccctgctggtctcttctggagctgggtctcatagttatgcggagagtggtcgacaggccccctctcccaccccacatgaagcagccatggtaggagaagcacagaaactgacagaaaagcgggcgctcaggagagacagagaccagagagacgtctggcctgggccctctttacccacatgactgattctccacttttgttgttcttaaaccgaagtgtgtttctgtcatttgctagtaacagagtcctaaagaatgagaacgataccaaccatggcctcctacccctcttcttaccacagaatcgcaaccttcaaacccgagctcccccttttctttaagatggagagagacttaagcctccctgatgatgactggtgcgtcatttgcctcttggggaaatcacagggagttcccttttctatagcatgtggactccaacccaggaaggcctgggagccatactgacaacagcagctaatgagtgggctagaacacagcacgccatccaggcctccttctgggctgtgtgtccacacgcatgcgcgcgtgcgcacacacgcgcgcacacacacacacacacacacacacacacacacgtacacaccttgatggcttcctttatctcataaatgtcaaagaggactggggtcttcatcagagccaagattgtcttctcaaagtttcctgacagttcagatttcagatctttgatcaaatcctgattggatattcaaacaaacaaccaacaaaaaaaaaaacaagtctatttaaaaaatccacaggaagtgactaataagagccatatcccagatttgaggaacagcagcatggacatcccccaggggcctgagagaaaagcctgctctcagccctgccccaaacctcccaaatcagagaccacattttaccaagatgcccaggggatcggtgacacaatgaagtttgagaagcactgggctagaacacgaatctaatcaatatttaccgaatttttatctttctaagattcaaaaccccagaagttcaaaatatgctcatacacgcccctcgtacttgggcagcactcacagcctttccctgcaaagctcttacatcagctaaaccccccagggtggtcatgaagagggcaggggaaggaaaatgatgtggccacaacctcagtgagatgtggcagagcaagggctagaacccagggatagatgtctggagcctctcagcaaacctcagcacccggtggcatccttcacctcccaacgatgccaccagctggatgggcagaaggaaatgccctcctgctccttactgtccatccgggagatccgggcccacccaaggaaaagcaggggagagcagggctgtgctgagcccaggacacgcctcactgtcccgcgcccccaccccgcagctcgccttgccgtaagccgtcttgaaggaaagtaggatctgctgccgctgcttgttggagcgactccccaggcagtcaatgatggcctgctcatccgtccctggaggaagaggcagcaggggtgggtcgggtaggggtcatgagatgctctgcagctgagacttccctggcctgggcccctcaactgttctgggcatgctagccatacccccacatccaccttctatcaccactggggccaggtcagcgtcccccagctaccccagcccacagagccacagtgaaactgcctgggaaatagggggcagggagtaggatttgagccacccagggtctcttaccgaagcctttcatggccttccgcaggacctcggcatctcgcagggggtcaaagccgggagcatcagtgatggtgcctcggcttccaaactactcggacaaacagtctcaggtaagatgtcgtgcatgccgccttccccacattcaaggctgctccacccctagactctgggaacagccctttctctaagagttggagtatctaaaggagtccacagtcaacaatgcagaggactttacgccgcgtctacctaacttgactgttatctggccttgtgttctagtactgaagctttttcctggctccagtggctgggagctcacctatagctgagtcctgatgctgaaaatctgcccagtgcccaggtcctccagggctggggctcaggctcctgatgaagggcaggtctcgggagcaggggctgtggcctctctcatcgatgcctggcctccacagcacatgtgagcacacatgggtactcctaacagggctggctagcccatgtgtcccctccagtggatgcaggtattgagcctccacaactgtgcatggcagcctgatgacctcttgatctagcactggttccctcgcactgttctctagactagcatctgccggacttcctccagaccctgatagctgcacaaacccgcaaactggaactttccaggctaaactgtctcccagtggattgtcttcctaggggctggtacaaactggttataacacaattaagagggcagctcagggaaaagataagggagggaggctggaggatggcacagggtgggggaacgtgtgggtatggaagggaaggaggaaaggagaccctctgtctaaaaatagtcattgagcacataccactacccctgtgctggctggttgggccacagaaccatgacaacgaattctaggctctgcaaacacgaactgttctccaaaatgagccaagatcaaccctggaggaactgccaacattctccctacccaaagggaattttaataatcctccaaaacctgtctgtgccggggggggcgggggtggtgcatatcaagggaccgaagacagctgttgagcacaaagccttgagacaggtggcctgggcagttcttacaaaacacacagcccaggcagtaaatgacacagaggaataaggagtactcgccaggggtgttctgacccaactcggatgtggagcgtctcatcacaccaggagaaacaggacagctcccttgggccttaagcaacacaacccagaggtggggagtctgcaagaaggtgacgctctttgtttgtctttttttgtttttgtttttgttttaaaaactgggtcttactctgtcacctaggctggagtgagtgcagcggcatgatcccggctcactgcaacctctgtctcctgggctgaggtgatcctcccacctcagcctcccgagtagctgggcctacaggtatgcaccaccatgcccagctaattttttttctatttttagtagagatagggtttcaccatttcgcccaggttggtcttgaactcctgggctcaagcgatctgcccacctcagcttcccaaagtgctgggattacaggcatgagtcactgcacccggccgacactatttgttaaaacaagaagtgcagctggaggcctgcgcctttccctgtctccccatctactgagccatgtgtctccagcctttggggcccaggcctggaccaagggaggcagtgggctgacactcacctgggttgggggcacagcgggggtgacagtcccagaccccgggtatcctgggtagctcggcactggctgctgctgcccagggagtggcactggaggctgaccagggtaggtcactggtggctgcccagggtaggcccctgggggctgctgtccggggggtggcatgggctggcccggcacaggggcccctgggtatggcggatatgagggcatcctggagggtgggtttcctcctgggggtggatacatcccatagggaggaacaggctgctgggcagaggggggctgcccaaagccgccagggggcactggtgggtagccagccccaggggccccagggtacaggttgggcatgttggctcctccaaatgtcccagacatgttggccgcctgcaaggacacaaagcagagcctgaggccaatgggccctgctgcactccgtccctccaccctttttcatacctaagccaagtcagtcctcacagcatctccgcttgtggaatatgaagtaccgttatacccatttcacagaccacagaatgagtttacttgctcaaagttacacagccagtgaacagtgcgactcgatccaaaccagagatcctcatccccttctgcaggggagatgccttccctctccacatggttgctcctcccatcccagaccacctgggtgaaggttaagagctcactgcccaagaaggtgcgtgggtcccatatgcagggttgggggcatccccatcacatcagcctgctacccacagacacctctggcaggcatgttcaggtgaatctgcactcaccaggaataaaaacctaaatccttaggatggatagcctcctacaccctgcaagagctagacccccagacttcatttcccatctcaccccctcgcctttccactttagccacactggcctctcctccctgtccctgagcacctcacaccccttggcacctcagggcaccggcattccctagacatccatacagcacttccttcccctgatgcaggtctttgctcacacatcctcttttcagccagacccaccttactgctaacttaaaatcattatccttacatcaccccacccccactcctgacccctttaccctggtcaacttgttcctatggcacctacactttcaataacatcacatcgttgacttaaggtactgcctgtcttttccccatagatgataagtgcagcacggctgagatttttgtttgttttattcacatatccccagtgcctagaactgggcctggcacaaattagggtgtgtattggttgcataatttcctctaagcatacgtttgttttcaaatcataaactaagcatacgtttgttttcaaatcataaaatgtattattttaaaagtgaaacaacaaatttaaaaagtagcatgtctgcccaagatacctgccacacacccaccaaggcctaaccagaagagccctccatatgtacacacatgcacatgcaggtatatgaatgtggatactcatacatagcacgtgcatgcacactcatgcagataccctcgccaccttcccaaccctaacccctcagggctgaaagggacctgtgagatcatctggtccccttcccctcattttacagatgggaaaagtgagacccagagaggggcagagagcaggtggcagaagcctgatgaaaaccctgttctaaggtacagctcaacacactacacaccacagcaacacacacatagacaactctggagccccagaggccagcagctttgattcctctggccacgcaggtgtggccccagggctgcctcagcaggagagctggactcaccattcccgagagatagtcctggttgaactgccccgcataggtggccacgttatccagcccgatggggggcatgctgggcggaggagggtaggcagcacctccccagggaccaccacctgaaagcaacaccaagccctttagccccctgccagtcccccaccacacggggaaaggcagagatgagagctcccaggtggtcagaaagggaggcccagtaaagcctcgagcctcgagcctcgggacaccacagaccacatgaaaacaccaggaggaaagtctccccctatcccactggcagaggaggggaaaccttcccctcttcccagggaggaaggtggagttccccaaacactcccaagaccctctgtggggtattaaggaggctgggagagcccaggcaggctctgccctcccaagttcaccatcatggagcaggaggacagacaaggacagactgttgtgggacaccatgctgagcccatgacagaggtgaccatagggagctctgagatttcagtaatgcgaaggcactggcgggagggggtttggctgtttgctattacaagtctgtaaaaggcagggagaagcaggataagaggctggagggacatggggctgggtcatggtaaacacagataccagtccacaagaggacaggaagaaacagaggtgaaaagcccgctctgaaaccagcaggaccggtatgtgccctggggcaaggctttcaccctccttaggcttgtttcctcagcttacaaatgggctaatggtgagtgtatgcctagactgctgtgacgaagactgagttaacacctgcagggctcagctgggtgcccgatgggcattcgacatcatcatggggcctctggcctgttagatgctttcctctacatggcagcttcggatcggctcttcatctccagggctccagaccctccaggaagaaccttccctaaatttcctgcctcctcctctcttgctgctcagaggctgctcagctgtgctagcaaaggtggcagtggcaggatctggatggcaggatttctactatagagagagaacccaggccagtgccagccaacctggggtgggctcattcagagggcagtggcccagctcagcccctaacatgccctgggacagcagctgagccacctctaggtctgagtctgttcttcacctgctgaatgggagggaaggtaaatggcctgcaggtctggggtgttcaaaccacaggacctcagctccaaagaaatcaatgatgcctaggagtcccctggggagaggggcagcggctcaggcaccctcaggatgaccagccttggaatgacccttttctccccttggtctcatgagccctcatatttcctttcccacagtggggaccaaatctcatttgaggaccaaaaggggccagggccagagaagacgacttctccatgtgactacccacagctcctgcagaaaacagggagtgacctttgacccttagcatctgcctccacttcctctcttggcaagggggatcttgttgctgcaaacccacacaccttgagcagagggtaggagaggtggtaaggggcaaccatcacctagcaatgctttggaggacaccgtgtcgctctgcctgcctatctcatcagtatccaggaccacctaatgagggagaaatccttgaagcaattttgcggagaagaaaactgagtctcaaagtgacagcatttgcccactgttactagagagtaaggcaagagacccagccctgggcctggtccagggctttctggaggcagtttcaaacctaggcctccgatggccttagtgtcatgctcttctccagcccctgcctcggctggctgtcccactactcctgttgtcctctcctcccctgctgggccgtgctgtgaggggaggaggggagtgaggaaactactgttctcccctctccactcccagccactgtacagaggcagcattcactctcctccccaccccagaccctcttacctggtgcagctggtgggtagccacctgggggcgggggatagccagggtagctcatggttagatctggaagagaagacgaaagcacattcaggctctgcctgagagcccctgctggcccgtgggacccagcttcttgaaagggcagccaccaccacaactgggaccctgcagaagaaactgctgcatctgccctgcttgtcgcagaccagttcactgtctcctgctggtgcctccagctagaaacagtacccaccagcatgctgcctgacttctgggccagggccacacccccggccccacccacagtgacaggattcactccccatgagccagtttccttgaaaggccctctcactgaagctttgctcctgcctctgctggcaagggtgcagtgcgcctctgggcctgttctcccacctcagaggtagagacgcactgcctcattctcaggactccaggtctgtctatttatcttcctgtgtccttattgccatccctccagcaacaggggaagtcagaggcccctgtctctcttcattctccaacctctggttcatcaggcaaggggacctggtaaggtatggaatcatcgttcctagaagcaaaaagggccctcaggaggttcatctgatgcagggtgaagaaccagggcaaatgaggcagcatcaccctgtttctgcagtagaggctgctgattaagagaagtaagtgatttgcagatctgtcagtaagggaggaagagcagcctggacaggtgccaggtgagacacctgctctcacgaagtccctctgaacacggatcccttggcaatgtcccctgccagttaaattgtgaggagggacacagatctgctgtgacaccagccacattgtgcaacctgcctgctcttgctaatagcagctgctgctgcagtctgcagagacacccaatggcaggcggacatgtgaggaaacctgcagggtccctcaacaatcacacctgctcgtctcgagtatgtggcttctttttacacactgggtttcacgctgcaatgcatatcagaatcacctgatgggattgttaaaacacattgctgggctccaccaccaagagtttctgagacagtggaaccagtttttgcatttggaacaagtttccagatgatgttactggtccagggaactcactttgaagaccactgttctagccacgctatccaactataagagtctagctgcccttcatatctatcttgaagaactgggcatattgggttttgtttgtttgagacagggtctcgctctgtcacccagactggagtgcactggcacaatcatggctcactgcagcctggacctcctgggctcaggtaatcctcccgcctcagcctcctaaagacatgtgccaccacacacagctaatttttttttttgagagtcttactatgttgccgaggctggtatatgctgttctttttaagtttttttattatttatttttatttttttgagacagggtctcactctgtaacccaggctggagtgcaatggtgtgatctcggctcactgcaacctctgcctcctgggttcaagtgattctcctgcctcagcctcccaagtagctaggattacaggcgcccgccatcatgtctggctaatttttgtatttttagcagagacagggtttcaccatgttggccaggctggtctcgaactcctgacctcaggtgatctgcctgcctcggcttcccaaagtgttaagattacaggcatgagccaccatgcctggcctacttttattttttaaacagcgtctcactctatcacccaggctggagtgcagtggtgcgagctcagctcactgtaacctccgcctcctgggatcaagggattcttgtgcctcagcctccaacaggagggcgcaaccatccctggctaatttttgtatttttagtagagatggagtttcgccatgttggccaggctggtctgaactcctggcctcaagtgatctgcccgctgcggcctcccacagtgctgggattacaggcatgagccactgtgcccagcctacatgctgtttttaaggaagctaaagaacttccttaaggtaccaccggtccccatagggtgggcctggttttcagccctacgggtgtagtcatttgtttgggtcagtgggtccagaggtgaccgtaggcaaagccctatggctttggagaaagctggaattggctccctgtagtgtggaccaaggacctactccttgcagttttcggtctctctgagcccctaagcacgtggtggatgaggtccccggtggcatcaccttcagagagggtgtccctgaggctgggtgggctgtcagtacaaagccctccccgtcccggccccagcctgacccttctgcccagactctgccaaaccctcagacttcactggtgaggaggtaatctgggggatgtaaatgaccagtaggccaggaaccttctaatagaaggaactgcccgacaggtgagcaggaagagccgggatggtgtctctgtcaccttcctctctggagacaccactaggcaggacctttgagcaccaaagacactctccactcctggcctcctctcagagaaatgaagccaaaagctccatccacagccaggccagggaaaaaacccaagaaacagaagctggataccaccctgttccttataccaagtaaattccagccaggccaaataatgcagtgaaagaagtagccccaaaaaccaacgacataaataaaatttcagcataagagacaaattaaaaaaaaataaagatgagaaaaaaacttaggaaaaaagttttattaatataataagaaaaagatcaataaccactagagaaactgtcaaatgatgtgaacagatctggcagttacagaaaaggagctgaagatgctcaccttcaccaatgtgctgaggaaatcaccaattaaaaatacacagatgtcggctgggcgcagtggctcatgcctgtaatcccagcactttgggaggccgaggtgggcagatcacctgaggtcaggagttcgagaccagcctggccatggtgaaacactgtctctactaaaaatacaaaaattagccaggcgtggtggtgggtgcctgtaataccagctactcgggaggctgaggcaggagaatggctggaacctgggaggcggaagttgcagtgagccaagattatgccactgcactccagcctgggtgacagagcgagactccgtctccaaaataaataaataaataaaatacaaagatatcaaaacttaaaatgacatacctttgactcagcaactccacttctgtaagtctcttccccagacacacacctgtgtgaaatgtcatacagacatgaattttactacagccttatctgcaacaactcctaaacctccaccaatgaggctggttaaataaaccacaacagatccaacaatggatactctgtagctatttctggatttagccagctctgtatatggaaagatgcaatgaccaccattattaatcaaggtgcagtactgtgtatgtactaagctaataaaaaacccagaaacatacaaactaagtggttcctgagtgtagacgtgcacggacatccttggaatgacacacaagaaactagctaacactagctgcctctcgagaggaaaggtggggctagaaaatgaggcttccggtttagatctgttccctgtgcatttctgctgcatgtatgtattggccattaaacaacttttaaaaaggcccaattcaggtgcagatttctgagctcacttgaggctagccgtctggcccccaaagtcctggctggtcttccaagactaaaagaacacacacagggtccattcagttccaggcagccttggtaaccctggagggcctgcaggccagccttgatggcgctcgtggagctcattcttggggtggcttttaagggagttcccagcaggagtcaaaatctgcctcctggctaggagctctgccctgcatggccccacagggcaggtcgaccccactgtgagctgtggtcctgcgaccctgggtcttcccctctccccaagatatacctctagtcctccgttcttagaaagaatagcctcatttttccctctgtcattctctgcctgaaatagtttcaagcctgctccccacttttttttttttttttgagacggagtctcactgtgtcacccaggctgcagtgcagtggcgcaatctcagctcactgcaacctccacctcctcggtgcaagcaattctcctgccctagcctcccaagtagctgggactacaggcacctgaggcacctgccaccacaccaggctgatttttgtatttttagtagagacagagtttcactatgttggccaggctggtctcgaactcccaacctcagatgatccgcccgcctcagcctcccaaagttctgggattacatgcctggcctgaccccactcttatcttttagttcttttcaggaccaaacgccccaggtatggtctgaagagtgcagggcgggaccttcatctccctccagtggatgctactccctacctccccggactggtacaagtgggttttcaggccacggagaccttatgtgggctcctgtgaaatttctcccctgggttctgcccattgctccagtctcctgagaccttctgggattctgctcaacatcaaacatcttccccctctctctcagctttgttttacatccatggatgcaataagcatggcatttgtgttctgccaagtaaccaagacgaaagggacaacgagggacactacagaactgtcatactcagaactccccagttcaacatcaaacactaggcatcatgtgggtgcaggcatttaaccagctctcccccaactcactctgccaccacccagtacacatttctccacatgcccaagtgagggttctagcacatttactctgaagagagcctgtttatctgcctaattacccccaggagaaaagtaaacgcagcccaatagccaggggtgaccttcaggtggacacaggctcccagcgctgaccaatctccccccaagctatccatgttctaggaggctagaggctgcaggattagcacactgctctctgactcacagaagcagcattcttctcctccttttctttgaaaattaagaaatctgctcatggtccagtcttctggtaactgtgacctctgcattttttcaaaagaggctaccgcaaggggctgtccttggagaagtcgttcctggcaccccagggctgccatatctgggctcggcaagacttctaaggccctcgggtccccctccctagcctgtccagcacccactccccaggagagaggcaacacagtgagctataatccagaagatctgctctctctctctctctctctctctggcatccatgagaatcatacctttcaccctgaccaatgcctctctcctcctttccttgcatggggcaagagacatgcttcacactgctggtgcaattctgatggctggggcatgtcccccgctctacgcctgcttctaatcacggccctctgacatggggactcactggagagggcctcctgcacacagcaggcagctggcctccttaaggatgggtccaattcttagaaacctgtctctggggaccttctggcctctggtcctgcctctcagggcaggctgcagcacaaataccgcccttccttcctcactgcgaccatccacctgcagctgtgcacctgatttcatccagctggggccctctccagttaaatcggtgcttctggaaaacagtcccctatagggcttgttaaaacacagattgctgggccccacctccagagtctttgaatcagtgtctctggggcagggcccaaaaagttgcatttccagtggctcccaggtgatgctgatgctgcctgcctgcaggccacactgcttcatcatgcatgataatcacctggagagctcactaaacatgctagcgccctagcccccatattctgggccttctaacctgggataggcccaggaatctgaagtgtaaacaagcatacataccccccagtccccagtaattctgatgtaactggttctgtggtccacactctaggaaacactctttcccttaaggtattggacactctctagctcatctgatctcactctttgacatggtttggatttgtgtccctgcccaaattgtaatttctaattacaatacaatcgaattgtaattcccagcattggaggtggggccaggtgggagctgactggatcatgggggcagatttccccctttggtgctgttctcatgatagggttctggtgagatctggttgtttaaaagcgtgtagcgcctcctccccacacctctcttcctcctgctccagccaggttaagatctgcctgccacatgattgtaagtttcctgaggcctccccaagcagatgccagcatcatgctttccctcacttggagagctggctaaaaatgctggtaccttggctcccatattctgggcccttcaacctggcataggcccagcctgcagaactgtgagccaattaaacctcttttctttataaattacccagtttcagatatttctttatagtcgtgtgagaatggacgaatatactcttcttcacaatagtaagctctagggacacagactagacctaggcacccccacagttgtatgacagatgcacctgacagcaatcacttaagcatacccagaacgaccctatagtctaagaagaatgtgtgttcagagttctgagctgaggaactgtggccaacctggagatccattccttatctataaggaacatcagaacccctaagccattccatggccatacaggagatcaaggccctttgttctgcgttaaatgaaggttgccaggtggaggtggttaggaaggaggatgctaaattaaaatgctatacaaactgcatgctttttacaaatagtagtggtccttccatccagcctgctgccactggaccgccccatatgtaagtcccctcaataagccctatgccttgttcgttggctctgggtctcttcttcggcctctcaaacatggtgccatccctattaaagttgacaggagtctggcatgacagcactgcatcagaagccagcctcaaagcgtctggtgaatgccaaaagcatagagcagctatctgggggtgcttctcagtggctgcaaaatggcctgttccctaaagccatgttacgtgtacgtaagtgtaccattcaactccacaggctctaaaagggtactagctggagtcccctaacacaggaatctagaaatgctacactgggacaggaggcaactgccagagcaagaagagcctcactgccccgactcagtcatccccctaccaaaagggaagccttgctgtgtctctacccaacaattggaggtggagatatgggctccagccaccagcaaggctaggccatgcacatttgctggtgtcctgcctgacttcagggatacagaagggaaaggaggggtggatggtgtcagtgccatgcctgggactctggactgtcctccccagaaagacaacacagggctcatttgggaacagagcctacaccaggttaatgctgagaggcaagggcctagaaacatcatctcgggccagaagccacacagcagtgacaccccctgcccctcagggcctaacagcaaaccaagcagaccgggactacagtggatgctttcatggagtgattttccactggccttccccagtctggtggctggaatattgatttgtatattagttttttttttttttaacattagatccttaacctgtttttacacacacacacacaatttattttttaaaatactttccccataaggttgtatccataaaatttaaatatatcattgctattgtttaaatgtatcccccaaagttcatgtgctgcaaacttaatggtcaatacaacagttctgagaggcggtacttttaagaggctctaccctcacgaatggattaatgtgttatggaggaagtgggctccttaccaccagtgtgtttgttacaaaagtataacatgctctctcttacccgcatgatgtcttctgccatgttatgaagcagcaagaaggcccttgccagatgcagcctcacgatcttctcagcctccagaactgtgagccaaataagctactattgcttataaattactcagtctgtgatattttgttagagcagcacaaaattaactaagacaatagtttaaaccaggcaggtccaataatccctgctgatatattctttaaaatgacaagatgaggccaggcacagtggcccatgcctataatcccagcactttgggaggctgacgcaggcagatcatttgagctcagaagtttgacaccagcctgggcaacataatgagaccctgtcgttacaaaaataaaatacaaaaaaattagccgagcaccatggcatgcgactgtggtcccagctactctactcaggaggctgaggcaggagaatcatttgagcctgggaggtggaggttgcagtgagcccagatcacgccattgcactccagcctgggcgatggaagtgaaaccctgtctcaaaaaaataaaaaataaataaataaaataaaatgaaaggaaggaaaaacaagccatagaatgggagaaaataaatgcaaaagacatatctgataaagggactattatccaaaatatacaaagaactcttaaatctcaacaagaaaaccttacgatttaaaaaataggcaaaagacctgaacagacacttcaccaaagaggatataaggtggcaaataagcatatgaaaagacgctcaacatgtcattaataaattgcaaatgaaaacaataagatactactatacacctattagaatggccaaaatccaaaacactgataacaccaaatgctggtgaggatacagagcaacgggaactttcattcatcgctggtggggatgtaaagcggtataggcactttggaagacagtttggtggtttcttacaaaactaaacatagttttaccaatgatccagcaatcatgctcttggtatttacccaaataagttgaaaacttctgccgcacacaaaacctgctcatggacattcacagtagtgttattcataatggccaacaatttggaagcacccaaggttacacactgtataattctaactctacgatattctggagaaagcaactatggtgacagcaaaaagatgagtagttgccagaggtcaggggaggaaagaatgaataggtggatcgatgttgcttccctgattgtaacaatataccactgtggtgggagtgctaatggcggggggtgcaagtgtgggggcagggggacagggaaactctgtggtttccacttaattttgctgtaaatctataaccactctaaaaaataaattttatttaacaaataaaaggaatacaagcacactgtagggaaattcaaacagaatagaaacacacaaaatgaaaagcaagcattcttccctctatccttgtacacaaaggtcaccaccaagcagttttcaacgtacagtttaaaacacacagaaatgtataatacatgtatatatatttacataaatatataaatgtatatgcatatgtgtttatacatgctcagatatatgtacattttgttttggctttaagttctgggatacatgtgcagaacatgcaggtttgttacatagttatacatgtgccatggtggtttgctgcacctatcaacctgttacctaggttttgaaccccgcatgcattaggtatttgtcctaatgctctccctcccttggcctcccattccccatatatgtacataatttttttaaaagaggaaagaaactgacgcatctgcaaactctcttcactccgggagaaggctcggctctggttaagtaatgtctcaggtgataatgtgatataagaaatatatatctggcagtcttgtgggactgagccctttaacctatagggtctgcagtgactccagttagggtcagaattgagctgcattataggacacccagttagagtcagagaattggtcagtgtggggaaaaaaaacacacatctggtcgcagggtgaagtgttgagagttttgcttggagttttccttcttagttcacattccgacctggtgcccctcctggcatgggctggggaaatgaagacttacttagccctgagctgatgtgagtggctcacgacctccacacagtgccctgtgagtggctaggcactcgtcccaggtcactgggcaggagagagggaggcaccaggctagagcaaggtgcagacaagggcctggagcccagaactcaagatggaaggtctaagacgaggcagaaacgtctactacggtagtcctgttccaaggatctcagccagaaaaggatctcagccagcaacctgaggccaggcctcctctcccagacctcacttgacccatgggcaaaaccaggggcaaccctttttgaggtccttccttcctctgggatctcaggatttctgaagggggcctctttcagctttcaccccaaatcctagacttacagactcacaaaatgtccacattggaagggatcatgttctaacttcctcagctttgcagctaaaatacaccagggacatggcttgctcacatcacacgggtgtggcggagagggtccatggtagagcttggcctgcaggcagctgacgacaaaacctgacatcccctcacagtgctgcattgcaaaacgtgtgccacttctgtccaagctgagctggcttcactggtggtcccagtgggccctgcccttggcaacctacttgaagacccctcctccaagggcaaaaggagacagtgcaataagcatgctttaaacaagggtctgccaaggccactcctcacagccagaaggttccagaaaccctcagtgcatcagctcacagttcccccataactatgaagacgagggaaggcagatagagcccaagctctgccccacacaccccttcagtggcaggagctggccccaggggaccatgtacctaactgtggctgtggaattccatggagtgagccacaatcctaattaatccattaatcacagaggcggtgattaataatggtcgacttttttcacaaagttttgttatggagcacatatataaaacagaacagtttaataaaccatcatccctcagcttcaacaattatcacctcaaggcccatcttgattcatcccgaaccccacccacacccctgtattgttttgaagcaaatcccagacatcatatattatttcatctgtaactgttcatatctctaaatgttaggaactttaaatataaatacatacagatgctccttgacttatgatagggttacatccaaataaagccatcatgagttgaaaatgcatttaatgctggcaacacagcagtccccaacttatgatggttcgacttatgatttttcaactttatgatggtgcaagagtgacatgcactcaataaaaaccgtagcctcattgtaaccccatcaaaagtggaggagctggttacatcccttctgaaagtgatgtaaccccatcataaagttgaaaaactgtaagttcaaccatcttgagtcagggaccgtgtgtgtgtgtgagagagagacagagagtgtgtttatataactaatacgagagagagagacagacagacagacagtgtgtttatataactataatacagctgggactctaagttgagatcaggcttctacatcagcaaaagactcaggtgctgattcaccttaggaagagtatgagcttggaatgcttgagggggcacttgtcaatacaagagggccagaaaaccaacctccccaggactcttccaggaccactgagctctacctagtggtgatgctgccaaccatctgcaaatgttttccagagtcaaaaatgcagtcccacagccttgtttaccactgttaccccagcatctggctgaatgtgcacctcataaatgcagcttgagtggaagaatggatggagttctggggactggcctctgctttgccagttagtcaattttctcctttataacctcttccttcattggctcctgagattatttaagtatcaaataggatgtatttggcctgcagggcaaggaacagcataataaacacttataaatccaaggatctcagcaaggacatcacactcccacaatatgcattttggccttctgtagagcagaacccacctggtgcatgacagtcaactgatggacagcttgttcattttcactataagtctgtttgcttctgaacacctaccatctactgcccccagaagtcttgctcagatctaaccgggatgcccaggcctagctcagcctcacttagaagcagatagagtgatgggcagctcagtgctgcccggaatgtgttccctgacaccagcttcatatcttacaagttgtgaagttagaaggcacgcagtttaaggagcgagacaggcagacaagagcaagagattagttgcccgaaaagtttagaaaatgcttactacatatagttatgtactataactacacatcccctttccaggaaactgccaatttgcaacagcgtaataaaagctctgataaatcctgtaacaaaagtgcctgcttaactctatcctcaaatttcccaaactaattaggccataatagtagttaccatttattaaatgcttactatgtgccaggcactgttaagtgcttcacacggaactgaactttataacaaccctatgaggcaaatactaaaattatccttctcatatcagaaatgaagactgagggacagagaggctgtgtaacttgctcaaggttatagctattgaatggctgagccaggcagtctgcttccaaagcccagactttaccactacactatacttcctcacagagcccactggccccagggactagtattttaagaacagagctttagaaacactggtatgatgaaatagcatggaattcagaatcaggatacctggcttctaagtccggtttcactgtatgaaacttcattacatacttcattaaaggtacttcattaaagtacttcattaaaggcaatggaggatggtgagaagaacacagactctgaagccagactacccaggttcacatcctagtcctgctccccaccagcaacgcgatcttgacagtttacgagacctttctgcacctcagttttccccatctgtaaaatggggatattaacagtttaataccaagtttgttcccattatatcatgtaacatatcatgacatcctgtttctccaaaacaaaataagaaagagaggaccctgggctatttgataatgcccaggatgagaactgtggggactgaagggggaaggaggggggtaggagagaaacacggaactggggagggtcagggcagtgtgacaggtggaggatgggagtggggagcacactggcatggctgtgttggattttccagcctcccaatagagaaagcaccaacaggaaattggcgctgttttctttccatcccctccacgtgcctgggtgtatgggggcctgctccactccaagagtagaggggacagcgaaggcaagactgatggtggagggaggccaccgggcagggagatatgaaagaccctcggagagtaaacctgcctgggagagggacccgcagaggcagggcctcagcctgcatgaagctccaaccctgcgggcaccagagcctgtcctcagaattttcactgaggtgtggcatggatggggccatcttctctcctcctgcctgcctctccagaccaggtgctgagaagggggatgggggcaagtgaggaggaactcactttccatacaacgcagaccgagagcacacagcgtcacacgcagatctctccgtcacgctcctccatggcaggcttccctggaagccaggccactcctctttgtgggcagagtcacctctgaggcctgcccacaccaaacaggctcacataagagccaatgctcagtcaaatgctgagtccaattcagaatttctgaggagtggaaagtgggcagcagaggaagaaagtgacagagacacagtgctaatatctggctgcctcgcaggccagcacgtgatgggcactcaggtcctggaggacgctgaggttcttgcaacagacacagtggcagtgacagaaaaagccccccacccaagtcctgactccaaagtgtggccaggacctgctatagtttgaatacttctgtctccccaaaattcatttattgaaatcccaactcccagtgtgatgacatttggaggcggggcctctggaaggttatgaggttggagtcctcatgaatgggattcatggccttataaaagagatcccagagggcccaaccctttccaccatgtggggacacagggagaaggtgctatcctatttgtgaaccagaaagtgggccctcaccagacactgagtctgctggcaccttcatcttcaacttccagcctccagaactgtgagcaatgtacttctgttgtttataagccacccggtctatgatattttattacagcagcttgaacggatttagacggaacctaaggatgcacgcgcatgtgcgcgcgtgcacacacacacacacacacacacactctctctctctctcacacactcccaaaaagggaaacagtgggttgtgtttataagtgcaggtggcaggggcggggaggagacacaggtctctgtctttgtttacccacttccgcaaggggaagccaccgccagttacaccacctgagcagagggagcttctgccagggcccgcctaggagggaccagcaaaacaatggtagtgagctgatgtcaattgggcacaagtcccagggtggctgaggcttccctgtcaatcccacccctcttagctgtcaggtcactccagttactgcaaagtccaacccagcttctcccagatctcctgggcccacagggatgtgccacaccccaagtcctgtggtagttactatctacaagacaacccttgcagcagctctgccggaaggaagcagaaacttctctaaacccttccctcattttgcagtgggaggtaaagggaagctctgcagctccaagacactgggcctgagcctcactgacattggctttcacaatgtctacccctagattcttggcaggcttctaccacccccaattactctctctcacacactctaaaccagctcccccatcttttcacggcccacactcccccgtcaagggccccaaacatcacaggacagtcacaagggacttctcaattctgctgcatgagttttaccgcagcccacacagctctgatatcatcttctaacactgctgctaggccactgggatggtacacagggtttggagtccagtgacaatgattccattctagctctacctcttgttagctgtgtgaccctggatatatagattgaccactctgagcctttctcctcacctgtgaaaagaggaaaaatgcatccatctcattacacagctgtgagaatgtagtattctcacatatatatatatatatatatatatatatatagcactacaacaggtattagcacacagcaggtgctcagttaattttaacttagtccctaggaggcattagcctggagccaaggtctggttcctaacgcaactgcttgctgtgtgacccccctgggcaacttaacctctccgaacctccattctatctgcaaagacctgatgtaccccacctaccttggattactatgaggactaaaagtaaaaagaacaggaacgcgctttgtaaagcaggacacagttatcttcactctgtgaccaacacgcctagtggccaaagaagccaggctctgacatttcgagagggagaaaagggtcacagatcctgggcacacactaaactcaggtgtcaggctcccgccaggggaccagcccagcccacacagtgaggggagtgtccagccaacccttagggtcccggggcctcaggaaaatgctggtaaggggaggggtagagggagggcttttcagagcctgaaactcagctaccatcagcttctctgattaggtccctcaaagacatccccggtacctgtgaatgcgttactttaggtggcaaaagggactgtcctgaggtgattagggttacccgccatgaaatggggagactagcctagattatccgggtgggcccaatccagtgagaagcgtccttcaaagcagagagcctttgttgctgggttaaggatgaaaaggaagaataagaaggacagagtccaagcatgagagggattccacccatggaggaaaagggccaagtgccacggaactcaaatggcctctaaagctggaaagggcaaggaagcattcacctctagggccaccagacaaagacacaaccctgccaacaccttcattttagcaccatgagatccaaaagaccctgagataaaactgtaaagataaaaaaaccatgtggtaaaatagtgcagccactatggaaaacagtatggagattcctcaaaaaattaaacatagaactaccatacgatccagcaatctcactcctgggcatacaggccgagtacctctcattcaaaatgtgtgggatcagcaatgtttcagacattgtggtcttcagaccagatgacttcagattttggaatactggcatcatacttaccattgtgtatccaaaatccaaaaatccaaaatccaaaatgcttcaatgagcacttcctttgagcgtcatgttggagctcacaaagtttcggactttggaacatttcagatttgggatactcaacctatatacctaaaggaaatgaaagcagggactccaacagacatttgtatacccatgttcatagcagcctcattcacagtagtcaaaaggtggaaacaactcaagtgcccattgatggatgaatggataaacaaaacaagatctccacataaaaagagaatatcattcagcctcaaaacagaagaaaactgacatatgctacaatgtggataaatcttcaacacattatgctaaatgaaacaagccaggcacaaaagaacaaatacttctgattccacctatatgaagtctccaaaggagtcaaattcctaaggacagaaagtagactgctgttggccagggctcaggtaagagggaatggggagtttacatttcctgagtacagagtcagtttgggaagatgagaaccttctggagatgcatcgtaatgactgttgcacaacgaagtgaatgtatttaacaccactgaactgcacacctaacagtgggtaaaatggtaaattttacgttgtgtatatttttaccacaaaaagagttgcatggttttaagccacaagtttgtggtaatttgttacagcagtaattgaaaactaattattgaaaactatttgaggtgatggatatattaactagtttgctttatttcacattgtattcatagattataacatcactttgtactccataaatttacataattataaatgttaatttacaataaatttttttttttttttttttgagacggagtctcgctcttttgcccaggccggactgcagtagccctatcttggctcactgcaagctccacctcctgagttcatgccgttctcccgcctcagcctcctgagtagctgggatcacaggcgcccgccaccgcgcccagctagttttttgtatttttagtagagacagggtttcaccatgtcagccaagatggtctcgatctcctgacctcgtgatccgcctgccttggcctcccaaagtgctggggttacaggcgtgagccaccacgcctggccaaaaaatttttaaagaaaactattggccaggcacggtggctcacgcctgtaaccccagcactttggaaggccaaggtgggcggactgcatgaggccaggagtttgagaccagcctgggcaacatagtgagaccctgtctctactaaaaatacaaaaattggccaggcacagagactcatgcctataatccaagcactctgggaggctgaggcaggcggatcacctgaggtcaggagcttgagaccagcctggccaacatggcaaaaccccatctctactaaaaatacaaaattagctgggtgtggtggcatgcacctgcaatcccagctactcgagaggctgaggcaggagaattacttgaacccgggaggtggaggctgcagtgagccgagatcatgccattgcactccagcctgggcaaaaagagcaaacctctgtctcaaaataaaataaaattaaaattcaaaaattagccaggcatggtggcacgtgcctgtagtcccagctactcaggaattgcttaaacccaggagctacaggttgcagtgagccgagattgtgctactgcactccggcctgggtgacagagtgagactctgtctcaaaaaacaaaaacaaacaacaacaaaaaaaactttaaagaaaactaatatatacagtgaccattccttctctttccttccagatccttctatggcattctctttccaaaggcctctgttctctttgcataagagctctgtgaacatgtctacctaactcagccagctttcttcaacaagggaaatattaaaccaccaagactacaaaaaaaaccctttccaacggcacaaggaggaaccaggtgctcgcctctcccatgtgtcgggaacaggctcggcacaggtgtgctaacttgaattaccaatcaacatgagtcaccaggggacttgggccctcagtggcttccgtgtggccaggctacgcatgcccagtcagcatttgcccagtcggatttgcacaggcagggccatcacaccccatcagccaggacctcacaaccggatgccagaggccagctcagcacctcagagacgactcagttcactcccaccgaccccacctcaccccatttcacaaatggtcacactgacaaccagagagagggttgtggcatgccaaggtgatacagcaagaccctaagagggctggtgctgaatcccccactcccaggctagagctcatcgtccccagggcagggtgggtagagaggcttcctgtcctcagagctgctggcggactcaggcccagttctctaggatgattctttttgttccatcacgggggcagcccatgggagttcaagcctgggttgctgcttcctgcccgaggcaacagcaggtacagtgggaagaccagcgctgaggagagattaattttgcaatattggggaataactgccttccaggaaacacaccgaagggggaagagatgtgataaaatcctgcccctcctgtacatttcacctatgcactctaatcagatttttatggtctccctcttcatatagacagcaaagggtcacaggacatctgagaaagtctacaccaagaaagggagagaccaaaacagaagaaaaggaaccaaagaaacagacaacgatgagaagtagaggacaaaaatataatcaataatatcctcagagatagaagagaaccaaagaaacagacaatgatgagaaatagaggacaaaaatataatcaataatatccttagagacggaagagaaaatgttatatccacaaagcaaaaagatcagcaaagcaatcattgtgaaatttgagaagagaagaggcagaagatactaaaactttagaaaagaaagaacaagggtccttttcaggggaactggaaggacactggacttcaacagccacactagaaactagaagataacagaataatgtgttcagtgttcagaaaggaaattattttcagcttataattctatagccagctaaattatccactactggatagagatatttggaatggatatttctatccattagggaggaatagagatatttgcaggcacacaagcttcaaaaacaaaaaacaaaacaaaatctacctcccatgcacttttcttaggaacttctggatgatttcagcaaaatgagacataaataaggaaaataaagaaaataaaatatataggatctaggaataggagaatctaacacagaagactgtaaaaagaagtcccgggacaacagctgagcagcaggcctgcggagcaaccagaccagtttggaacaatagatacacagaaaatcaggcccccaaggagggaaagcatccacctgaggaatattgggacaggaaggattgtactcctaatgtgtgaccacggcacattacttgcacagcatcgaacaatacaatttatggtcacaataatgcatacattaaatattgatgtatgtattggttcctaatctaccaagcaggaagtcaacatatttcaaaactgataaattaagaaacagtcatataagcctattaattaaaaatagttaaaaatgattaactctggagaaagggaaagaggaaggatgtgtcaggggactgctggcttcattataagccttttggatcaacatatttggcttttttcgtgtattattataaaatatttttacaatatagcaataaatacaacatatatatgaattataaagcacaataaaataagcatcctttatcatctaactttagaaagagaacattacttctgccaggcgcaatggctcacatctgtaatcccagcactttgggaggctgaggcaggcagatcacttgaggccaggagttcgagaccagcctggcaaacatgtcaaaaccccgtctctactaaaaatacagaaagtagtctggcgtggtggcgcatgcctatactcccacctactcgggaggctggggctgcagtgagccaagatcgtgccactgcactccagcttgggcaacagagggagactctgtctcaaaaaaaaaaaaaaaaagacagaatattactacattcttcttcttttttatttttttgaagaagtctcttgctctgtcacccaggctggaatgcagtggtgcaatctcgactcactgcagcctcagcctcccaagtagctgggattataggcatgcgccaccacgcccagctaatttctgtatttttagtagagacagggtttcgccatgttgaccagcctggtgaactatattcttcaactgctttctgaaaaaacaggcatatattttttaggggaaagttaaaataaaacactagcagccagtctgtgagactggtaccaacatctgcagtaggtccaggttttgtggggcctgaagcttatacaattttaggaaccctcttcaggacaaagaatacaaaaaatcttagttttttgcaaatgttataaaccatatgactctgtgaactcactgctagtgcccctcccacggcccctcactagggtgctacaagtccggggacctgaagcttccacttcattagcttcacagcaatcccacctgggtttatggaggcaccaggggctgggctacaccccctaggatagggaagaaaaaaataaagtcctggcctgcatcatgctttccctctagctagcgagataaacacaatagcgcacttccagggaaacacacactacaatatttaagagccactcctaggaagagtcggggggggaagacaaagaattcagaaaatgtgttccctggcagtggagcataggggcgtctgagaaactggcttctctctgaggggccttggcaaatctaagccctcccagcctcgtctacctcacctattttcaatgagtgcgcctgcagggcctcagtggtttgcatgctgcctcccagaacctggggctcctgaaggttttggagctcaatagcattatttcattggagggaggaaagggctgcaaaagggagactctggcttaaatccttcaaaaatattaaaacaggagctctggcaacaagggccccatatttctgcatggtgacactcggctagggctggcaacagctgcgcacctccctccctccttcagctgccgggctgtccttgcaggaatctgcatttgtgatcacaggagtagaggtttaccagggcccttccagttggtgtgttatgagccatctcatctccttatgaatggccggcacagacccgtctctcaccacaggctgaggaagagaggcgaagaagactgaagagtgtgatggcagcagtgtgtcccccagcctctcccggaaaggccctgatgcccatcagccagtcctcggggcctgttcaaaccactctggaagcccagccccttcaagcctgggagacttaacagagtgtatattccagctccaaatggctgagcacccctgctctacctagaagcctcaggaaacctttccaaatatcccttatcaaggtctgctcttcagatggtgacaatgtccccagtcagccgcatgcaactggaagttcaaggacctgcagctcactctggaggagaaaacaccttcacttgggaatgggctgacccttctgcagctggcatcctaagctgtgtcaagcagtctggagccaagagtcactcacactgggccactgaggaacagcatgaaaacagaaggtacctcagggacatgcatgatggagagaagcacaaaaaatgcatgtccttagcccagcccagctcagcactttcccttttcaggacacctctgcttaggtggtccctctagctggtctgacctcctgtctcctggccttccctgagtccagatgaagttccaccttgtattagtccattttcacactgctgataaagacataaccaagactgggcaatttacaaaagaaagaggtttaatggactcacagttccacgtggctggggaggcctcacaatcatggctgaaggtgaaaggcacgtctcacatggcagcagacaagagaagagagtttgtgcagggaaatttccctttataaaagcatcagatcttgtgagacttattcactatcacgagaatagcacaggaaagacctgccccattcagttacctcccaccaagtctcttctacaacacgagggaattcgagatttgggtggggacacagccaaaccataccatatctctttcaggaagcccaccctgatctcctatccacaatgctcactcttcttggaactctcacagcacttgtcctaaaatgttttccatgttctctaatgttctaataagctctcctttttctaactcctaggatagatacatatattacatccctatatattacctcattaacctccacaatgctcctattggataggtattatcatcctcattttataagcaagggaacgaaggctgagctgactcttgacatgcaaaggtcacacacccaagtgccagagccagacactttttttctaggcctccccatgagagcatcagtgctacaggctgtaggacaggcctctcttcctgtcccccaccaccacctgccacagggctggcactgtgaggcccttgacacatactgaatactggcaggaaccccggtggactctgactcatttctttcactctctgggtggcacctgtttcggtagcctctattacgtaggccccaggaattctgggggcagggaggacacatctaggacattcccctctctcccccacctcaaggcaggaccttaagtgatgtgagtgggagtatgaacatctccagctctactgagaagggggtgggggccctgggcgtgcactccagagccccaatgtcctgcccttgctggtcacaggtgccattaagtcaccgaagccagccagccagcctcagggcagcactccaccaaccctgaccatattttcccaggcactaaacaaaaagcctacacaggtgctgttaagcattcaactccccacccacatgccaggaactaaaatagctgtagcgtatgttaatcattagccaggctgcacctcagacctcccctctgagggctggcacctggggcagctcagcctggagaaactccagacaaggcaggctgggagagtggcagcgtccggagcctcaccaaggggctgaacttgagcaagcaggttctgaaagacacttcttcaagataaagtcaattcccagtgcactagcatttggattacataagaatcctaaaatactggagctggaaagggccttcatgaaatcatttcattcaacctgtttattttatttgaggtgggagctgagacccagagagcagaaagactctgcctgaggtctcagagctggctgggggcaggacaatgactagaaccacatctctggatttccaggccagtgcattatgaaccaggctggtccccaaccactcaacgtatttctgggctccatcacaccttctcaggctggagaatggacttgagaaatacaaaggttaaaccccggaaagagaagaaagttactactgcctcccaaataatgtcccatataatcaagccactcagaaaagtaccagccactccataggagccttatgaccctgtttctctccagatcccctccctatgtgtgatgacaacagagaatgggggttggcaaccactgctctgatctctcaaggatattaccagccacggagaccgaacatcacccccacctcagttcagggttcaaatagcctctgccctcaaactctcctagaaacagtcacctaggtgtcatatttggggttgaagaagggaagttgggaggaggtagcacaaaaaaataacccctggccgggcgcggtggctcacacctgtaatcccagcattttgggaggccgaggcgggaggatcacgaggtcaggagatcgagaccatcctggctaacatggtgaaaccccgtctctactaaaaatacaaaaaaaattagcaaagcgcagtggcgggcgcctgtagtcccagctacttgtgagtctgaggcaggagaatggcgtgaacccaggaggcagagcttgcagtgagccgagatcatgccactgcactccagcctgggcgacagagtgagactccgtctcaaaaaaaaaaaaataacccctatcccactgggtcttggagggggcccctcgatcccatggggtctggaagatctggtggtggctgcagcaatggagtatgcggatgccagacctgacggctgggagcagcagatgactctcggggcatcagcaaagccacagcagcttgccagcttgtgcaccagcccacaggaacagaagctgccttgcttgcactgcctgcgggcttgccactgtcatgagaaaccattcccacttcctaacctgaggaacacaggcttagccaacagcaagactgataagcatagtagtagtttcaaattcaggagagcagtgggtggtgttccagaaacttctgattgtcctcctcaaccatctgttctctcttgctttagtaacagaacacaccatagcctggcacacagcagcccccactaaggactgctttccagacccctagcagctaggagggcctgccatggggatgtgaaagtgagctgtcttgggccatgcagttaagggaggcacctagacggtgctacccaacatgtggcccggcggcattatacaatatgggagcctgtaagcaattaacgtgctcaggtcccatcacagacctcctaaattagaatgattcagggtgcagtccaagaatctatgctttaacaagccttccagattgttcttatacatgctcaagtttgaaaaccacagcccttgagaatgctagggacaacagtccataaggagcctggtgccaagacaatctcatggaacacacacttaacctcgaccctgatttttcaagaaagagtgagagagtgagtgagagagagagagagagagagacggggctcctctcttcattcacaaccaaacctgaaacgtaatacaggtggcgtggggaagatgacgatgagaaacttaacccaacagcaaaaatcaggaaaggaatgcatgcaagtataataagtaataagcaagatgcaaagaataaaatcaagtatatctggtatgtcaacagtcagaattcctctaccaaagacagaaaccatgcaattaggtttgttgctgttatcattgccttctgtcaacctccatccaccctcaaccacgttctgattataagagaaacaaattttatttacgaagattccatcttcaagataaactttttttttttttttttttgagaccaagtcttgatctgtcgtccaggctggagtgcagtggcacgatctcggctccactgcaagctccgcctcccgggttcatgccattctcctgcctcagcctcccgagtagctgggactataggcgcccgctaccacgcctggataattttttatatttttagtagaggcgggatttcaccgtgttagccaggatggtctctatctcctgacctcgtgatctgcccgcctcggcctcctaaagtgctgggattacaggcgtgagctaccgcgcccagccaagataaacttttttaagtgagaaagaaatatttaaaactaagggttgggcaaagacataccaaataaatgcaaagaaaaacagaggtggaaatattaatagtaaaaataggctgggcacagtggttggctgggtgcagtggctcatgtccgtaatcccagcactttgggaagctgaggtgggcagattacttgagcccaggagtttgagaccagcctgggcaacatggcaaaaccccatctctaccaaaaatacaaaaattagtctggtctcaaaataaataaaaatgaaaaaatatgtaaaatttaaaaacatatatgttgaagacttttcgataatcctgccttagcaagccaaggggtttttccagccatttctctctggcatttgcctttatctgtaaacacagtacttggagaactactcactaggatctcagggtacaacaaggcatagcctagtccagcccgctgagacagtttatgtggcttaaaacacaagcacagagatgagcttatgacttggggcccgcgtctttctgacttctggccctgagaagtgtttgtactggctactctgtcaaaaactcatcttgctgtctggaatgaggaaggaaatgcgtaaatgagaggcagagcagtccgcttcttggacctacaggaaggggcaggaattgcaaagtgagagaagaggttcccaggcaacgtcccaggagtttgcacgcaaatctcattttatccacccctcctaaaaatctggctatcatgggaaccattaggacagccaaggacagggagctcatggtcatcagtgagacctgattactaaccgctccatgtgagcctgaacagaagctaaaggggcatggcttgaatgtcctctgatgcctgcatttaaatttctgagcctttcacttattatcttataaaatgcacttatttattaattttaagactgtaaagaaaagagattctcccagatccttggccatgtattctcctaaaacacagacaatatggaatttaagaccaaagaccaaaggcattaaataaccagcaaatgacaggtaggaagatcagcttgataagcctatatacatgaaacacgaaagccaaactcaaaaggctagaactcccacaaatataagtagagctggactttaaaaaactacagtgagagtttttgttatacctctcagaatctgacagccaggcaagcagggatataagggtaactgaagttaagagatctatctaaagtcagcgtcccgcagaggacctattttctcctttcacgcccatgaaacatgttaatatttatcatgcagttggccacaaagaaaatttaataccagccaggtgcagtggttcactcctgtaatcccagcactttgggaggctgaggcggggcggggggattgcttgaggccagggctttgagaccaacctgggcaacatgcttcattcactcattcattcattcatgagaatgaatccactttgtgaaagaagcaaacccttgcaggtacctaggtctgcctgagcacggagcgccgtggggagggatgtcagtggcaggccatccacatgttcccttctgggattggaaagggagcaggagggtaaatcgaggcaacagaatcaaacactccctcaacgacgtcctcttcgccttcaaagccaacatttcagagcctgtctatcatcagatcctcacgtcctgctactcctcacccattcactccaacctcgcttctgctcacatcatcccaccaaagcagtgaaggcagccacatctcctccatatcactcaccacagccgcgatgccaagctgaccactccatcccacgaagcagactcaccctggcccctgggatacaactctgtcctggctttctgggcccctctcaggtcgctctttttctgggtcctttataggctcatcttcctttactcagctgttcgaggtgagttcttcaatctcgctgtgcccatgacttcaaatacaaacacaacctagacaaatgtctgtctagccaagacgcctcctgagccccagacccaccagcttatttggtatctcaaagacacctcaaacacaacatgtccaaaaccaaatacatgatcttcttcatcctccaaacctggtcctcatccagtgtcccatgtctcagggacaccaggtggatgactctagggtgagtgggggcggtctctccttttaagcacaccacgcagggcgaggccaacagtgggttctcagtaataagcagttctacaggaacatgccttgtcacctacttcctaaaaatagccgtgacctttttagtggacacagcaagctcacatctgttatcaccactccttccccactgtcacacgcaccctttcccccagtggtgccactccccaggctggatatgccatatgctccctagcctccctgtgagcagcctccacatttctcttctctgccctcactcagatttcccccatctcatgtcctccaagtcagccatccccaagtgtgaggggcaggggacacctgacttccttctcaatttcctttccttcttttctgctaaggcggagcctaagcccctggaaagctagagatcccagaaccaggctttgaccaccgcacactccaccctctgcttcacagctcctggcagtcacacacccacggtatcaacattgtcatcaccacccgctaactgatctcaaacccctttgcaaacatcttctcatctgattctccattccaggcaggcattttatcatccagaactgttctgtgggggggaagcggggggtctctgtgtggctgggtggcttgtcctaggatacctagcacagagaactctgtcccccaatttcttagttgcccccacccattccttcctcacatcagcatgggcaaggccagctgtggtttgggtcactgttcaggctgtacttttaggatcctcccaaatagcaaacaactatgtgactatcaggtctttatttcatgggttataggagatagggtcagtaagcctaatgtgtaacagtttcagtggttattacagagttccattgaattgcaacaactccctttaaaagcacaaactcccaccaagaaaatctcagtttcttcattaatcctaagagctttcctatctaggtatcactcaaaattcctactattctgggggcaatgggatcagagggtgttgcagagaaaaatccagagaaagtgaaaagtctacttccttggcagtgctggtgaagcatacccttacacagacgcttccccatgggaacaagtgccaggaactgcttcaggcttacgggggaaaacagtggctaagaagagagaggaggccgggcacggtgactcatgcctgtaatcccagcactttgggagactgaggcaggcagatcacctgaggtcaggagttcaagaccagcctggccaacatggtgaagccccgtctctactaaaaatacaaaaattagccgggcatggtggtgcatgcctgtaatcccagctactcgggaggccaagggaggagaatcatttaaacccagggagcggaggttgcagtgagccaagattgcatcactgcactccagcctgggtgacagggcgaaatctgtctcaaaaaaaaaaaaaaaaaaaaagacagcagaagaagaggggtgaatccaggaggaaggagggggtgcaccagaaaggtcccaggacctctgatgttccagcattcagcatgcattttggttccacattcagctcctgcccacaccagtttcttttctctattctacaatttccaagaagaacccacactaacctattctgtctcaactcccactcctgtcatcccaagccacacatcacctccccaatcacgtgaactaggcatcactaatcgatcctggccttctagacacatccacccagggtgggccctttctatagtatcatgcataaaggcgtcaggtgaggcttccactcccacctcttagtcccaattcatctccatctcaccctccccacgtttctctatccaaacccagccttcaaggtcctatattttaaccacagggaaaccacttccctgtgctgtctctgttgttcaactaacgacaactaattttctgagcacctacattaggcaaggcccatcctgagtgctgccaccaagaggtaagtcagaaacagcccccaccctccagagtcagaggacagggcagcgataagccacaccgccacacaaatactatgcaaggcgagagatgagaaccgagtcagtgccagaagggctgagtgagctcagagcatatcccgtccctcctgctgggagcaggcacccggatggctcccaggagggtggagaatgctaggccagacaggggagggagggcattccagtaagacagagagcatgagcttagcatgagctaagccagaaagacggttcaggagaagtgcatttcaactttagctgaaccttccactgctactatttattgacccttacacctgattatttatgacccaggcctgcctcacacactttatggctaatgtgggtgacacccatctgggatacacaagtgtggtgcagcagtcaccacctgttctgactggtccgtacctgagctctgtattgttattaaataaatgaatgcactgaatctcacaagcctgtgaggcagggattactattacccccattttacagatgaaaaaccaaagcacagacaatagtcaaagaaaagatagcaaggtatgcaggagcctgaagtagtgggcacccaatgccagggcaacaaactgccctggcacctcacctggcctctcttatcagggaacaccttgcagcacaaagaatgccttgaggaaaggggccctgttaatcccctggaatccccaacaattgactgccgcataaaaggaatgaggaaagcaatgagagccagtgaagggtgagcataccaggccctgccctgcaaacctagtccctgttgcgtgggcagggcagggcagggcagggcaggggctcggcctcacagctccactccatgcccagcgcagagaacagaggggagagctaccacaaacgccgaatctctacagagaggtcaaggattggagggcagagacagaaatgccccgggctgactgtttccagcttgggctagcactggctggcttaacttttcccctccaaagtctctaggtaacaaacttcgcgtgtctcctttaaaccaacagaccattttacctaagtcttaagggcctggcctgcacccatgggagatacaagtccaggaatcccttcctgaaactggggatcaaggttggggaaggggcgaaggcacgcacagcacctgggatggctcccgcattccctcaaacactggggagagttccttacaaataaactgcaatggtagcagctcccaggaatgtgcgtgctcccagtttcggaggaaagttcctgaagatagccttctctgcttaatctccccaagcctcgcctagaagggcgcgcgcaccctggagggctccgcagggctgcggggccgggcctccggcacccctcccgccacccgttgcctcctgcgcccagggtcacggcccctggccctacccaggcccagactgagaccccgacccctgagcccggggggacggcgagtgcaccccgaccacacatgagggagcagccccagacgccgaggctgatctagggggctgccaggccgacacggcccgcccgcgacccgccgacgccctcccctgccccccacccccacgcctgtagtgcaaccaggaagccgcagggccgcgctgggctgggcgccaggcagccccgggcctcacccgcggcgccgcggtgcactgccgccgcctggtcccaggcccccagccggctcgggaccctcactcacctggccacggggactccggacgcgaggggcgaaatgggacgtgggcgggagtggctctctccgcgggcgtcccgggcgcggcgcctgggttctgcctaggggctgggtcccactcccgctcgcggggcccgcggggcactcggggcactggggagccgcgggcgcagcagccgtcagcgccgggcggaaaactccgcgggcgcggctgccccaggtgccagaggcagtgcaagggaggggcggggcctgagcgcggccccgcccccaagatgaggactgggcacggcgggcccgcgaggagcagcagccttccggctgcggagctgctccaggaagtctcgggctccggaggtccctctgccgcccctaacccctgcggcgcccagtgccgcgcagagccgcattcgccctcctgcaggggtgggcatttcctaagtcctctccagccccgtgtgcgtcggttagtgactctctttaaggtcgagaaaactttttacactgaaaaggtcaaacgcatttcctttatagcaacactcggtggtggtggaggggggaaggtcacgcacagtatgtgaggaagggagcggtcagtgactatcgtggagaaacctgacaaaccacccagccgtcaaggtgacctcgacaggggtaaatcatactgattgcatgcaccgcttgtggtcttcctcccaagaacacctaaccccactgtaatcatgaggaaaacatcacaaatcaattgaggcccttgccatatacatgaccagtactcctgaaaactagcaaggtcatcaaaaacaaggaaagtctaggacactgtcacagccaagaggaacccacggagatataaaaatgacttaagatgttaataataggaaaagcccgggtttatgagaattccctgtattcacactttttctgtaaatctaaagatgttctaaaaataaagcatatttttaaaaggtcacccaggtaatatatgcatatatggtaggtatacaatttttttttttaatgagtggtggctgacgcctgtaatctcagcactttggaaggccaagacaggaggatggcttgaagacagggcttccagactagcctgggcaacatagtgagacccagtctctaaaaaactaaaaataaaaaattcaaaaaatgagtaaaaattgagattcactcttccctccactcccccagcccactcttaggtgtgtccttccaaatatctctctttaacactgtgtgtgtgtgtttacataaacgtattgtttacaaaacgatattgcagtacttttctgcaacatgtttttttactcactatatcttggagggtctttccatacaagtgctcctgaacagacctggttcttcccatccactgcacactgcgcgccatcgtgcgcttcaccattcttcattacctagctccttactgaaggacatttaggttgttgcctatgtttggctgttacaaacaagctgctggttcgattttcctttttttttttttttttctgagacggagtctcgatctgtcgcccaggctggagtgcagtggcgcgatctcggctcactgcaacttccgcctcccgggttcaagcgattctcctgcctcggcctcctgagttgctggatctacagatgcccaccaccacgcccggctaattttcatttttagtagagacggggtttcactatgttggccaagctgttctcgaactcctaggctcaaatgatccgcccgcctcggcctcccaaagtgctgggattacaggcgtgagccaccgcgcccggcccgatttgcgttttaaagtcgctctgaacaataaaatccggaaggactggaggggaggctccgaccttctccctgtctgggcaggtgtgctggtgccgggcaggaacggtgccttgggacagcctggccccggcctcacaacgggccccgggcgctcagtcatattccgtggccgctccaacaccccctacccccaccagcaggcgcggctctctttcggggctggactgcattttttggacatgagtcggcgagtgagggtgaaactcaggccaaagtctccagagccgctcggagaaaacgctgcctggaacagaagagcagaggatcagaggcaccaccagagactctcagagtgggttattaccctggtgggggcgcctgctgcggcgtaggagatggcgggactgggggcgcgggtgtgaagcccccaagaaatctgtgtgaatttcctggggaggtaaggtctccaggcgctctctctgggcccggggattggtccgggaaggtctcctggcgcctacccagcccccactgcctggacgcctgcgcctgctctgccgccccacagcgaccgcgaaggccagcttcttcgaaaggcccatttttctccgtggctgagcgaatgctcctagaataccacgtttataataaatcatgtagggtggaattcctgctggatgtatacacctttctgcatcagagctcttcaaacccagaatggtgaatagctacccctgggcttacccttttataattttcaacaaacctgcgtttagccccggctaggtgccagcaagttgctagggactgaggaggctctgcagaggacccgagctgaggccctaatcctcaaggccaatggcaggggtcaccgcccaggcacccccagagaacgcggtgtgaaggaaaagacaccaaactcggtgttcaaatgtgtgggatctattctagttctgattctgacacttgcaagtcatgcatcctccgagcctcggctttctcacctataaaatcttcaacgtgacctataaaaatccataaaatcacccctgcttcattgtttcccagggctcatagaaacatcatacaaggtaagggaaggtgagtgcactgtaaaaaatggtgacgtgctatatagctctgagtagtatggtatataagcttcctttttaaaaattttaattttagggccagtgttgggattacgggtgtgagttaccgcacccggcctcttttgttgttttctaataagtatatatgactatcatttccctcaaaagtctgctttagctgaatatcacaagttttaatatgctatgcttttgttatcacttagttatacatatttggattttgttgttgttgttgttacagagtctcgctctgtcgtccaggctggactgcagtggcaagatctcagctcactgcaacctccacttcccgggttcaagagattttcctgcctcaacctcctgagtagctgggattacaggtgcacgccaccacacccggctaattttttaatttttagtagagatggggttttaccattttggccaggctggtctccaactcctgacctcaagtgatccaccggcctcagcctcccaaagtgtcgggattacaggcgtcagccactgtgcctggccaatattttgttttttatgttaggattgtatgcttaattcatggattatttagacgtatattttccattctttttttgttttcaaacttcagttttttaaaaaataataataatcatttggggaggggcccagtggctcaggcatgtaatcccagcactctgggaggccaaggtgggaagatcgcttgagatcaggagtttaagaccagcctgggcaacacagtgagagcccctctacaaaaaaaaatttaaataaaaataaatcaatcattttgtcattgatctctaactttaatgcttggagatgaggaaatgtgttcttttagaatttgttaatgcctcctttgtggcctcatatacagactttttttggctgtcccaatttttgtgaacgtctcttcactttttatgtggtttttttttctctatatctctccatctagcttgctaatcaggttatttagatcttttatctcctgggttttttttttttttctctcctgttcaatccattgatttctgaaagagtaggtttaacatttcccacttttattgtagtttgtcaatttctccctctaatttagtctgattttgctttatactattttttttggttttttgatttttgtttaagaggcagtgtctcaccatgtttcccaggctggagtacagtagctattcacaggtgtgattataactgcagcctcaaactcctgacctcaagccatcctcctgcctcagcctcctaggtggctggcattacagccatgtaccacctcacccggccagccttataattttgagagcaaattattaggcttatacaaattaatattgttttatccttttatgacttattcagttttattactttttgtataaatattgttatcctgagatagcatttgtctagtatatgttttatttctccttttttactctttctgtattgttacttaggtttatctcttggaaatgacatattgttttttacaagatttaaaaagttcatctgagtttctatttctaatttgtgagtttaaccagttcacattgataagaataacagaaatatttgggtttatttctgccatcatttgtgttatacatatacccttgaaat

SEQ ID NO: 35 - DNA, 127340 bp, Homo sapiens
gcttttttaacagacatggtttcaccagcgtttaatgtgctctgatgttgaccgtccctctgagtgttctggggaggagggggtggggcggagggtcaggaaagcaggctcagcttccagggtcagggagttgtgggcccagaggggctgtcacagtggatgcaccctgccctctccctcgccagacccgagggtagggcagaggcacctcctcgccagcctgtgggctgcacccacagggaatggaggggaggggcaccattaccactggacccaccaagaccccgccgcctgggcgggctgtccacaggcccttccgcccagcagcagtgacgctcagggccttcccagctgtcagccactgcccgttcctgcgcctctcgtgcacctccacatctggtttgaggtcaggtcatttcctgtctgtgggcccagctgctgtgacacccaaggggagggccggcgtccccgaagccaggtcagccgtgcacccggcagagccccgcagattggctccagcagagcttggggtggggggagctcggtgtcaccaacaggcccttgaggacactcgtgtggagaatccctgggacacgtggaggacccccaagtcctgagccccgtactccgtactgcagggagcaggccaggagccacgggccttggggcacagggtccttctcagggacaggttcaggcactggctggaacaggctggacccctctacccagcacatgtgggcatgcgtctgggttccgagggtggggaaatgtggaaaggctcctgctggccggcttaggcctgctgcccttggagccttccatatacagagagtcccacctccagcaagggttggcctggactctccaaccccctgctgtgcccaggactcccccagggacaaggcaaccagaggcccagacccctccccagcaaagagaagcaccacgggagctgtctcccaagagcccttgacctggggcccagctggcctagggccgggccccggggctgttgtagagcagagtgtccatctgtgcacgctgtagccacaagcgccgctgggcgtcgccaagcagcacacgcagcgagtggcctggacggcaggcgggcagggctgcacagtgggcagcatgcagctggcgacaggtgtcgcagcagagggtgggcagggcgccaggggacaggcagctgtgtgcctggtagcctgggggctccgagacagacctataggctgaggctggtaccccctctgcccgaatacgcctcgggctggccgctgcagagctttcaggggtggccaggtccccaggcctactcagctcacggcgcagagagaggaaggagaaggcggaaggttcaggttccagcccctcctccaaggccccatatggtgggctgctggcctgcggcagctcctcagctgggggctcccaggcccggcccccagtgccccacagtttggcactctgctcccagagtggtggcctgtaggccagctccgccgggggcgagtcagggcctggtgacggctccccatacaggctggcgtcctccgacccctcgtcttcctgcaagtcccggtataagtccagtggggccctgtaagcagcaggggagcctcgggggggcaggggtggcggctcctcatcctgggccagccgctgctgcagccaggccacacaggaggccacgtccccgctggcacgccgtgcctgcagcagctcctcagctggcagcacactggtgcccagctgggccagcacctcacccaggatctcacactccagccggagggcgaagcagcccagggccacctgcaccagctggcaggcggggggcagggcggtcaccatgagccgatggctgtctctgcgtacgtagcccatcttctggaagctcttcaggaggaggtcgtctgagagcacacccttcagcacgtgcacgtagcccccagagaaggtctgcaagggagcggccaggtcagtgactgcccaccctcccataggccagaccctagggtacagtgggtccgggatctgttggctcaggccttggcagcttctgatgctcagacccaaccccagagactaggcttagccagcttgggccaggcccaaacatgatgatttctttttttttttttttttttttttttttttgagacagagtcttgctctgtcatccaggctggagtgcagtggctccatctcagctcactgcagcctctgcgtcccaggttcaagcaagttcccctgcctcagcctcccgggtagctgggactacaggcgcccaccaccacacccggctaattttcatatttttagtagagacagggtttcaccatgttggccatgctggtctcaaactcctgacctcaagtgatccgcctgccttgagctcccaaagtgctgggattacaagcgtgagccactgtgcccggcctagaatttttttttttttttcttttttgagacagagtctcgctctgtctggagtacagtggcacgatctcggctcactacaacctcctcctcccgggttcaagcgatcttcctgcctcagcctcctgagtagctgggattacaggtgcgcaccaccacgccccactaatttttgtatatttagtagagacggggtttcaccatgttgaccaggaaggtcttgatcccttgacctcatgatccacccaccttggcctcccgaagtgctgggattacaggtgtgagccaccgcacctggccgaatttcttaaatttaatggaaaaaacaatgaatacattaacctagctcacaaatcagaacaaaatgaagagcccctgtactgagaaattccactgtcttctgtcccaccgctcccttcacccctggagatggcctcatctaattagttttgaatgtacttgcccaggtgtttgttttgcaaacccaaatacagatttcgtttgctcctcgtatgaggtagtccccccttttttttcacctctttgtaaggtctctaaccaaagctagacaggtagcctcttaaacgtgttgttctgaactttgtttttttccactacagtcttgcagacaaggacagaagctgtaacgttcattccccctgctgtgtagtattccaccatgggggtgacacgtctgttttcagcgctctccagaggctgtccatgcactgggctgacagccgtgggacggtagaagggtgagtgctcttttttttttttttttgagacggagtctcactctgtcaccaggatggagtgcagtggctcgatctctgctcactacaacctccacctcccaggttcaagtgattctcctccctcagcctcctgagtagctgggattacaggcgcgtgccaccacacccagctcatttttgtattttttaatagagacggggtttcaccatgttggttaggctggtgtcaatctcctgacctcgtgatctgcccacctcggcctcccaaagagctgggattacaggcgtgagccaccgcgcccggcctggctgagtgctttctagcctacacttaggtgaagaactaaaggagctcaggacaatcactgcgagcgtctcctgactctcaaattccctaactccgggactcctagcatctaatgcctggacacggcccacgtgtggagcgcccagtgcctgcagcactgagctcggggctttgattcattcctctggccccatgaactggactgttcccgtgtcgctgtctcaggaggaaaggggctgacagagattagctaatttggccaagtcctcgcggccaggaagcagcagaactaagtccaaaccagggctgtccggcactgaagccggttattcccccgccccgccccctgggaggcctcaagggcgggcctgtccgtcctctctcatgaatgaaagtcctggcgcctccgaccagcaggtgtccccggggagccgcggagagactgccgctgccatggcaaccggcggaggcgtagctcgcccacgtgcccagtgacgtcatcggcttcctactcttccgaattagctcagagctcccggcggccctgccccctcctgccgccaggagctcacctggagaggccaggccagccctgggcacagcctcccgccccaggccgtggagttcactaggtctgagcccagccctgagacttcacagggatgcacccatctgcagtcctcccagcctcggcggcctcctctgcaaatgggattggcccataacctggaggaattaggatgaccatgggaactcaagtcccttctgtgcccccgtcctaagatttccatggcaactggggccgcgaggcctcttagggaagacactgacgcaagctctcagggcaggaccccgtaggcagcacccaagcctgccctcgcccaccccatgttctcagccctaggagtgggtgcccccacacgcccacgacccctcagcgctcggagccttgaggagcccaccaggcactgaggacacttgaagcccctctctctcgaaaggcgtggtcccccatggtcggcggccccgcgacccgcaggccaggacgaggggcgcgctcctcctggcctggcgcctaccttgatggtggtgaactccttcctccagggcagcaggtacaggtgcaccgcggcgagctccagaagctcgaaggcgcgagccaggccgcgtagcgcgggcgccaggtcggcgcggccccacagcccgtcggtgagcagagccagcgcgtcgtcctgcagcgccccgtgcaggtcgaagtcctccaccaggatctgccagagcaccgcgcgcagcgaggggtccccgcacacgcccgcgcggccccgtcgcagctcgcgctccaggcactggcggtagtcctcggacagcgagctgctgcccatcctgcggcggacgggggtcgggggggtcagggacctaaggccgcgcccagcccgccgcgctctccccgaaccctcacccagcgtccccaggacccctcgagcctggagaccccgcccccagcggctgggcgcccccggtatcttcggcaccccctacgctggagacctcggccccatcagctgcccgcccacccagcgatccaggcccctccagttgagcgcccccgcacctccagcccctccctccagcctgggtacctcggccttccaggggcgcccccggttatcgaccgcacccttctctagagacgcgcttccgcccgctgagccctctcccgaccagagccccttcgcccggcagatggagctgcggatcccgcgggtgacggcgctacctgtctgtccccagcggtctccggccgccgcggatcagttcgggcctccccgcgcgccgcgcgcttccgccgggagtcggctccgcccggggtccgcggccgtgacgctgggggcggggcggggcttggcgcaggccccgcctccgaataatttaggaggggcggggcctggtgaaaggggaggaggaggtgtcagcccggccgagcccctgcgcgaggcaccccgagagcctcctgtcaccgcgtcgcccgtctcctcgcgggaccggtatcgttcacgacgccgctgggccgagggctgcgggctcatggcaggcgctcagggaacgttgtgcctgggccgctcctccccacgagacagggacccagccccaggcgacccggccgcggggaagcaggtgcgcgggctcgtcccctggggggtggggccaccggcattacctggcggggattggctggatcctgggaagagcctttcctgcggggcggggccacctgcattacctggcggggattggccggatccgggggcgggcctcccctgtggggcggggccatccccttgagggaggggcccgcggcacggaaggtgggcggaaggacaagcctttcagcctcgtctgaaacagcagcctcaggtggatgcggggacctcagattctgtttatgctggctccgcttcccggcctcctgcacttgccatctgcagcccttgagagcatcgtctgggcgggtctctgaggcagggcgaagccgcccccctctctaggctaaaagctgacctgggctgcggatccacccaggctaaatctgggccacgacttcccggggacgttttcttcgctcgggttcctctgttctgtgctacagccactttctcgcattgcccagaagtagaggaggatgagggagacccttggaggtcccagccgaaacccacccctaccccacacccccgctttgggcaggctttgctacttcacgtctgtgtccctcatctctccaggccaccaaaaccaaggcccaagtttgttgaaactttccctgggcctgggcggcgaggtcccccctttttcttagattttttacctggaagttccctgctggcatcttagaaatagtgatcatgaccgggtgcggtggctcacgcctgtaatcccagcactttgagaggccgaggcgggcggatcacctgaagtcaggagttcaagaccagcctggccaacatggtgaaaccccgtctctattaaaaatacgaaagttagccgggcgtggtggcacatgtctgtaagcccagctacttgggaggctgaggcaggagaattacttgaacctgggaggcagaggttgcggttgcagtgagctaagatcgtgccactgcactccagcctgggtgacagagcgagaatgtctggaaaaaaaaatcgtgatgcagtcggtggatctccctgagttatctaggtggccacctctggacagggagctcttttacttactgtttactgaactcactcttggtgcccagtgccaccatgggtccacaccagtcctcaggacagctaacttcgtaagtctcatctttattcttcttctgatgcggaggagggtggaggtaactgttctgcctttgtcctcactgaatttggcaacaccagtccatccatccagcagtgggcctagctctcctcccataggcctgggtgggtttttgcacctgcctcaacccatggaatagaactgatgtggaatgaattccaaggctaaatcataaacatgccataccctggccttgtcttgagatccttggcctctgacatggtttggttctgtatccacacccaaaatctcatcttgaattgtaatcccacaggtctggagcaggaccaggtggagataattaaatcttgggggcagcttcctccatgctgttctcgtgatagtgaattccacgagatccgatggttttataaggggttctcccctttgttcagtgctcattctcgctcctgtcgccctgtgaggagacgccttctgccatgattgtgagtttgctgaggccttccccagccatgcggaactgtgagtcaattaaacgtcttttctttataaattatccagcctcaggcagctatttacagcagcatggggacggactaacacaccctcagaacccagccactagagtgagaaggccacggccgtgtgcagagcttttggcctgcaacttcgacctgcgactcacattcacctgcagcctattcttgggacttttttggaaatagtttttccagacaaaaatcaagatgagtttgttctgggccgagcgcagtggctcacgcctgtaatcccagcactctggaagaccgaggcaggtggatcacgaactcaggagatcgagaccatcctggctaacacactgaaaccccatctctactaaaaaatacaaaaaattagctgggcgtggtggcgggcatctgtagtcccagctactcgggagactgaggcaggagaatggcgtcaacccaggaggcggagcttgcagtgagccgggatcgcgccactgcactccagcctgggccacagagcaagactctatctcaaaaaaaaaaaaaaaaaaaggatgaggttgttctgggttggcatgggccctcaatccagtatgactgctgtccttatgaggagagagaaacttagatatgaacgcacaggagagaagaccgcttaaagacggaggcagagtggaacgagggtgccgtgagcgaaggtaacacagctgtgttagagccaccagaaactggaggcaaacagaattctaccctaaagcctccagagggagtcagccctgctgacagcttgattttgacttcaggcctgcaagatggtgagagagaacatttctgttgctgtaagccacccattttgtggtcgttttggcagcccctggcaacacatccagtcctcacgtcgtcgttccgacagccctgaatgaggtcccagccgacagctggcaccaaccatagacagcagacagctcttcggatgaatccaacccctggtcattgggttaccacctagaaacagcctcccatgatgctgaggagccatctggctgatttttgtactttttgtattttcagcagagacagggcttcactatgttggccaggctggtctcaaactcctgacctcaggtgatccacctacctcggcctcccacagtgctgggattgcaggcgtgagccacggtgcccagcctaatttttaactttttagtagagaggggggccttactatgttgcccaggctggtctcaaactcctgggctcaagtgatccccccgcctcagccttccgaagtgctgggattccaggtgtgaaccaccatgcctggcgtcttgagtatttaagcccctgagttggggtagtttgttaggcagcggtggctacgtgggctgtacacattcacggctccctcccttcctgcccggggatggacactccatgagctgccgtgtggattctccgtccttccctgccctcccgggacagacactccattgcctccactgcatatacatcctctaaaaccggcagcagccttgccaggtcggaggttccgtccacacttacctggactccaggactgcacctggtcccctggggccactgccgtgtccaccccacagtgtgcgtgagctccctccccctcctgtactcagcatcgtccagcttcctcatcttctccggtccaatggatataaggttacatcttgtttacttttcatttgatttttgttatgatttggacactgcttatgcagaatagttttatttttatttttttttagatggagtctcgctctgtgctcaggctggagtacaatggcgtgatctcggctcactgcagcctctgcctctcaggttcaaacaattctccggcctcagcctcctgagtaactgggactaccgccaccacgctcagctaatttatgtatttttagtagagacggggtttcgccatgttggccgggctggtctcgaactcctgacctcaaaagagccgtccgcctcggcttcccaaaccgctggggttacaggcatgagccactgcgcccagccattactttttattttatttttattttttgagacggagtttctctctgtcgtccaggctggagtgcagtggcacgatctcagctcactgcaacctctgcctctcaggttcacgccattctcccgcctcagcctcccgagtagctgggactacaggtgcgggccaccacgcccggctgattttttgtatttttagtagagacggggtttcaccgtgttagccaggatggtcttgatctcctgacctcgtgatccgcccacctcggcctcccaaagtgctgggattacaggcgtgagccaccgcgcccggccatttgtaggatttctaaaaggaagctgctattattcattcctgtcttatgggggagctgcaggctcagcgagggcaaagctgcacagcaaacagcagcacttgaacatgtctgccgggtctcagcgccagggatacagctgagccaggacgttcccggcccccacagtgtgcaggctgcaggtgtggccccgatgccaagccagcaggggctcccacgccaggatttgttcaagacacagctcatctccaccattctatgaagcggactttaaaatcccatcttctagacaccaacgctgaggccggagcagcccaagctccaaggcaccgtggccagctggggttcgtatcgagggctggggcagatgctccagctctgccccacccagagagacacttctgtctccctatggggtccttggcgggtaaaccagcccctgctcagggtgcaagcacagagcatcccaccgaggtccacagctactgcttttaagactgtttccctgagaacagcaacactgccccccagccagctcctggtagcatctagggttgggacctcccaccccaccagccctgccacctgcctcctcatggcatctcaaggtgccaggggtgcctttcttgcagaagagccctccatcctgatctgcccacaccgccctggcagatgctgtccacgcccggcagccttctgtgcacctcagagcatgtgtgtgtcgccatgcacagaacgatgattcctgagaccctcgggtgactgctctgggctcaggtccccagtgatgacctggaccccagcctcaccccacccttcccacccactgatgccctgcagagctctcctgtccaagagggtgaagcccacacctgcctggccaggcacagccccaagaggaccctgcttctatgcagagggtctcggaggctggcagatgttcaagaggttgggccaggcttggtttggggctgggctgtggctcgtcccccacatcctcagcggcctctgccatgggcagcaggggtggttgtgctgcctggccagtggggtggggattgagggagccacacggcgaagcacagcagtgagctctttattttaggctgggtgggggcagcatgtgacagtcaagagggctgacccttgggctgcacggacctagataagatgcccagggtcccggaatgttcacagcccacagccaaggtgagtaaggggcagggaatgtcctgggctcagagcccgagaccctgcaggggtgtccctgcccatcagcaaacagcataccctgacaccagctgcaccccaggccccagccggcccttgttcctgacccagacaagaaactagttcatggggctacaactccccttctaggggtcagaggggagagaaactggactgccgtctccactgctggccggctcatggccccctcttccctgatgctccccaggagctgccccagccagatgttcatcgctgagcctgcacccaccgaagcccaaagcttcccttcttggcctctctgaggcctacacaggagagcagggcctggttcctcctggagctgattcagccccattctgtcggggcagaggtgccaaccccaagctccagggtcagatgtgaggtgaggaaggtgaagagctggagagcacaccacagtggacaagcccccaccatgtgcagagcagcgtgaggctccaggatggtcctcagtagatcccatggctccaggtgtaggagagacagccctgggaggcgaggccaggccctgcagggaccctgggctctagctgtactacttggccaggcctccccggggcagcagctccacgtagctcagggcactctgcagtgatgtgaggcagtagccctcctctccgatcaggtacctgcatggatggcaggggcagccggtgtcatctgaacgaacagaaggatacccccggccctccagaaggtagtgtctgccctcccagttcaggacctgggtgctgagggtgggcaggtggggctgtcagggcggctgggctagaggaggcctttcccacccactatgtgctcgtccttggacggtagagccagggatggcactggatccttatcccctccccaggcagatgctgctcaggggacagcccccagctcctgctgtctgggagaggctgagctaagcgaagggccacgggacatgtggcagcaggcactctgcacaggtggacccacaggggctgcccgaaggcatggctgtgacggagccacacgctaccctccccagctgctactgacaaccaccgtttaggttgagggatgaggtccctgctcttcgcacagagacccccaccctgacccgccagggtctacccctcgtggatgaactcctccagggccgcgcactccgacaccagctgagggaggccgctcctcagcaccacgaaggacaggatgggcagcaggtcatcggcaccactgtcgggagggcatagcggccttgggttggggccaggagcctctcactccgcaaacccagcagctgtggagccatcctggccgtgctggccgccatctctgtgcccttctgcgcagaggcaccggaaggcagctgggcatggtgaggctgtccctaaagggagctcccgtactgcggagccagggctgggcccacacggccctcctgcttctacagtgcagccagctggcacaaggctaaggggcaggaagatagtccctcccgtgaccattgcctttctagggcccttcctccctggccacacctcgccctcctgggactcacatggcagctgcagcgatgggcgggggcccggcctggggtgtggcctctggggtggggcagtagtcttccgcacagacacagatgatccgcagggtccgcactgcgccccagacagggtttcaggggcagttaaccccgtccagcagcctgagccaccccttataccccgcccacccacccacctcctgatgtgcacggctgggaagagccacggtgaccctggcgatgttgctcagacaccacttttgttctggtcccccaacctccccaccggcacgtgacaagagaagctcagtggtgaagacacaggctccaggtcacctactgggatgggagcctgtccctccccctgactctcgaacctgctgacctatgcactccagcttcttctgggggcagctctccaggaccagcagtccgagctcctgggccgccgcgcagtaggggtagccagtggcccccttggcctcagggttctgggggaggagcttggtggggatgccaatggcggtggggggtgcattcctgtagagctccatgctcctgctcagggcagcctcccgggctcggtgcacgctcctggggcagagagaggccaggctaagctgccccagggaccttgccctggggacagaagcagggctgtggctggagctcagtcctggagaaaactggctatgtatctcaagcaaaaagccccagcgttgccaagaccccaggcacgggagagtggcaataatcctacctgcaaactggaagcccctgaggatggcctcagggtaaagcacaggctagggggagcaaacacgagtcttggggatggaggggagcagacagtgccagggagcagggcaggcctcctgggggactgggctggaagacactaggccacgcaggtggttgtacagctgggtccatacctgtacagggccagcagcagaggccacagcggggagaaaaagggttcctcaatgcaggccaggcagcggtccttggaggcagctgtgtttaggccttcgaaggccagaagggtcagcgagagcagcctgtctgctaggaacagagccggggacgtccacagaggctcctcccctgctgggtcaagtggctctaagccacggggcctttctccgcccaagaaacctctttccaccgccttcaagcctcctgcacccacccctgaccctcctcggcccagggcagggagtccgggactggaaacggtcacctacagctgctgccctgttgggccagcagcctgagaagaaaccggagaatgatccttttctcaaaaggggctttacccaaaactgcaggaaccagggaagactttagatccaaccccctgtgggtggggaccctgaccaagttccttagtgtgtgggcagcacagtgagaatgacgcctggactgttgggcctccctcagtggttcttagaaaactctgggctgggcgcggtggctcatgcttgtaatcccagcactttgggaggccggggtgggcagatcaactgaggtcaggagtttgagaacagcttgaccaacatggtgaaactccgtttctaccacactgtttccaaaatgagaagggctgaggcgtgagctgggtggatgtaagtctgatcagagtctctgatcaacagacccttccccaaacagaagcttgaaacggaccaataagcaggggtgaagagctgcggcggctctcccagggagggcctggcctcacctacggcattgtggatctcctccaccgcggtcttcagctgctgcagctggggctccggctgtaccccacggccccggccctgccgctcagacgtccccaggaactgctccaggtcctcgaacgagctgtccttgtctggcaatccagatgcggtgtcccccaggggtgagggagaccccacggggccgggttggagtgggggcgtggggggactgtcctggggccgcggggctgcgctgggctcgggcggggacagcatgcaatggaggctctgcgagggccgcagccgtcggcttccggggttgggggtcggggggcagcagcctggggctggcgcggctgctctgctcacggcgggatacagggcgctgtacacggagcactgcagccgcctcaggagctgcgcgatcgggtggtcggggaggctgcgggagaagaggacgtgagaacgcggccagcctcggcctctccgtggcatccacaggtgccgcgctatgcccggtttcagagaagcgacttgcattacctcctgacagtgaatgttggaaagtctgccccccgcccccgctggggaggttggagaagccgaggaaacgccctcagcgcaaagggagctgcagtgtccacgtggccgggcacaggctccctgtgtcagtccagcccctctccggcacctggcaccaggcagaggtgcccaaggccggtgcgcaggggctctgtggggcctgaaggcccagctacctgagcaggtgtgagaccaggctggtcacgagtgacaggtcccccggattcctcttgagcttggccttccagtgcttcggccagtcctacgggacagggggccttgaaggaaagcacggtgggtccgccacgaccggacgcgcctcatctcccaccagtgccgacccctagagactgtgggagcccgtcctggggtgcaggagacccagcgccagcaggccccgcgacccgcccccgcccccacccacacccgagggaaaccttaggcgaaccctgggcctgcaccctcgctgggaccctccctcctcgcagggaccctccctcctcgctgggaccctcccacgcgacccctgacctcgcctcctcgctctgccccgccccacgcagccctggccccgccccctcaccgggccctcccacgggcctctggccccgccccctcactgccccccacagcctctggctccgccccccacgggggcccacccaggcggctctgaccccgcccccctcgctgggctcctcctacaaagcctgggcccgtgggggacgcacatggtcctgttcgtactccaggatggcggcgtaaagggcccgctgctcccgttcctccggggtcagggcgacttggctgcaaaacctcctggggagaaaggcacgcggtgggtgccggggccaggccctccccgcagcggccccaggggcgggcaggagtcccacctgttggcggcctcctggagccgcagccggcgctcctccatctttctctggagctgggtgcagagtcaaggggccgagcgtgggatctgagcgggccctcggttcccaaccccgtcccacacccggagaggccgggacgtcccagggacctcctctcggtgaggggctgtccccaggtaaggcttctggggcagaaggcagcctgcgctcaagccaggagggccgggccagagaacatgggggacggcggccgggccttcccctgagaccctgcctctgcaaagcggggagcccctcggccctgtaccccgaccccggaacctccgctcccctcgctgcccccttctctgcccttggctcaaggccacactgagtttcccctcggggaccaccagggcggtcagaaaggctgctgtctcctcccgggctttggcaatcactaggttctccatcatctgccgctgtagagagagggtctggggggggaggagggagtaaggccgactcccctctgccccgcgcccacgcacccccaggccctccctagcccccactcaccagggatgtcttctgcatggcctggctggggtctagccgcgccattcgggcctcatacgcagccttcagcttctgattctgcagggaggcctcctccagtggcgtcagctctctggaaatgtgacaagctgctgtctagaccccaggaagcccagtggtgtctggacaccagaggagtctctctcatcctcccggattgctctgaggccaggaggtgaggagaaagaggaggggagccatctggggtgggctgcaacatctgccccttcttgcctgcccttccaaaacacaggttttggccaggtgcagtggctcccgcctctaatgccagcactttaggaggctaaggccgggcggatcacctgaggtcaggagttcgagaccagcctggccaacatggtgaaactctgtctctactaaaaatacaaaaattagctgggcatggtgcacacttgtaatcccagctactcgggaggctgaggcagaatagcttgatcccgggaggtgatgcagtgagccgagatctggccactgcactccagctggggtgatagagtgagactctgtctcaaaaaaacaaaaccaaaacaaaaaataacaaaaagaaagaaaacacaggttttggtattgccaggacttttggtttttctttttttctttttttttttgagacggagtctcgctctgtcgcccaggctggagcgcagtggcgcaatctcggctcactgcaaactccgcctcccgggttcatgccattctcctgcctcagcctcctgagtagctgggactacaggtgcccgccactatgcccggctaattttttgtatttttagtagagacggggtttcaccgcattaaccaggatggtcttgatctcctgacctcgtgatccacccgcctcggcctcccaaagtactgggattacaggcgtgagctaccgcgcccggccggacttttggtttttcaagagaagctggaccactggacttctatggagatccgttatatgtgtttggcaacagtatgaatcttgttaaagcaagcttgtgcaacaatccgaggctgtatgacttcgaatgtggcccaacacaaattcctaaactttcttaaaacatcactgagggctgggcacggtggctcacgcctgtaatcccagcactttgggaggatgaggcaggcggataatgaggtcaggagattgagaccatcctggctaacatggtgaaaccccgtctctattaaaaatacaaaaaattagccgggtgtggtggcatgtgcctgtgctccagcctgggtgatagagactctgtctcaaaaaatcactgaggtttttttgcaaaatttttttttttgagtcagtctcattctgtcgcccaggctggagtgcagtgacacaatctcaactcactgcaacctccgcctcctgggttcaagtgattctcctgcctcagcctcccgagtagctgggattacaggcatgtgacaccacgcccagctaatttttgtattttttagtagagatggggtttcatcatgttggccaggctgatctcgaactcctgacctcaggtaatctgcccgccttggccttccaaagtgctgggattacaggcgggagccactgcgcccagccttgcaatttttttttttaagctcatcggctgttgttagtgttagcgtattttatgtgtggcccaagacaattcttccagtgtggcccagggaaggcaaaagattggacacccctgctttaaaggcactatgtgggtcaaacagccagattagtctgtgacccatgaaaggaagaagtgtcctgtctcctttatacagttcccaacagccactccaccttgaaagctttgttccctcgtaccttcccactgtcagggacaatggaggacaaggaggaaagtcagagcctgacgcctggccaccctgccctgaagccacattgcagaaacaaggggactgggaagccaggccccgccagagcaggggcaggaggagtggacccttctcgtctctcccacttgggagtcactgggctttttgcatttgtgtctttgtatctttcatcagttctagacaactgtctgccattctaacttctaataatgcctctctcccattttctttcttctttttttttgagccggagtctcgctctgttgctaggctggagtgcagtggcacgatcttggctcactgcaacctccacctcctgggttcaagcgattctcctgcctcagcctcccaagtagctggggttacaggcacgcgccaccatgcccagctaagttttgtatttttagtagagatggggtttcaccatgttagccaggctggtcttgaactcctgaccttgtgatctgcctgccttggcctccctcccattttctttctggaactccaacgaacacgttaggctttccatctcttgttttctgtctttattttttgtttctgtaattcattctagctatcttttgaccttttttccaatacatgaatttgctcttcagctatatctgctctgctgttataaacttgtctgctcagttttgtatgtatggatttctacatatatatagatatataactcatccttgttcccagctaaatttttttttttttttttttgagatggagtcttgctctgtcgcccaggctggaatgcagtggcgcaatctcaactcactgcaacctctgcctcctgggttcaagggattctcctgcctcagcctcctgagtagctgggactataggtgcccgccaccacgcccagctaattttttgtatttttagtagagatggggtttcaccttgttggccaggatggtctcgatctcctgacctcatgatccacccacctcggcctcccaaagtgctgggattacaggcgtgagccaccgcgcccggtcattttttttttttttagacagagtctcattttgttgcccaagctggagtgcactggcacaatcacggctcactgcaccctcaacctgtcaggctcaagtgagcctcccacctcagcctccctagtagttgggactacaggggcacaccactatgcctaattttttttgagacggagtttcactcttgttgcccaggctggagtgcagtggcacaatcttcgctcactgcaacctccaccttccaggatcaagcgattctcctggactcagcctcctgagtagctgggattacaggtgcacaccaccacggccagctaatttttgtatttttagtaaagacggggttttaccatgttggccaggctggtcaggaactcctgacctcaggtgatctgctcgcctcggcctcctacagtgctgggattacaggcgtgagccaccaggccgcctgcatttgcttgtgtccggccaggggatattcccattctgggactcattttaaaaacattcgctgtcaggccaggcgcagtggctcatgcctgtaatcccagcactgtgggggccgggcgcggtgactcacgctgtaatcccagcactgtgggaggccgaggcaggcgcatcacgaggtcaggagatcgaaaccatcctggctaacatggcaaaaccccgtctctactaaaaatacaaaaaattagctgggtgtggtggtgggcgcctgtagtctcagctacttgggaggctgaggcagaagaatggtgtgaacccgggaggtggaggttgccgtgagccaagattgagccgctgcactccagcctgggtgacagagtgagactctgtctcaaaaaacaaaaaaaaaatcgctgtcatcagctcatctttctcagcctcaaaaacccaatcccaggctcatcccacctcccatcttgtccatcttacttcttacagctttgtgactctgccccctgaagcttctggaagatctcgggtggcagaaaaggagagagctttcctccttcatcggagtatacacggcggtgtcggccggcaggctggggaatgggagcagctgcaggcatggttggcttcaggcgtgttttccctgcaagccatgggtaaccaggggtcaagcggtgggccacatcccacagaggagatgcgggcttgggggatgccccaggagagccgcctactgcaggagacccaccaagcttggcggccgtcgactgggccctctccagacactgctgtgctagcttcagcatcttggaggtgtcggggggcacagtttccccagcttctgggggagggacaagaaggctggtcacagtcggctctaccactgttacttactgctgagataaaatgaggcaacggaaaaggcaggcaagcccactgcccccctcagcacccccactgaccccgggcaagcccactgcccccccatcccctcactgaccctgggcaagcccactgcccccccatcccctcaccccgggtaagcccactgcccctcccgtcccccaactgactgaccctaggcaagcccactgcccccccatcccctcaccccgggtaagcccactgccccttccaccccccactgaccccgggcaagccgactattcctcatggaccccaggcaaggcccctgcccccaccatggaccccaggcaagtccccccacccacgcatttctaatcatctgccctggttttgcctcctgagtctgctaaggctgtgggcccctcatcgaggcccgtcacagcctcgaccctaaacaggcctttagtgctcactcagcttcacttgcaactgcaggcctctgggaagtggccgttttacagagacaaggacgtgctgaggggatcgcctcacccatctcccaccggctgtgtccccaaagtcctgccttcccgtagcttggcatggagcacctctgcgcgaccatggacctgctcacacagcccttctgcgcgccgtgggagctgcctctctgtgactcgcccctggacccaccgccccagcgcctgacccacctccctgctgcccttcacagaaaacttctcatagactcccattttctcatcccgccccgatttagcccccgactccccccggaaactgcccttacccgtccccaccttgccagacacggtgggccactggagttcctctgtcttctgggactttgctctccccaggggatcctctgccactcctccacccaactcctcaatcttggagcgccagagctcagccgagctcaccggctccctagggagctggggcaactgttagctccccctgacctgtgtgatcctacgtccagtggctgccccgacctctgtgatcccacgtccaggggctcccccgacctctgtgatcccacgtccagtggctcccccgacctctgtgctcccacgtccagtggctcccccgacctctgtgctcccacgtccagtggctcccccgacctctgtgctcccacgtccagtgggtccccctgacctctgtgatcccacgtccagtggctccccctgacctctgtgctctatgtccagtggctccccctgacctctgtgatcctttgtgcagcggctgctggcctctcaaacttaatgtgttcattgcggaacttgctattcctctccttgccagtttgctcctgccccatctgcctcctgcaagtctgctctgttccaccttcaggacgcaccccgaggccgtttactgctcccatcctgggtggtctggccactgccatcctcagtcctcacctgaggctccactcccaggctgtcctctccctcaaagctcaaagtctcttcaagtttccctgcacaccagaacggccccagttccacccaaggcatgcacacagccccaccccgcccactcctatttcagggcctttgcacaccccacagctggaatgctgccccacgtctgtgccgctcactggagccagtgtcttgccacaccccagtctccatcttcttatccacaacgctggtcccttcctgccactatatcacactgagtgtgggctggtccacctactacaaatggtcaggctagaaggatacaagagacccccgccgaagcctggcacccatcaagggctaggatgcccacaatttgtccagcatggaggaagcagcagggctcagccatgcctttttctttttcttttcttttttttttttttgagacggagtttcgctcttgttccaggctggagtacaatggggtgatctcggctcactgcaacctctgctcccgggttcaagcaattctcctgcctcagcctcccgagtagctgggactacagacacccgccaccaggcccagctgattttttagatttttagtagagacggggtttcaccatgttagccaggatggtttcgatctcctgacctcaggtgatagcccgcctctgcctcccacagtgctgggattacaggcgtgagccaccgcgcccggctggctgagccgtacctttagtggtttccacttcttctagtaacacctgggagatatagtggatgctcctcaggtattccgtgtatgcctcctgtgtccaggaaagagaaagagtggggtcaggccagtggagggaagtgactccattattccggccaggtgcccttgtgggataagcaaggaacaccaccacctgcttatctctgagatacacccagagacattgagcctgcggtggttagctgcagccggaacacggttttctgcgcagggcacaggcagcatcgctgctctccagacttggaaaagacatcaggacctgagagagagagagagccagggacgagctggacctcattttctcctctgactgcctttctctccagcacaggaactgatattctcattcagtgggcctggggaagtgacctcagcagtttgctgtcatttttcattctatgcaatgtttccttcttgtgcaactcaagggtgattcattcagtggcttaaaaaaatacttttctgagaggataaagggagtgatactggaagttttcaaatcacttcccggtttaagttccgagaaatccctttcccagaacctgcgagttacgtatttccagtgcacacaggagcctagaactgttacctttcaaggctgtgtgacccctctgacaaggcacaggtcattggaaccacagaatggtggtttgttttgttttgttgagacagagtctcactctgtcgcccaggctggagtgcagtggcaggatctcgagtcactgcaacctccgcctcctgggttcaagtgattctcatccctcagcctcccaaggagctaggattacaggtgtgcaccgccacacccagctaatttttgtatttttagtagagacggggtttcaccacgttggccaggctggtctcaaactcctcacctcaggtgatccaccgcctgggcctcccaaagtgtcaggattacaggcgtgaaccacagcgcccagcaatatgctatgtttttttgttttatccctagctgttaagtttcctatctttaagtctatgcctcagagagaaagacgaaatataatccaggcaggatttctgacttgcgggggcacctgctgccctaaaaaccaacttggggaaagcagcagattcaggaacgaggcttctcctaggcacaggcaggctccttccctccttgggcagccgggtgtggctgggccagcttctctacctggtcgccaaccttagattcggccccatctcaggaacgggccacacccctccggcctgcttttccttcctaagacgactgcaaacagcatcacaaatgagcaggtatgtggccttctctgcatgccgtcccctgtggcaaccggattaaatctaccatctctgcccagaaaaatgcacgaacgcacggacctgcccgtcactcggattttggaaggtggcctggcggaccctcctgctacatctcctctacaggtggagcccaggctgtgatgcaccggctcagcgagcggagtggaaagccaaggtccgcaggatctgagctgtccaaggtcactgcacgcccggctgcgccccgcccccgtcctcgcccgggaaccgcggcccgggatcccggctggcgcccgctcccaagtctccagcccgagccggccccgtcctcgccctccccgggcgggggtccctccaggggccaccctcagcggccaagccccgcccccgccccgcctcacccggggccggttgccggtgtccagctcgatggccccgttggcaagcttcatggcgctctgcagcggcttcaccgtgccgtccccggccgcagcggccatggcgccgagcgggggaggcggcggcggtagccgaggggctggacgggcgaccggaggcccggaacgcagccggcgctggtgctggagccgcccgagcagcggaccgcaggaagggacgcggccgcacttccggcgacgggccccctccgcgcgtactgcgggccccacgggtgttagtggcgggggcggcagagtccgggtgggttgtcgcgacggagccgggcctcttcgccgtcttgagacggggctggcgagaagggcccctcacggagttgccatgggcgtctaaccgcggcagccaggcccctctctacgtgagaccccggcccccctcccctttctgcagcccgcccgccacctgcgcgccgcgtggcctccgccggcgcctgcccgccccgcgcctccgtctcccacggtaagaggcggtgagggccgcgtcgcctctccctggaggactcgtcgtgaggtgtcggcgagcccctccgcccaccgccccgccccaggccagcgctccattggcgacagaggcgggcacggccgccctcgggcccgagaggggagcggtacgagcgggggcgctggcaccgcgggtggaacctcggccggcggggtcccgcccctggcccctggcccgccccgcccgcctcgctttgcttctcgctccgcccctcccccgccccgcctcgcttccagcgcgccgagcggagcctaacgccgggtcctctaggaacctcgggccgggcagcacccgcgggattctgctggcgtcctccgctgccatgaagcgggaccggctgggccgcttcctgtctcctgggtcgtcccgacagtgcggggcctcggacggcggcggcggcgtcagccggactcggggccgcccttcccttagcggtgggccgagggtggacggggcgacggcgcggcgcgcctggggcccggtggggtcctgcggggacgcgggcgaggacggcgcggacgaggcaggtgggtccgcggcccgggcgtggcgggttggggtcgcggcaggggttgctcgtgggaggagccgcactgacgcccggaagccggcgcggcctctcctccacccggccaagggcgtagcggactcggggctgcgtcgggataggcgctgggcggccggctcggttttcctcgcgctccgtgacgccggcgtcgccggcccggcctccccggccgcgggctcggccagaagggacccggcgtgaggagcgctgtcaccgcgggcaggtcgccctggggtgcccgcgcgtgggaatcgccctcccctgcttcgtgccctcgcggagccggaaaggaggcggcacctgcaattggcagacaggaaaccgcggcgtttcctggagggcgcagcgcctgccccgggtctcgcggtcgctgggaggagggtgcagttccaggtttcactcttgaagttgcttcgctggagaggccttagaggcctttgaaatttgaaagatttcttggaccagcggccacatcccccacagggcggcttgtcccgccgagagccgcgcgcccgagccgcttgctgtgtccgggagccgcgcgaagggcgctgcaggcgctgccctcggacctggagtccgggacgccctgtgctcaggagcctcctttgccagctgctaacacttcctgccgctctgtgcaggagcaggccgggctctcgccatgggtcactgtcgcctctgccacgggaagttttcctcgagaagcctgcgcagcatctccgagagggcgcctggagcgagcatggagaggccatccgcagaggagcgcgtgctcgtacgggacttccagcgcctgcttggtgtggctgtccgccaggaccccaccttgtctccgtttgtctgcaagagctgccacgcccagttctaccagtgccacagccttctcaagtccttcctgcagagggtcaacgcctccccggctggtcgccggaagccttgtgcaaagtacgccctagtctgttcagagcacgttcaggctgtcagtactgcagtgtgacgggtgttgagagagggacagggcgtgcctccgcgggagcctctgggtggggggaatgggccatgcccgggttcagtgccaacagccctgggactgttgtggagagatgaactgggaggagctggggtgagggaagagaaagttgcctatggggaccgctgaggtttgagatctcgagagggtcccgtacgacgagcgctgtgaacctccgcctgcttgtcctgctcatggccacactgatcctttgcagggtcggtgcccagcccccaacaggggcagaggagggagcgtgtctgggtgagtcctcccccggtggagggtgggctgggtgccgaccagccgtggatctgacatctctgttgactctctgcagtggatctgatcacatccagcccccagtgcctgcacggcttggtggggtgggtgcatggacatgcggccagctgcggggccctgccccaccttcagaggacactgtcctccgagtactgcggcgtcatccaggtcgtgtggggctgcgaccagggccacgactacaccatggataccagctccagctgcaaggccttcttgctggacagtgcgctggcagtcaagtggccatgggacaaagagacggcgccacggctgccccagcaccgagggtggaaccctggggatgcccctcagacctcccagggtagagggacagggaccccagttggggctgagaccaagaccctgcccagcacggatgtggcccagcctccttcggacagcgacgcggtggggcccaggtcgggcttcccacctcagccaagcctgcccctttgcagggccccaggtaggaggcacctcttgctggtgctagaccaggatgtgtgctcctcagtggggcagggttttcagcagaaagtgaatgtctccactgctctaggtggtggctggggtgtggtgtgagaaggagcagagcttggggcttctgcctgcggctgctcaccacatccagagagcagggaggggcggccagcctgtctccgcctcttgctcctctgtgagcagggctctgttccagcagtttctgtggagacacgctcatcagccgtcgagtctttttctaagcctgtgcttggggctgaggggactgaggaagagggaagaatagggccttgtctgtggatgtgggagaaaagaatggccgttgcctctgcggctgctgccctgggccagctgcaggtcatttcctggcactcagccagccgcctggtgacaccctggtgtgggccagtgtggcgcagctttctctgctgacaggctgaggggaaacacaaggcccttgtttgggccccagaacccatagcactgtgggctggtgcagctgctcctggatgttgttttaggagggccagggccagtttccctccggcctcttgtcctgtgtgtgctctgtgcacctgtccccacctgagcactcagttcccactttgagtcttgaggggagcttccgaaaagcgtagctacctgtaatcccagcactttgggaggctgaggtgggtggatcacttgaggtcacgagatcaagaccaacctggccaacatagcgaaaccccatcgctaataaaaatacaaaaactagccaggtatggtggtgggcatctgtaatcccagctactctggaggctgaggcacgagaatcacttcagcctgggaggcggaagttgcagtgagccgacatcgcacaaccgtactccagcctgggtgacagagcaagactctgtcccaaacagaaacacagctacccagatagtttagctagatacgggtgcacagatgagacagtgcggctcgggggcctcaggtaggaacgggattgtgagtgtcacatcttagagctgcttggctctgtaaacttgtatgcagtgtgttgagaacaattctatctatctgtgtatctatctacctacctacctatctatcttcctacttctttgtctctctctatctacctacctatctgtatatctatgtatctacttatctacctatttatctatttatttacctacttatctatctatctatgtgtttatttatttttgagacagagtctcgttttgtagcccaggctggagtgcggtggtgccatcttggctcaccgctacctcagcctcccgagtagctgggatgacaggcacatgccaccacgcccacctaatttttgtatttttagtagagatggggtttcaccatgtgggccaggcttggtctcgaactcctgacctcgtgatccacctgcctcagcctcccgagtagctgggatgacgggcacgtgccaccacgcccacctaatttttgtatttttagtagagatggggtttcaccatgttggccaggcttggtctcgaactcctgacctcgtgatccacctgcctcagcctcccgagtagctgggatgatgggcacgcgccactacgcccacctaatttttgtatttttagtagagatggggtttcaccatgttggccaggcttggtcttgaactcctgacctcgtgatccacctgcatcagcctcccagaatgctgggattacaggtgtgaaccaccgcgcccagccaagaacaatactttttaaaacttattttaggccaagtgcagtggttcacgcctgtaatcccagcactctgggatgctgaggtaggcggatcacggggtcaggagatcgagaccatcctgactaacacggtgaaaccccatctctactaaaaatacaaaaaattagctggatgtggctgtggttgcctgtaggcccagctacttgggaggctgaggcaggagaatcgcttgaccctgggaggcggagattgcagtgagctgagattctaccactacgctctggcctgaccgacagagcaagattctgtctaaaaaagaaaaaaacaaaacaaagaaaacttattttaagtagagacagggtctcactcttttgcccaggctggtcttgaatttctgtcttcaagtgatccttctgccttggcctcccaaaaggctgagattataagcatgaaccttcaggcctggccgagagaacagtaatatttatttatttatttatggagtctcgctctgtcgccaccaggcctggccgagagaacagtattatttatttattgatggagtctcactctgtcgcccaggctcgagtgcagtggcacaatctcggctcactgcagcctctgcctcctgggttcaagtgattctcctgtctcagcctcccgagtagctgggattacaggcttgtgccaccacaccctgctaatttttttgtatttgtatttgtatttgttttgagaaggagtttcactctttgttacccaggctggagtgcagtggcacgatatcagctcaccacaacctctgcctcccaggttcaagcgattctcctgcctcagcctcccgagtagctgggattacaggcatgcaccactatgcctggctatttttgtattttttagtagaaatggggtttctccatgttggtaaggctggtctcgacctcccgacttcaggtgatccgcccaccccggcctccaaagtgctggaattgcaggcatgagttaccacgcccagctcaattttttgtattttttgtagagacggggtttaaccatgttagccaggttggtcttgatctcctgaccttgtgatccacccgcgtcagcctcccaaagtgctgggattacaggcgtgagccactgcacccggactgagaatagtaatttttaattattttatttttttgagtcggagtcttgctcttttgcccaggctggagtgcagtgcgcgatctcggctcactgcaatgtctgcctcccgggttcaagcgattcttctgcctcagcctcccaggtagctgggattacaggtgtgtgccaccatgcccggctaatttttgtatttttaatagagatggggtttcaccacgttggccaggctggtctcgatctcctgacctcgtgatccacctgcatcggcctcccaaagtgctgggattacagacatgagccaccgtgcctggcctagtaattttttaaatgtctcagaacatccaccaagtccaggctgtcctagaaggactggatcggagtcagtggaaggactgggctttctggttctgctgttcctgagggttctgatgcttgttgctgcctgtgtgcttctggacgttgggctggcagggcaggatcagaggctgcatagcacccttggtggggatggggccatggtggggagaacttgagggtcagggaccccagtctcccttctagtcatcaatagtagaatcatgcctccttgcaggtgagacctttctgtgctccgtgttggtaacaggagccttgttctttgtttctcagggcagttgggtgagaagcagcttccatcttcaacctcggatgatcgggtaaaagacgagttcagtgacctttctgaggggtgagagaagagtgggtttaaacagcctaaaatttctccttcaaaaaccatcagtgacctttctgaggggtgagagaagagtgggtttaaacagcctaaaatttctccttcaaaaaccaaacagccatcgtagggtcggctgcccatgcgctggtaccaaactaagccatcacaggggccggctgtccgtgccctggttgggacacgcctcctctcgaggtggcgggagaggaggggctggggagcttccgaggcttcttgtctctgattgatggtttcctgggtgccagagagcactcccagacctgaggcagctccagagggagcctgatagggtttctgacccagagcagcctagaaatgagtttgttgaaaccactctggctgggtcctttgcttctgctactgttttagggccatagttttgtgttcgctccagatgtttctggagtagagaaaccccgactttagcccttgactatgacactgttgtggcttgaagccgaggctctgcgaggaggtgttgcaggaggacgggcctcagaagggacctcatcagtgtctgcaaactccctgggccacccctgcctctgagccaagcgccattcagggcagctgtgccaggctggggtttgcaccgtttccaccctctcctgtaaaccttggctgcaacacagatgcacctcatccaaatgaggacaccccagtttgggggccaatcccagtgggatgtgcagtgatgaaatcgggcaggtgccaggaggcacctggggtggctaagactgtcctcaggaccaccaggacacaaaaccgcagctgaggttatagcataaaggccacaaatctttttttttttttttttttccttttgtgaacttttttttttagaccgagccttactctgttgcccaggctggagtgcagtggtgtgacctcagctcactgcaaactccacctcccgcgttcaagtgattctcccgcctcagcctcccgagtagctgggattacaggcgcccgccaccacacccagctaagttttgtatttatttattttttttttatttgagacggagtctcgctgtgttgcccaggctggagtgcagtggcacaatctcggctcactgcaagctctgcctcccgggttcacgccattctccggcctcagcctctgagtcgctgggactacaggcacccgccaccacgcccggctaattttttgtatttttagcagagacggggtttcactttgttagccgggatggtcttgatctcctgacctcgtgatccgcccgcctctgcctcccaaagtgctgggattacaggtgttagccaccgcacccggccaatttttgtatttttagtagagacggggtttcacggtattggccaggctggtcttgaactcctgacctcatgcgatccacctacgtcaccctcccaaagtgctgggattacaggagttagcctctgcacccagccacttttgtgaacttagaagtgactcatggcaaacccatcagttgcatagggttcgcagttatggggtgaggtggtcgatttctcaaagtctgcttagcaggaagctacctttgagcgcctccaccccttctgggccgctgtggaaagggctgtttccaagtccagtgtcctggtgcccagagcacatggcttgtggggattgctggcttgtgagcctggctggccctttgtgttcggaaacgggattggaaatttggggattttagatttaagacattttcagaagaactcaaatgtgggacatgggggtccatttggtatctttaggcaggaggtcgtgttgggtctgtcactgcccaggcccagggctttgctgaagattctctcttaattcctagagacgtcttgagtgaagatgaaaatgacaagaagcaaaatgcccagtcttcggacgagtcctttgagccttacccagaaaggaagtaagtgggcagcccggggtctgctggaggcatccgttgggcgacctagacacccgcctgtgctccagggcctctccccggtgcccactcagttcactctctcgtgtgcggatctcccgagcccagtgaaacgtggcttccctcagtgagcgggaggcgggggaggggcaggcgggcaggtgagaaggtgggtcctcctggtgctttggagctgggacctggtctcggcactgtgaggctgcctcagagtcccagcagtggatggcaggtgtctctgtcgacagaaccccgccttgcttgagaaggaggctcttacgtcccttctgccggtcctgccctgggttcacaccccagtgtacccccgaagcccccaacccgtcgcttctgctttgtgtgcgtccccagaggcccgaggacccagctctgtcatcctcccagttctgaccccatcactgatgtccatggccaggcagccacggtccacttccctgttgaatgacttctgtgagcttgttttgactttgtttttagggatttttattttctctcttcagttagaacacaggccctggtagtgagggctggttttcacttgtgctgttttctttgcagccctatacccagcagtacccagaacactcccaggtagttggtgactgacccagtccctgtccttgagcatttcacagcccagaacaaaggtccagagggcaggtggctctgagcaccaccgtcagccactagaaccctgctgtgcagactgagaggtcaacggccttttttcatggaagttctgatgctgttaagttctgaaaagagaaacgggagcagtggaggaggcccggagagagatgcgaagcagagggcaggactgagccagaggggctgcagcagcttcagcatgaacagaaaactggtcaggcccagaaaaggtgcccgggggtccctacccccaggcttgttcccaggagtcatggctgggagtgccgcctgaggctgctgtacggaagcccccactccgtgaccctccgggttgagtctgaatcccaggacacctgagaatgtgtctctggcttgctgcccagaaggtctggggctgctggtgtgaggagggctgggagctgggatgggaggagccaggcgagccttttccggatcgaggcagattcaggaggggagggtcctctctgctgagcccctgctgctgtgacagggacagcacactcagactgtgtcactagtccctctgggaccccaggagtgcagacaaagacgtgctttggaacagagacacgggagatacgttttcagaggtctctaataaaaggggtgacttcagtggaaaccgctgcgcaggaggcaggactgggtggtagcaagcatggcctcctgactgcggcgagtaccaggggcacttggttccccagctgccaccgtgagacccccctgggaacccagaagggcctctgcacagcccccggcccgtgtgctgcctcccagtcttgtcaaccctgaccttggagttctagcgggcgtgcccgcctgtgtcctcagctgggggcgcatgagaagagacttctgtgatgtgttaatgaggggtcagtggttcccgccagaggggaaggccagggcctgcacccccatggggaaagaactgacaggcagcagtgaggcctgagcccagcccacccggtccgcaaagattcccgtcccaaacacgagggcacagagactgcgggtgctctgaagcctcctgtgctgaggaggtgagtggtcattgtgggaacggcatggccagccactcacaaacaaggggccacccaatccaggcaggcagggcaggtgagggggacatgtggctaggtcatgaaaaccagttattagggacagggagagaaggcgcagcctgtgcgaagtcaacagttcttctcagtgcgtttttgtcttgtttctgagatggagtcttgctctgttgcccagactggagtgcagtggcacgatcttggctcactgcaacctccgcctcccgagttcaagtgattctcctgcctcagcctcctgagtagctgggattacaggcatgtgccaccatacctggctaatttttgtatttttagtagagatgggatttctcccacgttggccacactggtctcgaactcctgacctcatgatccgcccgcctcagcctgccaaagtgctgggattacaggcgtgagccaccgcgccggcctcaatgcactctttaaagagaagggcagttagcgacagggtctcatgttgttgcctaggctggggtgccctggcacgatcatggctgactgcagccctgtgcgctcaagtgagcctctcacctcagcctcccagggtgctgggactgccaacatgagccactggactcggcagtgtaaactacttttttcatgctattgcatatgtattgttcattgataatatatagaaacataactgggttttgtgtatggattttgtgccctgcaactttgctgaaataattaattagggttttttgtatgtggatctttagggttttctacgtagaaggtcgtgtcatttgtgaatagggagaatttgtctttgttttctttttcttgcccagttactctggctagggcctccagtgctgccctgagagcagtggtgagagaatccgtatcttgttcctgaccttggaggaagagctttcagtccttcacagttgagcgtggtgtctgctgtgggtttcatgtagaggttttatcgtggtgaagaagttcctttctgttcttgagatatttccttaactattcttacctggatccagaaaggaaccacaagtgcgtctctctctttaagtctccgatagacgcacactggaagctgctgcatttgctggtccctcagggacttgccagaccaactaaaatgcacgaccccagacttttggaggacaaggtctcctgcccaccatggtcccagccagcagctccaggaacacaggctgggctccctgcagtggaggcggggttgaggaatgctggggtggcagctactcaccgtgtgcttcccagggagcatcacctgttcctctgaagccctgcctgggtggcttgagcttggaatcaagctgacccattttgagagagtggattctgagctttttcctagcgtaaggtcgttttgataaaggagtggtcctttggacatccctgttctgccgtcctgatacctctagttgtgggttttatgtgtagcacagggtgaagctttagttctcagaacccacccctgctgtaccctgtgccctcgccctccgctgtgtttgccctgaccctcctgtaccctgcgtcctcgccctctgctgtgctcacccgaccctgctgtaccctgcgccctcgtcctctgccgtttgcccctgaccctgctgtaccatgccctcgccctctgctgtgttcaccctgaccctgctgtaccctgcgccctcaccctctgctgtgttcacctgaccctgctgtgtcctgcgcccttgccctctgctgtgctcgccctgaccctgctgtaccccgctgtaccctgcgccctcgccctctgctgtgttcaccccgaccctgctgtaccctgcgccctcatcctctgctgtgccctccccctctgctgtgttcgccctgaccctgctgtaccctgcgccctcgccctctgctgtgtttgccctgaccctgctgtaccctgcgccctcgccctctgctgtgttcacccctgaccctgctgtgtcctgcgcccttgccctctgctgtgctcgcccctgaggcctcctgtccagagttgctctggctttggtggcttcaggtagattctgagggtcagtcagcacagaagcaactcagggaagcttcagaaaagaccatttctcaggttggagagacaaaaaacattttgcaaatggagatcagaaaccattgaatttgggaacctctttttttcagagtctctggtaagaagagtgaaagcaaagaagccaagaagtctgaagaaccaagaattcggaagaagccgggacccaagcccggatggaagaagaagcttcgttgtgagaggtgatgcctgcaacgcgaggctcgccctgcctgtcggggccggggctccatgcatgctcttcattgcagggaggagcttcccaccatctacaagtgtccttaccagggctgcacggccgtgtaccgaggcgctgacggcatgaaggtgagcactggctgtgcctgacccaggcccggcagctgtcagtgtgaacctgggggaggtagcaggtgtttctgcagcctaactcagacttgcgcccaaggacactttgacctaggttaaccgagacctgaagcagtcctagccagtgccatccttgggggtagatgtgaggccagactttcacttgagacaccccccggggggtctagaagtttcttggagtgaagctgtgaaggagccagtggtgtcgctggaggaggagttggatctgccttccaggggcctcagctgtcacctactgagggctcgtgccatgtggcccgggtgcggctctgagggtctctcaccgagtctctccttcagaagcacatcaaggagcaccacgaggaggtccgggagcggccctgcccccaccctggctgcaacaaggttttcatgatcgaccgctacctgcagcgccacgtgaagctcatccacacaggtacgcctatcgccagtgtcgcccacgcgggtgacagccaggggcacgtgacctgctttccagtcttcctcatacccatccccgccccaagagttgggggtgcgtgaaggtggctcatggggtctttggtactcagtcacgttggtagatgaaggctagagtagggcgtcagtgtgaatctgcccttccctgtgatggaaggaattcctgacttccccaggatctaggcagtttgtcaaaactaatagccaagcaatcttggtgtccttttgcaaattggtcattttattttttaatttttttttgagacggagtcctgctctgttgcccaggctggagtgcagtggcaccatcttggctcaccacaacctctgcctcccaggttcaatcaattctcccgcctcagcctcccaagtagctgggattacaggcacccgcaaccatgcctggctaatttttgtaatttttggtagagacggggtttcaccatgttggccagggtgatctctaactcctgacctcaagtgatctcagccttccaaagtgcagagattacaggtgtgagcactgcacctggcccaaacaagtgtatcttaaaaggcaaggcagaaggcatgaaggcacaccagctctggggagctgcccacgtggacaggcgggaggcacgtgtggttctgccttttcacatgtgtgtaggtcgtgtcattaagaccggaggcggatgggggaattatgactgagggtgctgtctctgtgcccgtcttatttttcacaatttctataatgcacaagttacttttataatccaacaaggatatgttttcaaaatgacaaacttggccgggcgtggtggctcacacctgtaatcccagcactttgggaggctgaggtgggtggatcacctgaggtcagcagttcaagaccagcctggccaacatggtaaaacctggtctctactaaaaatacaaaaattatctgggtgtggtggcacacgcctgtaggcacagctacttgggaggcggaggtggaggttgcagtgagccgagatcacaccactgcactccagcctgggcaacagtgagacactgtctcaaaaaaaaaacttgtttgaaccacgtggacccacatatccatggtcagggactcgaatccctggtattcagagggctgccttttcctaagtgcaggttctgtagggtctttgcagggctaacttcgggacttcagtatgagcagattttggtaaggggtgggggggggcctggaaccagctgaggacaactgtatattgatccttacacacacagttttccttggttttgaacttattacagaataagaattatttattcttacttgaatttactgaagtattttttcattaggattgcttttcactgctgggtcatctcccgacatgcgggttgttattttttgggttctccgacatctctcctgatggcagcacttccttgggtttggtccttcagactctgcatctgtccggtcactgatggtcacaaccagcagttccttaaaaacctgaaattgggccgggtgcagtggctcatgcctgtaatcgcagcactttggaggctaaggcagtaggattgcttgaggccaggattttgacaccagcctgggcaacatagtgaggccgtctttaccaaaaactttttttttaatttattgatggaaacagtctcactcttatcaccatggctggagtgcagtggcgcgatcttggctcactgtaacctccacctccctagttcaagcaattctcctgtctcagcctcctgagtagctgggattacaggcatctgccaccacgccgggggtgtttttttttgtttgtttgtttgtttttttgactgagtcttgctcttgtcgcccaggctggggtgcagtggcacaatctcagctcactgcaagctcctcttcctggggtaaagccattctcctgcctcagcctcccaaatagctgggactacaggtgctggccaccacacccaactaatttttcgtattttcagtacagacggggtttcaccacgttagtgaggctggtctcaatctcctgaccttgtgatccacctgcctcggcctcccgaagtgctgggattataagcgtgagccatgacgcctgggtaatttttctatttttagtagagaggcaggttttgctatgttggccaggctggtctcgagttcctgacctcaggtgatttgcctgccttggcctcccaaagtgctgggattacaggcatgagccaccgtgcccagcccccaatttttttttttttttccgggacagtctgtgtcgcccagcctggagtgcagctgtgcaatctcagctcactgcaacctccacctcctgggttcatgcaattctgctgcctcagcctcccgagtagctgggactacaggtgtgtgccaccacacctggctaatttttgtatttttagtagagacagggttttaccatattgattgggctggggctggtcttgaactgacttcatgatccgcctgccttggccttccaaagtgctgggattgagcactttgtgtaagccactgcaccggccccccaaattttttaaattacctgggtgtggtggtgcacacctgtggtcccagctacttgagaggttgaggcaggaggatcacttaagcctgggagttccaggctatagtgagccatgattgtaccattgcacttcaacctgggcaacagagcaagaccctgtctccaaaaaaaaaaaaaaaaaaagaatcccttgaacctgggaggtggagtttccagtgagctgagattgggctgttgcactccagcctgggcaacagagcaagactcaagtctcaaaaaaaaagaacagcgtagagtaaaatgccaagatagggtttcccttcgaagagaaaagtctgtcttgtgaagcgtttcagggcttgacagatgtggaggcagcacagggtgagtgggtctgcatgtccacatgtggcatttgtggactagcaagtgagatctctttgttcaagggtgtgagaaagatttccagagccagtacagcaatgcatacccccagaccctgggtatggacccctctcatatggagatgaattctagagaacagccatagctgtgacaatcagtattctatacaaccttagtgatacggcttcctttaagaatttgtaggccaggcacggtggctcacacatgtaatcccagcactttgggagaccgaggcaggcagatcacaaggtcaggaattcaagaccagcctggccaatatggtgtaaaccctgtctctactaaaaatacaaaaatcagctgggcgtggtggggggcgcctgtaatcccagctacttggcaggctgaggcacaagaatcgcttgagcctgggaggcgcaggttgcagtgagctgagatcacgccaccgcactgcagcctgggtaacagagcgaaactccatctcaaaaaaaaaaaaagacaagaatctgtggttaaggaaatagctttctgaggtttctttaaaaaccatcctgaaatgcacacagctgatgaagccacgtgacagtgtataaagcagtttaaagatcttaataaacgaggccctcataggccccttgcttgggcccactgcatggtgaaccatgtgcagaaatgtcttcccagctgtgatggtttcacattgtcatcgtcgtccccccgggaggttggagcatcaggggcctggactcactggactctcccctctcagaggtgcggaactatatctgtgacgaatgtggacaaaccttcaagcagcggaagcaccttctcgtccaccaaatgcgacattcgggagccaagcctttgcagtaagtgtgagtcaggaccccctcccagggctgtggccctcgcaccttcttatctgcctctgtcccccaggtgtgaggtctgtgggttccagtgcaggcagcgggcatccctcaagtaccacatgaccaaacacaaggctgagactgagctggactttgcctgtgaccagtgtggccggcggtttgagaaggcccacaacctcaatgtacacatgtccatggtgcacccgctgacacagacccaggacaaggccctgcccctggaggcggaaccaccacctgggccaccgagcccctctgtgaccacagagggccaggcggtgaagcccgaacccacctgaggacggcagtgaggatgagcacctctagcagcctggactccgcagtggctgtgtcagcctcacccttcgtgtgcacccgcatgggagggtcggagggtgctgcccgcccttggtgctggaggcgggcttggtgtccggctcaagtagccttcctctgctctgggaccagtggtttattttcccgcaaacgctgagtgactcggggccggacagttcataaataattgattcctttccccactaaagcagtcgaggagatttgtaatccactttttagtgcaacaagagctccatgttatgcttgtaataaattatttacacgggagctgggctggtgtgcagtggcaggtcccgtcagaagagatgaggctcctgggacaggtcagcgtcaggggcagcctgctgtctgctctggagggcggcgctcacctctgggtcgcagtccccacgatcagccagcagctgtgagagaggagcaggtcctcagcccatgccgcccactaggcctcagaccacaggggaggggctctggcagaaatagtcgagttgtattgccagccaggcaggcacatggcccaggcagctgtcaattctcatgtcccccacatggcccaaggtgggcatcttgacgttacctctgccacgtgtgagaagctctttttcgggcaccgaggtattaactgcagcagaaaaagacgagcttttgttatcagttccacggggttgccctagagagaaaacaggcaaactcacaggttagaagacatacagaaacagggctggtgtgtcccccatagtctgcatgctgtgccggaacattctttggcagaaggagcctccggctggggggagctcccctggaggtgggactggcccttgcacctgcctgacccttgagctccaggctcctgccagctggaggtgaaactgtgcttgtatccccagccacgaagagctggaccagcttcaagtacatgtccacagcaacatgcaggaaggcctcttccctgatggccgcgtcttcatggaagtaggagagaagactagaggtaaagacatagtgacaaatggctacagactgctggaaaggtagcaggtgatgccaagggatactgctcatctgtggagcagaggcacagacaacccttcccatctggcgggacccagaggtgctgagatgggggtctgggaaacactgcccagccctgaccagccctgtgggtggaggtacctgtaaaaagcgaaaggcagcagcctggtgtgctgatccggggccacacggaggaggagccgccccagcctgaggtctgcaacaccaagaagtggctcaggcaactctggacatctctgcctattatcagtgctggggacacccctgggggtcgggacgtgtaccctgggaggcctggctgtggggatagtgtggggcgaacagcctgagctgaggatacccaggtacctgtcagcagctgggagaggatgggggggtcgacctcttgcaggagggtgggtgtggtgcagagagaggcagtccccatgataggcccattggtcctggggttgaccagtgagccagtaaattatcttattgctttaaacaagtttgtgcttaatctgtcccaactaaaatggagcttataaacttacttagcaaggaacctcaaggagggctcgttcttaaccatttgcaagatgcctctgaaaagagcggccctccgcatttgtgcctcagcagcgtgtttcttaccactctctgtcaactgaaagagtgccagccaggatatcttcctcttctctaaacactcgaggattgctgcacaaacgtggaaagcctttggcaggtctgtggtgctctgtaaaccgcaggagaccaaccctgagaatggccgacctggtgctcccatgggtaggagggtacagccctcagcacagaagagggcatttcctctttgcttattgtaagtcttaaaactggtgacagttttacctatagaaggtaatactgggcctctggacagaagaggctcaggtaggaggccagggacttcgagcacccacaccaaggctgctgcaccacgtcctcaaataagacattaaaagaaaggcccacaggccggatgcagtggctcatgcctgtaatcccaacactttgggaggccgaggtcggcggatcactgaggccagttcaagaccagcctggcaatatggtgaaaccccgtctctactaaaaatacaaaaattagccgggtgtgacagactcacgcctgtaatcccagctactcgggaggctgatgcaggagaattgcttgaacccaggaggctgaggttgcagtgagctgagatcacaccactgcactccagcctgggtgacagagtgagacccccatctcaaaaaaaaaaaaaaaaaacccacggcctgggagttctcactcacacttccgcaaacacaaggagctcctgagctagtctggaaaccctgacttggaagctggctgcctggtgcccctgcctggcccacagtgggagaggacaccttggctggtaaggtctgacttacatttgaggtcagatgtgacgacagcaggcccatcaaggagaagaagaaaaggaaaaccaatagctgtaaataaaaacgtgcacttattattacattaaaattacctgtgctgtcattctaaataaggctgacacattcctctttaattgaaattttttacatctaggccataaatcctttaagtggatcttagaaaactttccaatcacttctagagagacagcttaattgagaattaattactactggctgggtcatttcacacttgcctttaaacaaagctagaaacagtttgaaaaagtgacaagagccagaaagagaagactgctgcggtctccttggctgtgcgcagtcccaactcagcatcatctccctgcaaggcctcctgtcagaagtgtttgtaaaatccttgaagataagcccacaggctccagcctaaagtagggcctgactgggcagggtctctgtggacactcctcgctgcacactagggtcctaaggccctggagccactaaaatcccttctaacaaaactacacaagaaacctgaagacgtactcagaagaacccctgcagggtggttataatcaccaaaaccctgggcgctgctgtcgatccagctttgagctggtgtaagttgtgtgctgacatggcacctatgcgttgcggatctcgggctgggcacagagggctgctgcctccagctctcttgtgggatgcttgtttctgttcctgttctgcacacaccacccttggctccctgcacagagagctgtgtgggtgtcactggtcttgtgggggcagtcaggctttccagggtgcagcaaccaggtgggcagtgggtctgagtcgaacatggtccctggcctggaattcaagagcagcctctcccactcctttccctatgcctatggctgcagacggtcccatccttgctgcctcttgtccccagcaccccaggtctgagctgtctcactgcaagcttatctggggctgtccctcagcacatgaatcaaggctactgcagcatgaacacagaaggcaccacttgaaggctgacagcatttacgctgggctgtgatgaggataaaaataagctgaagaaacgcacttcaagcctgggcaacacagtgagacccccatctcttttaatttttactttaaacaaattttttttttttgagacaagtctcgctctgtcacccagactgcagggcagtggcgtgatcttggctcactgcagcctctgccccctgggttcaagtgatcctcctgcctcagcctcctgagtagctttacaggctatgggattgtaggtgcgcaccaccacacccgactaatttttgtgtttttagtagagacagggtttcaccatgttgcccaagctggtctcaaactcctgacaccaagtgatccgcctgcctcggcctccctaagtgttgggattacaggcatgagccaccatgcctggactacagacccccatctcagaaaaaattacaaaattagccgggcatggtggcacacacctgtagtctgagctactccagaggctgaggtaagaggatggcttgagcccagaagaggctgcagtgagctgactgcaccactgcactccagcctgggcgacagtgagaccctgtctcaactacatacaaccatttaaaaaactgaaattattatttttactagtaaacttgatagtcaaagtcttactccaagccagctgggcgtggtggctcacgcctgtaatcccagcactttgggaggccaaggcgggaggatcacggggtcaggagatcgagaccatcctggctaacacagtgaaaccccgtctctactaaaaatacaaaaaaaaaaaaaaaaaaaaaaagtcttgctccaagccacatatttgtctttagaaaaacagttcatcagacaagcccagagaaatagcactgattgaaaccaagcttgcgagaaaataaatcagtaaaagaatttcctatcttgcctcctctctctcgcagtccagcttctttagctgcttcctgatgttttcttccctgacttgttgaatcgcaaagtgcagtgcagcagctgagagccagtccgggttgggtgctggggaggcagcctcaggggagaggaaactgggacagagagaacggggtcattgcagggccttacaaccatacaaccacgccatagaaaccaagtccttattcccacctgtcacctttggggcctgcctttccatcagaggacagagaagggtttcaggaccatcagaaactaggtctgcatcccccaggtccacgtgagagtgtgggcaggtgctggtgctgcccccacagcatcctggcgttctgagagctgctgactgagcaggcagctggcctggtcctgtctaccttgccctgtgctcttgggccccagctgcctacattttggaagaagaggcctcattttcctcagttgcccatgcctggccctgtggatcaggcattccctcctacaacagagaacaaaggactgcctggctctggccccagtgtggtgtctgagttttctggctggttaaaaaattggtaggaaattaatgaaacaatgctgtggtttaagagactttaaataagctgggcatgacggttcacatctgcaatcatagcacttcaggaggatcgcttaagcccagcagtttgagatctgcctgggcaacacagtgagactcaatctcaaataaacaaaaacgaggcagggcgtggtggttcacgcctgtaatcccagcactttgggaggctgaggcaggcagatcacctgaggtcgggagttcgagaccagcctgaccaacgtggagaaaccctgtctctactaaaaatacaaaattagccaggcatggtggctcacgcctgtaatcccagctactcaggagactgaggcaggaggatcgcttgaacctgggaggcggaggtcatggtgagccgagatcgtgccatctcactctagggtgggtgacaagagtgaaactctgtctcaaacaaaacaaaacaaaaaacaaaacttcagacaatctgatctgtgtttgtagaattagaactggaggtgtgacctgctttctccttttttgagatggagtttctctctcattgcccatgctggactacaatggcatgatctcggctcactgcaacctccacctcctgggttcaagcaattctcctgcctcagcctcctgagtagctgggactacaggcgcacactatcacacccagctcatttctgtattttcagtagagattgtttcacatgttggccaggctggtctcaaactcctgacctcaggtgatccacctgccttggcctcccaaagtgctgggattacaggtgtgcgccaccgcgccggggccctcttctcttctttcagcagacggcgagcagccaaaccctgaggggacccggtgtggcatcagtgattcaaaactagtcacaaagtaaggtgttctccaaggaggcaggatgggtactagcagtgccctctgacgaccccttaagaacacggcacccacattcagcaggtggagtggctgtcagctctgtggtcctcagaagggtgtgtgagcctggattgcgccaggagcttgatggtttgcaaggacccgtgaatatctgactggggtcgacaggtcagggtaggctgagaatctgcatccctgaggtccccatgacactgaccctaccagcacgcggtgcactctaggagcccacattagatttaagaggaaggggagcaggtgcaaaggaatcactcgagctcctcactcagacgggagcctgggagaggccgttcctcactcagacgagacactggcagaggctgtttttttttttgttttttttctggacagagtcttgctctattggccgttggagtgatctcggctcactggaaactccacctcctgggttcaactgattctcctgcctcggcctccccagtagttgggattacaggcgcccaccaccacgagaactcggttcttttctccctgctcacacgagaggctgcccacaccgcttctctcaagcaagccagggtgtttaggagatgaccttgagcaggtcccgaagtgcatctgggcgggcacaccccatctcaccacccacacgtactcgctggcaaactgccggccttcttgtagcttctgcagttcccggggcagcgggctctggcagtgtctcctccaccggcagagcagcacaggctccaggctcggccaccacacctatggagagagcaccagcacacagatgagggtggctgagatggacacacctccgctgccccagccatgacaagcccccagtgctcctacaggccactacaggcccacactcgccctgcgctctggaactccaaagccagtattttttacgtcaattaaggctcaaagcagttccatgaggcatttattacccacactcatggaagacgtggaatttggagaaggaagagcctggcctaacgcaacagtgaagggaccacactcccctgagctgggaacgaaacagtgaagggaccacagtcccctgagctgggaatgaaacagtgaagggaccacactcctctgagctgggaacaaaacagtgaagggaccacactcctctgagctgggaacaaaacagtgaagggaccacactcctctgagctgggaacgaaacagtgaagggaccacactgccctgagctgggaacgaaacagtgaagggaccacactcctctgagctgggaacaaaacagtgaagggaccacactgccctgagctgggaacgaaacagtgaagggaccacactcctctgagctgggaacaaaacagtgaagggaccacactgccctgagctgggaacaaaacagtgaagggaccacactcctctgagctgggaacaaaacagtgaagggaccacactgccctgagctgggaacgaaacagtgaagggaccacactcctctgagctgggaacgaaacagtgaagagaccacactgccctgagctgggaatgcctggtccttggatgccctcagctgagaggtggcgttctaaacaccgaagagttcatttctcacgaattccaccaactgagctacaactcggtgcaaatgcagcctgcttggggagctccctggggaacatgccgtgctgcggagaaaaaggccctcctgtccctgatgaccgagaaggaagggcgacagctgtggtcttcaggactaagtgagccgccagggaagtgagggaaatgctgccctcctcccactctcgggaccctgggctgctaggggagcctgctgagctctggcgggagctgaggtgaagtctctgctccgaagtcccaagaaagcatagtcaggcgcaagtgggccacagtcatgctctcgtgacggggcacaggcagccaccgtacagcctccagccagtgcacaacccaagaccgtgaacaaacaagccctgcacccctgtggacatgaaggtgcccgtggggtctgagtggggtccacaggggagaagtcctgcgggtgccatggtgacggcggtgggggcagggacggttctgggaactcaggatgtgcggccctcatctgctatgagctggcatctttaactgtggcttccatgtctcctgatgcattttccctgagatggtaacacccgtgatggagacgtgctgcagagatgccagaggcagctgtggagtctcccactcatccccaaaacaaaacaccaaacaagacagctgacccaccagagcagaggtcaaaattaaggggcatttcgtctggcacttggccagtatgaagtcgaccatcagggaggggtctctgctccgcagacaggcgttcaggaggccctgcaggagagaacgcagcaggaggtcagcggtttgtgaggacccacaactagtagagtgaaggaactcacaggaagctgacaggaggatccacccacggcgttctgagaaggccacgagaggggctgagggagcatctcaccctgaagaagtgggcagtgatgtcctgtgtcagggcacctccgtgggagcagaagtttctctgcaaaagagttcaaggcaggtaagaaaagcccacaggaagagaggcgagaccaacatgcagagtggctgctgtggattcagttttgagaaaaacactcgctaaggcttggcgtggccaccatggatggtgctcctgggctgaccgggcctggcgccctggctgtgctgtcctgaaacttaacggcttccctgggcggccagatcctgcagcccaccagctctggcccaaacagtcttgtaggctccaggaagaagccagggaggcacaagcagccgcagggaaggggacgcacccggagcgtagaactgtggtgaggacgacactaataccaagggccaaccatcctctggtcccttcactaaccaagtgctgtctatggtgttttcctgtctgtcggctgtcacgtgccaactgagagctttctgaaaaacagccattcataagaattcaaaggagaccatagtgattttctgaaagcttttgctagtctcacgtcctctgctttccttgtcacattttgaagtgctgcacaaggccgggctcacacctgtaatcccagcactttgggaggccaaggcgggtggatcacgaggtcaggagttcaagaccagactgaccaacatggtaaaacgtcatctctactaaaaatacaaaacttagccggtcatggcggcaggcacctgtagtcccagctactcaggaggctgaggcaggagaatcgcttgaacctgggaggcggaggttgcagggtgagccaagatttcactgctgcactccagcctgggcgacagagcaagactctgtctcaaaaaataaataaataaataaataaataaaaatataaaatgctgcacagctggcatggaacctgaattccatctctcacatttgtgcatcttcaaaaacaagaaaaaggccttcgggagcagaagctgctctctgtagagtgggaggggctggtatccgtctccccagctctgaccaactgggtccctacgctgcccgtccccacagcgagtgtcacttctttttatttgagacaagagtttcgctctgtcacccaggctggagtgtagtggtgggatcttggctcagtgcaactctgcctcctgggctcaattactcctcctgacccagcctctcaagtaggtgggagtacaggcgtgcaccaccatacccagctaatttttctattttttgtagaaacagggttttgtcatgttgcccaggctggtctcgaactcctgggctcaagtgatcccccacctttccagagtgctgggattacgggcgtgagccaccgcacccagcctgctggttaagatcaccctgcaactcacgctgggcagtgtctaaaatggaagataactgggctgcctggcaggcaacagcggtagtcagatcaccacaaggctttttttacacatgaagcatgttgagattagaaataaatgaaccgaggtgcgtggcacacaaaatggtctgtacgattccatgtgtcaaaatcattaaaacttgagggaaactaaaggaactcaaacttgggagaaggcaacctacagctggtttggtgatgtgctggtcgccgtcctggctgtgggtggggtcctccctcacatggcattccagacactgttccctatttgactttgaaccctttcctcagtaattcacacggtcagtacacgcatggaggctgcaagagctgctgttagcgccacaggcactgacagatcggacggacacgtgcacacggggcacctaccatctcagagttgaccaagtggaagaactgctcgcatctggcagtgatgggctgttctgcctggaagctgctgccgcagaggacagacgaaggcaggcggaggaggatcctggaaagaaggggctgtattggtggcgacagcacagcgtacactctgctccttcccaagggctcagactctcagagcagcaaccaccaccctgaaacccagggccactgttggaaccagagccttggcctgtgtccctctgtcccatccaaagcctgcactctgagcccacctcccctatactgtgtttggcccactgcattcaaaatgtgttaccaaacaaacaacttttaacagttacataataaccaacaacttctgacagttacacgataaccaagtggatgacgcaccagtctgtctagtgaagcaattccctatgactgtaaaattaaatgactccacgctgcttcttataaatgcagccgccgtgggcatttctgaacacttttccctactttcacaagagctccttctgcgacgtccctccacgtctgagcaggaaggttttgttgttgttgttgagacagagtctcgctctgttgcccaggctggtgtgcaatggcgtgatctcggctcactgaaacctctgcctcccaggttcacaccactctcctgcctcagtctcccgagtagctgggattacaggtgcccgccaccacacctagctaaatttttttgtattttttttgtatttttagtagacatggcgtttcgccatgttggtcaggctggtctcaaactcctgacctcaggtgatccactcacctcagcctcccaaaatgctaggattacaggcatgaaccacctcgcttggctggaaggttttaatcaaaagtactttcaaccctccagatcctcttctccgtggcatgtgccacagaaatggacaggcttggggtggggacacacagacaagtaagtaacgggaaacaaactcactacaaagaacctctaggaccgtcatgagatgctgccctgcccaggtggtgctgccctgcccaggtggtagtaggtgttaccgtttgtacattagcagctccctctgtctctgaaggctggcagccacgctccacccgcttgtcagagcctggagccgtctgcggaaaatctcaaagaggaagtgctcctgggaaggggtgtggccgagaggcactatgaggtcttgctgcagctccaggtcagctaccatctcctgaaaaagagcagtatgctggcacaggaaggcctcggggctcactgcccagccagtcggggacccagacgtcaggggtcagggagaggtctccacagtggacagggcaagaaggaacaagtggggcaagctatttcaattggaaatcactttgaaattgcaaatatagaacagtgcaggccgggtgctgtggctcacgtctgtaatgccagcactttgggaggccgaggcaggcagattccttgagcccaggagttacagtactacttatcaactacttatcaattaagaaaaaacagctgggcgtggtggctcatgcctgtaatcccagcactttgggaggccaaggcaggaggatcacgaggtcaggagatggagaccatcctggctaacatggtgaaaccctgtcgctactaaaaaatacaaaaaaattagctgggcatggtggcgggtgcctgtagtcccagcgactcaggcggctgaggcaggagaatggcgtgaacccgggaggtggagcttgcagtgagcccagatcgcaccactgcacttcagactgggcaacagagtgagactccgtctcaaaaaaaaacaaacaaaaaaaaacagccaggtatggtggctcacgcctgtaatcccagaactttgggaggccaagacagatggattacctgaggtcaggagtccaagaccagcctggccaacaaaattagccatacaaaaattagctgggtgtggtggcaggcgcctgtaatcccagctaatcaggaggcagaggcaggagaatagtttgaacccgggaggtagaggctgcagtgagccaagatcccgccactgcactccagagcaagactctgtctcaaaaacaaacagacaaaacaaaacaaaacaacaacaaaaaaaaacagcaggaggacactcatgtgcccttcacccagattaacctctggctaacattttaccccacacatcatttttgcctcacaagtcttttgttgttgttgttgttgttaggacagtctcagtccggttgcccaggctggagtgcggcagtgcagtcttggcttatggcagccttgactctcgagctcagctgattctcctaagtcagcttcctgagtagctgggactataggtacacaccaccatgcttgactagtgttttgtatttttagtagagatggggtttcaccatgttggccaaactggtcttgagcccctgacctcaagtgatctagccacctcagcctcccaaagtgctgggattacaggcataagccaccgtgcctggccggctgtattttttaaagaagaataaagatcaggtgcagtggctcacgcctgtaatccaacaattttggagaccgagatgggtggttcacttgggcccaggagttcgagacaagcctgggcaacatggcaaaactccgtctctacaaaaaatcagctgggtgtggtggcgcacacaggtgcacgctgtcaggattgcttgagcccaggaagtcaaggctgcagagagatatgatcgcaccactgtactctagcctgggtgacagagcaagaccctgtcccaataataataataattatgattacaattaagaggaaaaagcagatggtctcactgagaaggagccaggtgggtctagggaaagcatctggctaaggagttgggaggccccagagctggcggagggagagacaggggcctggcacagaagacgcacgggtggccagcaccagtaaatgcctgttgactgacagtgaacccacacaggtacatgctgcctacctgtatagacttcaggtgatccaccagcctcggactcccaaagtactgggattacaagcctgagccaacaataaatatcttttttttttttttgagacggagtctcactctgtcgcccgcccaggctggagtgcagtggcacaatctcggctcactgcaagctccgcctcctgggttcatgccattctcctgcctcagcctcccgagtaggtggggctacaggtgcccgccaccacgcccggctaaatttttgtatttttagtagagacggggtctcatcgtgttagccagcatggtctcgatctcctgactgtgtgatccgcctgcctcggcctcccaaagttctgggattacaggcgtgagccaccgcgcctggcaataaatatcttaatagcacgcggcttaaatgaagtgaatgcactgagttgtggcaccctcaaactcacctgcaatctggaaataatatcctcatttcctgtgcggccaccaaagaccaaatcagaattttctgagtggtcataactccttgagctgaaatgaaaatacaataaaatcctcctcagtatcgcctaatagtgctgaagttcccagttctcctcctgcctccggagctgagtgatggctgtgcttctctgacagtgtgaccctcacattagtcaacaataaacaacaaaaactgccacaaaatactaccaaccccaacctaggaaatacaaaaattatgtaccatgaccaaggaggcttatcccaagaatgcaaggatgtgggtggcaagccacccaggcaccaaggcaagagacagaggacacgagctgttccagtataataaaatataaaacaagaatagttataccagatatagatcttagatatgattacatatgaatatcattaatcattagttggtagcaattactttttattccaatattatgataatcctcactcaataatcatagcctaggaaaaaccaggccatacagagataggagctgaggggatatactgaggtgtgaccagaagacaagagtgcgagccttctgttgtgcccggacagggccaccagagggctccttggtctagcggtgatgccagcgtctgggaagacgcccgtcaccaagcggatcgtggtccagcggtagcaaaaggtgtcaaggaacaacacccactacttagcagaccgggaaagggagtctccctttcccccggggagtttagagaagactctgctcctccacctcttgtggagggcctgacatcagtcagactcgcccgcagttatccggaggcctcaccgtctccctgtgatgctgtgcttcagtggtcatgctcctagtccaccttcatgttccatcctgtacacctggctctgccttccagatagcagtagcaaattagtgaaaatactaatagtccctgatatgcagaaataatggcgtaagctgtctttctctctgtctcctctccctctctgcctcagctgccaggcagggacgggccccctgtccagtggacatgtgacccacgtgaccttacctatcattggaggtgactcacattgtttaccctgccccttctgccttgtatccaataagtaacagcgcagcccgacactcggggccactaccggtctccgcgcattggtggtagtggtcccccgggcccagctgccttttctcttatctctgtcttgtgtctttatttctacactctctcatcgccgcacacagggagagacccaccgaccctccggggctggtccctacacaaggatagcttaagatccccaaaccaatataacgcagttatcaataaaataaaaagcaaaaaccgtaagattatctcaatagatgtagaaaaagcacttgacgaaatgtgacatccttttgtgataaaaacactcaatcaaccaggaacaaaggaaatcttctcaatctagtgcctggcatggatgaaaacccacagcaaacgtcagatttaatgaggaaagactgaaagctgttctcctaagatcaggggcaacaaggatgtcctctctacactcagaacagtgtcgctgcctctactcaacactgcactggggacagacacggtggctcacgcctgtaatcccagcactttgggaggccgaggcaggcagatcatctgaggtcaggagatcgagaccatcctggccaatgtggcgaaaccctatctctactaaaaatacaaaaattagacgggcgtgttagcggacgccagtaatcccacctattgggaggctgaggcagcagaattgcctgaacctggaaggcggaggttgcagacagctgagatagtgccactgtactccagcctgggacacacagcgacactctgtctcaaaaacaaacaaacaaaaattagctgggcatggtggcgggtgcctgtaatcccagctactcgggaggctgaggcaggagaatcgcttgaacctgagaggcgaaggtttcggtaagccgagattgcaccactgcactccagcctgggtgacagagcgagactccgtctcagaaaaaaaaaaacaaaacaaaacaacaacaaaaaaaacaacactgcccggggagttcaagccggggcaattcaacaagaaaaagaaaaagcatccagataggaaaggaaaaagtgaaactatctctcttcacatattatatgatctttcttttgtttttttgttttgagactgagtttcactcttgtcgcccaggctggagttgcagtggcatgatctcaactcactgcaacctctgcctcctgagttcaagtgattcttctgcctcagcctcccaagtaacggattacaggagcccaccacgatgcccggctaatttttgtatttttagtagagatggggtttcaccatgttggccaggctggtctccaactcctgacctcatgatccgcccacttcaccctcccaaagtgctgggattacaggcatgagccaccatgcctggccagacacgatcttatatatacaaagccctaaggaatcgatacaaaaacactcttagaactaataaatgactagagccaatgaatatacaagaatcactggtgtttctatacgttagcaacaaatgattcaaaaggaaagaagactcgctatcactgagatggcaatactgccccacatgcagtccgtatcagggtcccagctacttttgtcgaaactgacaagctcatcccaaaattaagacacaactacaaagcacctagaaaagccaaaccatcctgaaaaagaagaaccaagttggaggcctcacacttcccaattttaaaacctactacaaagcttcatcccaatgacgcagtgcatatggacatacagaccaagggaacacaatgagagccagaaacaaaccctcacacgagcagccatctaacttttgacaagggtgccaagaccattcagtggggaaagaagtgttttcaacaaatggtgctgggacaactgcatggccacaagcaacagaataaagctggatgacctcacacaacaattttttttttttttttgagacagtctctcactctgtcgcccaggctggagtgcagtggcacaatctgggctcattgcaacctccgcctcccaggttcaagcaagtctcctgccgcctcagcctcccgagtagctgggattacaggcgcctgccaccatgcctggctagtttttgtatttttttagtttcgccatgttggccaggctggtctcgaactcctgacatcaagtgatctgcccgcctcagcctcccaaagtgctgggattacaggcgtgagccaccgtggctggcccaaaatgttttctgatccatcaaaatgaatcaaaatcctaaagagctaaactaaaaataaatgatctggactttataaaaatttaaaacctttgtgcattaaacgatactatcaagagagtgaaaaaagaattaacagaatgggaaaaaatatttacaaatcatatatttgataagaactttatctaaaatatataaagaactcatacaactcagtaagacaaatacagtcatgaactgctcaatgacaaggatccattctgagaaacacatctttaggtggtttcatcacgtgaacatccaagagcacagacacagaccagagccccccgcacacctaggccacacggcacggcccaccgcacagacacagaccggagccgcccgcacacctaggccacacggcacggcccaccgcgcagaaacagaccagagcccccgcacacctaggccacatggcacggcccaccgctcccaggctataaaccggcatagcatgtaactgtattgcatgccgcaactgtaacacaacagtatttgtgtatctaaacatagaaaaggtacggtaaaaacacagtttaaaaaaaaggtacaaaaaattatggctatgtgggattactgtcatatatgtggctcgttgttaaccagaacattcttatgcagtacatgaatgtgacccagttttcaaatgggctaaggatgtgaacagatttctccaaaaaaaatctaaaatggccaataagaaaatggaaagatgttcaaaatcactacccattagggaagtgcaaatcgaaaccactatcaaatagcacttaatacccactaggatggctaccatcaagtcaggcctggcagaggttcacgcctgtaatcccagcactttgggaggccgaggcgggcagatcacctgaggtcagaagttcaagaccagtctggccaacatggtgaaaccccatctctactacaactacaaaaatttgccaggtatggtggtgcctgtggtcccagctacttgaggggctgaagcaggaggatcacttgagcccaggaggtcgaggctgcagtgggctgcagtcactgtaccccagcctgggtgacaaagaaagacccagtttcaaaataaatataaataagacaaagtaagactatctcaaaaaacaaacaaacaaagtgaatggataaacaaaatatggctgatctttctgttccgcagtgagcagctctgtgcaaacctacccataaaggctggggaagctggaaggctgaagagaggctgaataatccagtttctcagacagaaacgtttaaggacttacagacagaaaccatgtctcaggcagcctagagagacgatgcatccctgcactgttacccccaggcagggcttctataccacagggaaggactattgaagtcaacccctcagggaaaggcaagaatgctctgtgaatctaaccgctggatttatggtggaagatttgcttttttgttttgagatggagtctcactctgtcacacaggctggaatgtagtggtgttttcacagctcattgcaacctctgcctccccggctcatgcaatcccacctcagcctcacgagtagctgggaccataggcacacactaccatgcctggctaatttttttttttgtctagacggtttcaccaggctggtctcgagctcctgagctcagatgatccgcctgccttggcctcccagtgctgagattccaggcatgagccactgcgcccagcctcaaggttgttttgacctaagagtgggatttaaggtaacagcagataaatgggaaatctcaggaggcattcttggagtagggttaacaagaagtcacccacgatggaggtgcgtcagcctccataccttctgtgagcatcagtcagccataagaaggaagggtatgctgatatgtgctacaacacagatgagcctcagaaacattctgctcagccaaagaagccagacacaaagggccacatactacatgattctgttgatattaaacatcccaaacaggcaaatccatgaacataaaatggattcgtggttgccgcaggcaggagacatggggggaagctgcatacacacttgccatctgtactgaatgctgcagctgtaacacaacagtgtgaagctgcaaacaagagcccctggggacaaagcctggacagccccaggtacactccgtccatccttctggcccacatgcaacacctcaggaactgctctgtcctgagaatccctctcagatggagagaggctgtgatgcccaggatctactaggccatttgtgccgtgcttcacacatgctcaccttgaataccaggtgacagaacagaaaaacaacgttgttgctatttttatcttttttttgagacagagtcttgctctgtcgcccagtcggctcactgcaacctctgcctcccaggttcaagcaatcctcctgcctcagcctcccaagtagctgggattacaggcacccgccaccacactcagctaatttttgtatttttagtagagagggaggtttcaccatgtaggccaggctggtctctaactcctgacctgaggtaatccacccacctcagcctcccgaagtgctgggattacaggtgtgagccaccacgcccagcccgaagttgtcgcttctgacaagtctatacacataaagaaacaaccgatgcaggaagcttggctttattttgtattgacatagatttgctatgtgataggctcaagtgtactttgcataccaaaattggactgagagaaaaatgcattcttagaactaccatgattaaaagtaaggcctcatcggtgtgtgatggttaatactgagtgtcaacgtgactggactgaaggatgcaaagcattgatcctgagtgtgtctgtgagggtgttgccaaaggagactgacatttgggtataggctgggaaaggcagacccaccctaagctaattagatgggcaccagcatggccagaaactcccctttatatatatcctattagtcctgtccctccagagaaccctaatacagtgtgtgctgctaacctttggtggaaatccatcagtgcgttgacaagaatggtacacgcagcctgcaggtctccgtcacagccccctgaagccgaggactcagggagaaagtgctcatggatcgcccactggtggaagtcctgcctagaacagcaaacactgctatcaattctgagaaatgcttcgtggccagcggttccccataaccagggaataggcccatagtaagggacacacagcactagtgagagctgggttgagactggcggctcgggaccttggagtagggatgagacctcactgtctgcagggtgggatgcctggggatgtgggaaaggcctggtctcaggagtgacctttgtgaccccaccttccacggatcaaaggccactcaggatgacatcccacggggtaactgctggccacacagcacatgagcttggtgaacagaataggcaagcacaaaaatgtaggctggggcaggtgcagtggctcatgcctgtaatcccagcactttgggaggctcaggcgggcggatcacgaggttaggagatcgagaccatcctgggtaacacggtgaaacctcgtctctactcaaaatacaaaaaattagccgggcgtggtggtgggcgcctgtagtcccagctactcaggaggctgaggcaggagaatggtatgaacctgggaggtggagcttgcagtgagctgagatcatgccactgcactcctgcttgggcaacagagcgagactccgtctaaaaaaaaaaaaaaaaaaaaaaaaaaaaaaagtagcctggaaagtcacctgagggcacctgagctactcacaggcccaccagaaggggatggtgaagcaacctgcatccagactgtggactctgtggatacggatgggaaggggctcaaggagacactgactcaaaactgcagtggctacacctgtaatcccagcactgtgggaggccaaggtgggaggatcacttgagcccaggagtctgacatcagcctgagcaacaaagggagaccccattcctacaaaaaataaaaaaattagctgggcatagtagtgcccacctgtggtcccagctactcaggaggctgaggcaggaggatcactcgagctctggagagggaagctgccgtgagccgtgagtgcatcactgtactccatcctggccaacagagtgagaccctgtctcaaacaaacaaacaaatccgcagtgcacagaaccatcaataccgcaatccatttatgcagaaagagccacaaccaggaaaacgctccacacgaccctgcaaatgtgagtgctagggagtgtgtgctctcctcacactgtccgggactggggtgctccacccacgctgtgcgggacctgggtgctccacccacgctgtgcgggaccggggtgctccacccacgctgtccgggaccggggtgctccacccacgctgtccggaactggggtgctccacccacactgtctggaactggcacagaatgtatctaagtatcacttaagtaattcagaaaagaaagaaaatcccgcaacacatctcaacacaacttccacgcagcggtgacctgatgcagcatgacctcatgcagcagacaagcccctccctctgacctcctccttagactccaccccagagagcagccgggaggagaaacgggggtgagtgaaggaagcgcctgcagagcgggcttggcacgacctgaaccatcagcacgtgttttgccgcaggcagcagcgagttttctttttgtggcccctatgttttccttttcctattacttccattggtttcatccagaatctgataccaggatccaggtgcaggcgacagtgctgcatgtgcctggaaggcccctgatggccggaaggacgaggagcacagggtggctgttgccaaccctctcctgagtctaggtgtggcaggcaccctgaggcccatatacccaccaggatactccatatctgcagtgaccacattcccctctccctgacctccaccctaaactccacacccttaaacccaacggtcctctgggctccctactcctatgcccagaacagcacatctggcctctcaaatagtctcaaatggtctcagtcatcagccctgggactcatgggggttcactgcttcatttacccacttcttggtgcccccaagtcaaggctggcatcactcctcaaagtctgcaccacctgctccacaccagcctctgctcctgcctggtcatttcctctcacacggccctgtctgttatctccagggctcattcctacctttaatccacttctgtatctacctgtgtgttgccagggcctggacacaggtgtacagctcccggacagcagccatagcccagccagggtagggtgaagtctaagtgggtgccttatacgtgccacatctgccctcattgatacaaaggtgccatatgggcaggcttgtttattcccctctatactccctgcttctagaacactctagaattgtctgccacatggtaggagctcagtaaatgtttcttaaataaaggaataacaaccgaaattgggcaacctggccaggcgcggtggctcacgcctgtaatgccagcactttgggaggccaaggcaagtggatcacgaggtcaggagattgagaccaccctggttaacacggtgaaaccccgtctctaccaaaaatacaaaaaattagctgggtatggtggcgggcgcctgtagtcccagctactcgggaggctgagccaggagaatggcgtgaacccgggaggtggaggttgcagtgagccgagatcgcgccactgcattccagcctgggtgacagagcaagactctgtctcagaaaaaaaaaaaaaaaaagaaaaacagaaattgccaccgcgtggaagctttactttcgcttttgctttaataaatcttgccaccgaaaaaaaaaaaattgaaattgtgctcaaagattaacaggtaaaccaaacattaaattgaggataaaatgacgaaacataggctttaaggcaatgtggaaaaccgtgtaacattttaaagggaagctcctttttcttttgagatagggtctcactccgttgcacaggctaaagtgcagtggtgtgatctcagctcgctgcagcctctacctcccaggctcaagcaatgctcctgctcagcttcccaagtggctgtgatgactggaacgtgccgcatgtccggctaatttcttttctattttttgtagaaatggagtttccccatgttgcccaggctgacctcaaactcctggattcaagagatctcctgcctcagcctcccaaagtgctgggattataggtgtgagccatcatgcctggccagggtagctcttttcaacacttaccgttcagtatctgaaagagcatcagcttcaggttgaatttccagctccaggtgtaaccagtcttggtaagttaactgagaaagagagcaagcaattcaatacaatgaggacagaacacacaatccaccgacaggtttataaaccagtttgtcatttcatctcatacgcagtcctccatgtccctgtgttataatgaaattgcagctgagagttccacaggaaagaaaccttagttttatcaagaatgatttcttacaggatttccctagcacaaagatgttagtactgtaatccttctttctaagtataaaacggctattttagtctgggcaacatagtaagacctcatctcatttaaaaattacctgggcacggtggctcatgcctgtaatcccagcactttgggaggctgaggccagcagattgcttgagcctaggagtttgacaccagcctaggcaacatggtgacaccccgtctctacaaaagatttaaaaatcagccaggtgtggtggcacatgtgtgtggtcccagcctcttgggaggctgaggcaggaggatctcttgagcccaggaggtcaaggctgcagtgagtaacagagtgagaactatctataaaaaggaaaaaaaaaaaaaagaaaaaagaaactaacaaaacaacaacattctacagctattcacagtagcataccttcatttatttttggaaacaggttctgttgcccaggctggagtgtgtgcagtggtgcaatcgtagctcgctgcagactctgcctcctgaactccagaattctccccctcagcctctcagatggctgggactgcaggtgcacatcaccatgaccagctaagttttttaaaaacatttttaggaggccgagcacggtggctcatgcctgtaatcccagcactttgggaggccgaggcaggcagatcacgaggtcagcagattgagaccatcctagctaacacggtgaaaccctgtttctactaaaaatacgaaaaaaaaaaaaaaaaagggttgggcgtggtggctcacacctgtaatcccagcactttgggaggccgaggcgggaggatgatgaggtcaggagattgagaccatcctggctaacacagtgaaaccccatctctactaaaaatacaaaaagttagctgggcgcggtggcgtgcacctgtggtcccagctacttgggaggccgagtcaggagaatcccttgaacccagaaggctgaggttgcagtgacccaagattgtgccactgcactccagcctgggcaacagaggaagattccatctccaaaaaaaaaaataataatttaaaaataataaaataatttcacaaaaggcttggcacagtggctcacacttgcaatctcaacatattggcaggccaaagcagaaggatcactttttcctatttttagtagagatggggcttcatcgtgttacccaggatggtctcaatctcctgacatctcagcctcccaaagtgctgggattataggcatgagccactgtgcccagccaccttgaaattcttttctaaagaccaaaacaaccaggcaaacatcctcagaaataaatcagtaccaaggcacactggtgagagcaatgccagctccagtaaccaggcacacatgggtgagcccagagaccctgagtgaccaccacacagcctggcagacatgtttaaaacaagttcccaggggccgagcgcagtggctcacacctgtaatcccagcactttgggaggccaaggcgggcagatcacgaggtcaggaggtcgagaccagcctaacatggtgaaaccccatctctactaaaaatacaaaacttagccaggcgtggtggtgcgcgcctgtagtcccagctacttgggaggctgaggcaggagaatcacttgaaccagagaggcagaggctgcagtgagccaagattgcgccactgtgccccagagtaagactccaccagaaaaaaaaaacaaaacaacaacaacaacaaaaaacaagttctcgggcgcaatggctcacgcctgtaattccagcattttgggaggccaaggcgtgtgggtaatttgaggccaggagtttaagaccagcctggacaacatggtgaaaccccgtctgtactaaagataccaaaattagtcgggcgtggtggcaggcgcctgtagtcccagctactggagaggctgaggcatgagaattgcttgaacccaggaggcagaggctgcagtgagccaagactgcaccactgagcacagcgagacgttgtctcaaaaaatatatcagtaaaaataaaaaaagaagttcgtgttgggagaaactgagaaagtatagcagggtttctctgtatttattaatatatttttttgagacagggtcttgctgtgtcatcctggctggaatagagtggcgtgatcttggctcactgcaacctccacctcctgggctcaagtgatttctcttgcctcagcctcccaagtagctggaaccaaaggtgcacacaactgtgcccagctaatttttgcattctttgtagagatggggtttcactatgttgcccgggctggtcttgaactcctgagttcaggtgatcaacccgccttggcctcccacagtgctgggatcacaggtgtgagcaccgtgcccagtatctgtataatttcttaagagctgcacatgaggccacaacgattttagtcaagattccaatcaaaccatctaagtgctgctgttcttgcctctgaggagacagtcggcacacgcaccctagactcgagacgaggagacagtcggcacacacacaccctagactcgggacgtggcatgatgcaggggaaggaacggtcacctacgtgctgctgttcttgcccgaggagcacacacaaaccctagactcaggacgtggcatgatgcaggagaaggaacggtcacctacgtgaacatcttcctctttcaacacctctcggaaggttctgtgtgtccagagagagagggcagctctctgccagtctgcagaaggaaggtgcaagggtctccaggaaaggctggctacgtcctcctcagaaagaggctgtcgggcctctgagaacaatctgaacatgaggaactgaaactgaaacagagagtgacccggccgtttcttcattgcgcaagtttcactgtgagtggctgagcaaatgctcaggtggaaacagaccatcaacagcccacacacacaaccccacattcagaggacctcagtccagcccctgggagggcgcaatacacgaccccacgttcaggggacctcagtccagcccctgggagggcacaacacacaaccccacgtttaggggacctcagtccagcccttgggagggcacaacacacaaccccacgttcaggggacctcagtccagcccctgggagggcacaacacacaaccccacgttcaggggacctcagtccagcccctggaagggtgcagagcccctcagcgatcatggctgtgcacagtgctccagggaagagcctatgtgcagaccttcctgccatctgactgcttccttgagctaaatgtctggaagcagaattgcaggaacaaaactgcctcccaggggtagggctggtttggtcccgggcagtgaaacagcccatctctaggcctctgccaggaatggcgttcccaccaaaaatgcacaccaactggacaagccagacacactattggtgctgcgtgaccgtgtccatctctgcccccgaggagatgagagcctcccatgtttataaccagcctgctccaaggactgtcgtccctgctcagcatgctgggtgggaaccacgctgccctctcctaagctcaaactccatgttttctttaaaaacttggcaccagggacaaagttcctcagaggaaataactggaaatacgtgcaccctggatcctcaggggctgctcccagattctgacttaatttatctggaaaggggccaggaatctatagtttcaaaagcttctcagttgattctaatgtgaagcctgaagttgaaaaccattatttatttatttttttttttttttgaggtggagtctcgctctgttgcccaggctggagtgcagtggtgcagtctcggctcactgcaacctttgcctccctggttcaagcgattctcctgcctcagcctcccaagtagctgggattacaggcgtgcgccaccacgcctggctaatttttgtatttttagtagagaccaggtttcaccatgttggccaggctggtctcgatctcttgacctcatgatctgcccgcctcggcctcccaaagtgttgggattacaggcatgagccaccacgcccagcctgaaaaccactattttatacacgagacgttcattaaaatcctataaaaggacaacactggtttgcagtgccatttcacctttacttttgacattcagggtttccaatgctcatctttaaattcctttgtctgggccgggcaccagcggctcacgcctgtaatcccagcactttgggaggccaaggcgggtggatcacttgaggtcaggagttcgaaaacagcctggccaacatggtgaaaccctatctctactaaaaaacatacaaaacaattagccgggtatggtggcacgtgcctgtaatcccagcaacttgggaagctaaggcaggagaactgcctgaacccgggaggtggaggttgcagtgggccgagatcgcaccactgcactccagcctgggcgacagagcaagactccatctcaaaaaaaaaaaaaaattcctttgtctgaacaatgtaaggaacatttactagatgagaggaataagaattcttctttccagggaaagatacttattatgaatactgatcttttaattcatctatcctataaatgccaacatctatttcattacaattacagacttgtagttgtcttcatacaacttcactttacactcagagaacacaaggaaaggcagcactcagcagtcaggctgcctaagcagacagcagaggtggccatgacagccagcctgactcaggagctgccccatgacagccagcctgacccaggagctgcccctgagatgggcacaaagcggcagcagacctcggccttccggtccgaaagctgcgtaaacctgaaacgtatggcagaatggaaaaataggaaaagagtgaacctacctttttaataaggcctggagataagcagctgcacaaagtatctcgtgactgggaagaaaacttgcagagagagtaagaaattgctgctgtacaaaatctgaaaacagaaattataacatataaatgtaatccatacaaaataagggatgaaggaaaaagttactttgaatttcataaaactgaatttagtgcattccgaactggatggcctgagcattggtccttcgttttttggttcgtttgttgtgagacagtcttgctctgccgcccaggctggagtgcagtggcaccacctgggctcactgcaatctctgcctcccgggttcaagcgagtctcctgcctcagcctcccaggtagctgggattacaggcatctcccaccatgcccagctgattctgttgtagttgttgttagtgctttttttttgagagggagtcttgctctgttgccaagccggagtagagtggtgcgatttcggctcactgcaccctccacctcccaggttcaagcaattctcctgcctcagtctcccgagtagctgggactacaggtgccagcctccatgcccagctaattttttgtatttttagtagagatggggtttcaccgtgttagcgaggatggtctcgatctcctgacttcgtgctccgcccacctcagcctcccaaaatgctgggcttacaggcatgagtcactgcaaccagtcgagtttttaattttttttagtagagacggggtttccccatgttggacaggctggtctcgaactgctgacctcaagtgatctgcccacctcagccactcaaagtgctgggattacagcgttagccaccgtgcctggcccagccctcggtttattttttgttttatacagggccttactctgatgcccaggctggagtgcagtcgcacaatcacagctcaggggatcacttaaacccagaagttcaagaccagcttgggcaacacagtgagaccccatctctcactagctgggtgtgtgggtgtgcacctgtggtctcagctactgggaggctgaggtgggaagatcacttcagcctgggggacacagtgagacctgtgtcatttactcaacatacatacctacagcaatacccatgtgaaaaattctcacttgtaaccaaggaagctcagaatgagattccatgaggcaatggagatgtcaaagcactgtcatggtgttcttacagttctaatacttctgttttactaatacatatttgagctgggcgtggaggctcacacctgtaatcctaactgaagtgggcagatcacttgaggtcaggagttcaagaccagcctggccaacatggcaaaaccccatctctactaaaaatacataaattagctgggcatggtggtgcacacctgtagtctcagctactcaggaagctgaggcacaagaactgcttgaacccgggaggcggaggttacagtgagccaagatcacgctactgcactccagcctggacgatagagtgagactctgtctcaaaacaaaaaccaaaaaccaaaaaacaaaaaaaaaaacaaaacacacaccaaatatatatttcattctccctttcttatgcaaaaagtagcatctgagaccgagttcagtattttgctttcttcacctggatatatatcctgaggcatctctgtgtttctaagagaggatggccctgtctcccccaagccacctggatgcctccctcctcaccagctcccaacttctccattggctgtgtgcctctcatgccaacacccagtactcagtgtttggggcctggggtgagtggggactgtctggtgtggccaagcgcctaggagggactctgtatccccggagtaccgagtgcctgctccccgaggcccatgtctgaggtgtgggatccgcacagctgccatctgactccctctccttgctccacgtacatttcttgcgcctcttctaagttctctgttattcagaccctgtcataatgtcagatctcccctttcccgcacagggtctccggcaccgcaacagggctctgtcccgacctgggctacctctgcccaagagaccagaagctacaagccaagccccagccagcaactcccaccagagtctcccagccctctgtcctggcttccgcctctgagtggcagctgaagggattctgtcctggcttctgcctgtgcgtggcagctgcagggagcccttgaggcactgagcagaccattcttaaccacagggtccttcctcacctcagcacatggccccatctgctgagccctagagaaacagcccgaggtgtacacactgggaagctactcaccatggggtgccgaagaacctgaccagagggagctggtccaaccaagggccagacaagggaccaagacaaaacaaagcagctctcaccaggacatcaaagaatgcttaacgatatagacagttactatctactattaatttcagcagtttagtataatatgatctcatttttatgaacaaagaaacaaacgcacgcatattataaacaaatgacagataaaattctggaaggatatataccaaaatgctaaaaagtggttatctttgggtggtatgtctgcatgtctgtctcttctaattttatcaaacgagcatgtgtcacttttcgagagagaggagagaagacgcgactgtggaagaagagctcacttcaggcagaagaacaaggaatccctcgtcctacaggtcaggaggctgtcaaagagcgcagggacaggaaggccagcaccaggtgcaggaggacccacatccacctctgggagcgcagacctggactcacccaggtgcacggccagggcagccaaccccagcacatgtggggcactcaggctcgggccctgcaacgagaatgagggtggcagagcagactgccctcttccaagctggaattttccagggcactgaagacgaattgagaagtagcagcctggccctcagagtgggcccccaagggtggcccccatgaaggagagcctcacctggtgacggagcagctggcagagccgggtgagcactgcagggagcacacgtccacacatggtcctcacgaagagggcagcccagggaccctgcctgcagagacagccgtgaaaccatcagtactagccattcagtcctgcacatccctccaacagctaatccaaccaccagcggccgaagaaagagccaagctgttccccaaaacagtggtctttctggaagacaacccatcttctgcagtgcttcccaacttctgctgcgtcctatttgatgaaactcagcatcgccgcatgctcctgcggagacgagctcatgagtccctggtctgcagacttggcccagcaagaggtggcacccagaggagccccaccactcagggagctgcccgcgccttcacctctccgggggagcgacactggaggcagccatcaggttctgacagaaagacgtcagcaggaggtccacagcctgcagagacacagttctcatgagcgtggtgtcctggggacgggagcagcaggaaggaagccggccagcgctcccgccacagacatcgcaattctgctttgcaaaaagacctccaaaacaggcttgtttggagggcatgttacaatgcaaactggtgcccagggcccccattccccaatcttgggaatagcagccctcaagtaatcgccaatcacaaaattctacagcagcaggcgggactggcaaaccttgtgtgtaaggggccagaaaaatattttaggttttggggccagaaacagcctctgtcgcatattctaaagaggcagtcgagcccaacctggtcaacatgatgaaaccctgtctttactaaaaatacaaaaattagctgggcgtagtggtgtgcacctgtaatcccagctacccaggaagctgaggcaagagaactgcttgaacccaggaggtggaggctgcagtgagccaagatcgtccactccagcctgggcaacagagaagactcagtcaaaaaaaaaaaaaaaaaaagaggccaagtgccgtggcttatgcctataatcccaacactttgggaggctgaggcagacagatcacttgacctcaggacttctagaccagtcgaggcaacacagagaaaccccaactgtacaaaaaatgcagaaattagccgggtgtggtgatgcacgcctgtagtcccagctactcgggaggctgagacaagaggatcacttgagcccaggatgtcaaagctgtagtgagccatgattgcaccactgcactccagcctgggcaacaaagcaagaccctgtctccaaaattaaataaataaataaaatgtaaaaggagctcttcatacacaaacagactgtggcagctgaccctggtacaccgctgcctggccctggaacatctgatacgacactaactgagcaagtcaaacagaaattgagagaaggctccatgcgtctaatgcctctgcctaatggaaaatggtgaagaccccctgctttgttctgagcccctacacctaccatgtgttcccgtggctccagtctcggcgtgttgatgctgagctgaatctttgatatctcaacgctgctgtcatcctcattgtggcccaggacagccctcagtctttcagaaatcactgccacctgtgccgatataactgcgaaggaagaaactagttagggatgacaagaaccccgaaaggagggatacagctgcggcctagagagctccgcctcccgtcaagtacgattccacggatcctgctgactgcacacatcccccagccaggtgctgaacaccagtgtttgttcgccccgcaggatttgcagccttgtggtgcagcatgtgtcatggcaaatggggccagacgccatccactaccttttcctgattggctgagagggggacatgttcattcaccaacatgaacctccccatctgaaatcccatgccagccctccagacaccacatctgcctaagcgcatgccagaggttccatgttggcccagggaaatgggccacacatagcccaactacatcatttaaaggtgaaaaccgctttgcttttagaaacaggactcacctgacatgtatcaacctcttgcttaagcactggaacttttcctccatgtcccccatgtaccacattctgcacaagccatcattgaatcaccggaaggctgcactcaggaactggcgcacttggtctgagtgaagaccgccaaggcgctgcagccccagctagcgctaaccaagctgtgttaacattgcctccatgcggagcttgcagtgagctgagatcacgccactgcactccagcctgggtgacagagcaagactccgtctcaaaaaaatatatatatatcacctccatgtaggccaggcacggtggctcacactgaaatcccagcactttgggaggccaacacaggtggatcacctgaggtcaggatttcaaaaccagcctggccaacatggtgaaaccccatctctactaaaaaatacaaaaaattagccagacatggaggcagtcacctgtaatcctagcaacttgggaggctgaggcgggagaattgcttgaacccaggaggcggaggttgcagtgagccgagatggcgccactgcactccagcctgggggacagagtgagactctgtctcaaaaaaaaaaaagaaaaaagaaactgcatgttctcaatccacagatgaacatttcttactctggattttacagaaaaccatcacatggaagcaggatcacagggcagagaccctgtgtgtctgatgtgacatcgactccggcaggcaggatgagcgggaaaacaggcatcctagtcacgcgttttcttctctatcatcattcgtcctactcagatgcaactagccgaatattcaccttctgccaagggtctgtgacagcttcagtaggactagccttccaccttgtctcaaaaaaggttccacacccgccagcccggggtcaatctttaaactactggactactaggaagacacaccagcctgatgtcactatggggaaaatggcccagccacagagctccaaccacaggctgcacacatgagacacagcatgagctcccatccatcctcaccatcacgctggctggggtctgtcatggaggctctcagctctcccagtgcagctgtgagctgtcccaggggctcctcagcagagttgggttctgccctcactcccagggctgcatctgtgagaagaaggaagaaaccagatggaaagacactcaacaggactcttcactgcaaaaatagaaacttcacacagtcaaatacagagctgtgaacttccaagctgctgtgtgtggcagacggagggactgggagtctctgaggaggtaaatgaggtgtcttccctgatgctggatgccacatcgaaaattacaattataaacgagtttcataaaaaattacatttataaacaagtttaagaaaaaaagcggttctgtgtgcaccatcaataccactccaccaccgtgagaagcatacacacggaagaaaacaaggaggatcgagggctggcgagggtggggacaggatcacggataggtgaccatttagtcccctggttcctcaaacttttttttttttttttttgagatggactcttgctctgtcaccacgctggagtgcagtggtgcgatctcggctcactgtaacctccgcctcccgggttcaaatcatcctgcctcagcctcccgagtagctgggactacaggcacgcaccaccacatccagctaattttttgtatttttagtagagacgggatttcaccacgttggccaagatggtctcgatctcctgacctcatgatttgcccgccttggcctctcaaagtgctgggattacgggcatgagccactgcgcccagccaccactttcaatataaaaaggaagatacgctgcatatgtttttaaagtaaaaaaccttcaagttctggggttgctggagaagacacaagcatgaaaatgcactgctatgcacagccacagccaaaatgaaaccagaaatcacaggctctagaaatcataggctctaggagtctgtgcataagcctcatcagacaaatgattagaaaccattctggaagccaccaaaagctacgaacaagtggaccccaggggaaggaggatcctgggggaaggaggacacctctcaagagaagcaaacgcctcacaccgcagggtacacagccctgaggcccctgtggcatccccagcacaactgagaggtcatgctctcagggtgggtcggccgggcatgggggctcccacctgtaatcccagcactgtgggaggccgaggcgggtggatcacgaggtcaggagattgagaccattctggctaacacggtgaaaccctgtctctactaaaaacacaaaaaattagccgggtgtggtggcgggcgcctgtagtcccagccactcgggaggctgaggcaggagaatggcatgaacctgggaggcggagcttacagcgagctgagattgcgccactgcactccagcctgggcaacagagcgagactctgtctcaaaaaaaaaaaaaaaaaaaaaaaaatctcaacgagcctccctggccctgcaggtggaaggggatctagaagagcacacaaggggctgggtacggttgctcatgcctgtaatcccagcactttgaaaggccgaggcaggcggatcagttgaggtcaggagttcgagaccagcttgtccaacatggcgaaaccccatctctactaaaaatacaaaaactagcaaggcgtagtagtgcgtgcctataatcccagctattacagaggctgaggcaggagaactgcttgaacccagggggcagaggtttcagcgagccaaaatcgcgccactgcagtccacagccacagagcgagactctgtctcaaaaaaaaaaagcccacagggaagcagcagcctcagatctatgtcttcagctcatagcggctcccacagggagatgctggcttctactggagataaagccacacacttcaagaaaaaccagcctcatgatggcatctcccactgctgcctgagtgcagcctttcacggattcccaatgagggcgtaggtctgaccgacagctgcaccactgctccccacaggccaaaagagcctgacttctactcctacctgcactgtgcaacagaaaagtgctgcatgacactccctacgacaggctcgagccagcgctgtgggccccaaggtggccgctgagagagcacccgagtctgaagcctgtacaaacacctcagtgcggcccacaggaagatgacgagtgacaaagtggggctgtgcactgcacacactcctttccggaaggtgctaagtgattcttcaggacccccaggtaagagtctgtgccacagctggcactgggcgtcagcatggtgggcggaccctgtacccaaagcaccggcttgagctggcacagccacccccgagctcactcgggtggtgtagcacaacagacactcaaggttaggaaaatggaaaagcacaagtcccagagtggacaagcggcccaggaacttaccttctggcttctcttcagcagcagagcaggcctggcagtaggtggagtacagagatggggggattttatctgctctggatcacaggaaaacaatacaattaagtcagctatggcttaaattaattcaagattacaatccccaaatctattataaaataaaaacatattaaatttaaataaattataaatactgtgtacagtatgagcctgtttttacaaaaaaatattaaaaaatatatatagatttaaaaagcactgtttcaaaatatatcatattaatcatatattaatatctaaggagctagaccacaaaataccaccagtgattatccctgggcagtgaaattataaattatttctatttctctcatacaatttttggtaatttccaaattcaaaacacgaatctttgtttttcttttttttttttttttttttttttttgagacagagtctcccactatcacccacactggagtgcagtggtgcgatctcggctcactgcaacctccgcctcccaggttcaagcaattctcctgcctcaccctcccgagtaggtgggattacaggcgcctgccaccaggcccagctaattttttgtatttttagtagagacggagtttcaccatgttcaccaggctggcctcgaactcgtgaccttgtgattcacctgcctcagcctcccaaagtgctgggattacaggcgtgagccaccacgcccagcaaaacatgaatctttgttaattttaatgattaatactaagaaaaacgtttagttcgtgtcattaaaaatatgcaaaattgggccaggcgcggtggatcccgcctgtaatcccagcactttgggaggccgaggcaggcagatcaggaggtcaggagattgagaccatcctggctaacacagtgaaaccctgtgtctactaaaaatacaaaaacaaaattagccgggcgtggtggcgggcgcctgcagtctcagctacttggtaggctgaggtgggagaatggcatgaacccagaaggtggagcttgcagtgagccgagattgcgccactgcactgcagactggctgacaaaccgagactccgactcaaaaaataaattaaagaaaaaaaaataaaacgcattagttcatgctaaaaatccttagcaaattagtaagagggaactttcttaacatgataaagggtaagccaggtacagtggctcatatttgtaatcccagcactttgggaagttgaagcaggaggattatttgaggccaagagagagagaagcctgggcaacacagcgaaaatccgtgtcctcaaagcatttacaaaatggctgggtgtggtggagcgcgcctctagacccagctacttgggaggcagagggggaaggattgttgaaacccaggaggtcaaggctggccaggtgtggtggatcgcgcctctagaccctgctacttgggaggcggagggggaaggattgttgaagcccaggagatcaaggctggctgggtgtggtggagcacgcctctagacccagctacttgggaggcggagagggaaggactgttgaagcccaggaggtcaaggctgtagtaagccatgactgcaccgctgcattccagcctgggtgacagagtgggaccctgtctcaaaacaaatgaaagtaaggatcccagagaataaacttattttaagatttaaaaaattatttttgcagagcatggtggctcacgcttgtaatcccagcactttgggaggccgaggtgggtggatcacaagatcaggagtttgagaccagtctggccaacatagtgaaaccctgtctctactaaaaatacaaaaaaagaaaaaaaaaaggctctttgtgtttatcttcttacaggtcccagaactttataaattttgctggaatataggacttatactttcctatttcttccaaagttggttgataccaaccaactttcttactagaaacctgcaatgtaagtgatccaaggataccttattattctaaacaataacttccaggtctactctcaagttctgcagcatgaggctttcccagagctctttcattttccttcagttctcctctctgcacaatcattatgtactgaaacattttctttcactgaagaatgatgcagccgggtgcggtagctcacgcctataatcccagcactttgggaggccgaggtgggcagatcgcttgagcccaggagttcaagaccagcctgactaacatggtgaaaccccgtctctactaaaaatacaaaaattagccgggcgtggtggtgcgcgcctgtaatcccagctactcaggaggctgaggcaggagaattccttgaacccaggaggtggagggtgcagtgagccaagatcgcaccactgcactccagcctgggcaacagagtgagacttcatctcaaaaaaaaaaaaaaaaaaaggccaggagcggtggctcacatctgtaatcccagcactctgtgaggatgaggtgggtagatcatcttctgagctcaggagtttgagaaccgcctggccaatatggcaaaaccctgtctgtactaaaaatacaaaaattagcagggcgtggtggtgcatacctataatcccagctactcaggaggctgaggcaggacaattgctccaacccaggaggcagagcttgcagtgagccaagattgtgcaattgcactccagcctgggcaacagagcgagactccatctaaaaaaaaaaaaaaaaaaaaacttagccaggcacaggcttgtaatcccagctactcaggaggctgaagcaagagaatcgcttgaacctaagatgtggaggttgcagtgagccaagatctcgcctctgcactccaagcctgggtgacagagtgagactccaactaaaaaaaaaaaaaaaaaaaaaaaaaaaaaagtaaccaaccaattttggagccaatattttaccaataaaacacaatagtggtctaacaaatttctctacagaagatccacaattcttcgcattgtcagaagaaacctggaagtagtcatccccttctaaccgttgctgcatacctcttcagagactctataaacgccacacgggagtcagggactttggggagctgtgggaagagaagagacctgtgagagactgacaaggaaagtccttgctttctacacaactggtcacaaactcatggagacgcatactgaccactcgaggtgtgagcagggcggggaggaagtgggacacgtagtaaggcctcctgaatatgctgcaacacagagaagcagacagtgcatcagtcagagcagcgagaaggcaattcccacagacggtgaccggtgtttcagagagtggactgcgagggctcactccaaagccacgatgcattatgaagtcttcttgtgcacagttccgggacaaggcatgtgtagggcaggccgtgctagcccagccctgagtccgtgggaatcaggaccacattcggcctgctccctgggcttgaacgtggagcctggatcaatctgaggccacgaggaccatgtaaggtccatttggggcaatttccttggagctaaatttcaaaaccctgggagctgcaatcagctcatccacatgtgtaaccaccagaattcaagatgttttgagatcataccaaattcaataaagctgtgctattcagctctctgttactgactccatattggtcacaaagaaggcattgataaaaaaaaaaacatcatggccccactgccttccctcccagtgcaagctccccaatcagcagttcctgttggctgcttcagcacgggaggggcatcacctgcttttacagaggaaaaaatgtttcacagcaaatgcacagctcttgacctcaccccgtatcccttaacggcaggatcctcgattcacagccctgactcctgtctctctctgaatagacagtggccaacctgccccatgtggctctgggcagaaatgggacacactccaaagagccccagacgctggcaggcatcagagcggagtctgcacaccctgcaggcatcagagcagagtctgcacatactgcaggcatcagagcgcggtctgcacacactgcagctgctagaggccttttcggcagcccagcctacctggcctccatgacggtgactgggatgttccccgtatgctcaaacaccatgatggccttttcaacatcctgaagagcttggctgtggggctggttcccatacagggaggaaaggaaaaagaacagaggactttaaagaaaagactgagcagtgaaggccacactcaacctgtgcttccttgttgaaaggctctgtacacattaaaggtaaaggcccacatgctgtgcgcacagcaggggccctggagcactccaaaatgtcccaaaataccagcacgacaggggaggatgacactgccacctccacacacacaaggttcagaccccgtgatgtgcggccctcctcgagagctcagctctgctgagagcctgccgtgagcctctttcctgcctccaggaaagagttgaaagtaaagatttctaggtgggaaggagtagagacttaatttttgagattaaaagaaattacgagggctgggtgccatgactcatgtctataaacgcagtgctttgagaggctaagcggggcagactgcttaagcccaaggagttcaagcccggcctgggcaacatgatgacatctcatctctaaaaaaatacaaaaacattagccaggtgtagaggcatgagccagtggtcccagctactcaggacgtggaggtggaaggattgcctgtgcccaggaaatcatggctccagtaagccatcatcatgctaccctactgcagcctgggcaacaggggaagtccctgcatcaaaaaaaaaaaaaaacattctgaggccaggcgcggcagctcacatctgtaatcccagcattttggggggccaaggcggaaggatcacttgagcccaggagtttaagaccagtctcggccacacagggagaccctatgtctgcaaaaaattttagaaaccagccaggcatggtggcgcacacttgtactcccagttactcaggaggtcaaggtgagaagatcgtttcaacctaggagtttgaggctgcactgaactgtgatcacggtactatacttcagcctggtcaacagaacaacatcccacctcaaaaaaaaaaaaaaagtaatttataaacagcaataaattataaatggaaaattatattaaatattttcacctaacactttaatgtcacctataagtgttcttcagtaactcgtaactttaaaataaaaaggtcttaaaaagtaaagaatggagggccaggcgcagtggctcacgcctgtaatcccagcactttgagagaccgaggcagacggatcacgaggtcaggagaccgagaccatcctggctaacacggtgaaaccccatctctactaaaaacacacaaaattagcctgacgtggtggcgggtgcctgtagtcccagctactcgggaggctgaggcaggagaatggcatgaacccggaaggcggagcttgcagtgagctgagactgcgccactgcactccagcctgggcaatagaacgagactccattccaaaaaaaaaaaaaaaaaaaaaaacaatacgctgggcacagtggctcatgcctgtaatcccaggactttgggaggccaaggcgggcagatcacgaggtcaggagattgagaccatcctggataacatggtgaaaccccatctctactaaaaaaatacaaaaaaattagctgggtgtggtggcaggtgcctgtagtctgagctactggagaggctgaggcaggagaatggtgtgaacccgggaggcggagcttgcagtaagctgagatcgcaccactgcactccagccagggcgacagagcgagactccgtctcaaaaaaaaaaaaaaaagtaaaaagtaaagaatgttttcattaggccggccatggtggctcacgcctgtaatcccagcactttgagaggccgagacgggcggatcacgaggtcaggagatcgagaccatactggctaacgtggtgaaacctcatctctactaaaaatatacaaaaaattagccaggcgtggtggcaggcatctgtaggcccactataggctactcgggaggctgaggcaggagaatggcgtgaacccaggaggcagagcttgcagtgagccgagactgcgccactgcactccagcctgggcgacagagcgagactccatctcaaaaaaaaaaaagaatgttttcattagtgacccacacatatcacatgaccatctgacatttggctgctataaaaacagttaacacttggccaggagcagtggctcacacctataatcccagcactttgggaggccaaggcgggcagatcacgaggtcaagagatcgagatcatcctggctaacacggtgaaacctcgtctctactaaaaaaaattaaaaaattagccaggcgtggtggcgggcgcctgtaatcccagcactttgagaggccaaggcgggcggatcacaaggtcaggagattgagaccattctggctaacatggcgaaaccctgactctattaaaaatacaaaaaaattagccaggcgtggtggcggctcctgtagtcccagctactctggaggctgaggcaggagaatggcgtgaacccaggaggcagaggttgcagtgagccgagattgcgccactgcactcaagcctggtgacagaccaagactgcatctccaaaaaaaaaaaaaaagttaacacttttctgtgattcagagaaaaacatgacgaaccacctctccattcaaccccacaggaaccaagatctcccaaaaggacaaatgtcctgcagcctgaggcacttcactctgccacacagtaaccctttccctgccaatgctggggacacacaaggtgggacacagcaacacagaggcccgcagagcctcgcccccagctgcgcccgaggcaagaccagacatgagactgggaaggctgaaaaactcaactcaagagtcaaaagaaactggacctttgcatggtgggcgtgactggctgagaccctgcagggctcaagcaacattacctcagtaatgtccccagctgatgacaaatcctcgtagagtcccatgttttctatagaaaccttcagggaagacacagaatgagaacaagaaaacaaagcagtttctgctgggacaggtgtgaggagtgggcatggagggacagcttgccttgaggtcggccagccgtgtcttggccaatgagatgtagtctgtgaggagggagcggtacttgccgggaaccaggggtgggtggagaatgtgcacctgaggatagatagcagagcgcagcaccgttagtctgggaactgcctgggactccagggaggccacaattcacttccaacatccacagtgctgagtagagaaacacagccctttacagtcagacttatgagtatgcaaagcaaaccattagtaaaattaaaacacaagccgggcgcagcggcttacacctgtaatcccagcactttgggaggctgaggcgggcagatcacgaggtcaggagatggagaccatcctggctaacatggtgaaaccctgtctctactaaaaatacaaaaaaattagccgggcgcggtggtgggcaccagtagtcccagctactcgggagactgaggcaggagaatggcgggaacccaggaggcggaccttgcagtgagccgagatcgcgccactgcactccagcctgggtgacacagtgagacttcatttccaaaaaaaaaaacaacaaaaaaaaaacacaatagaaggctgcttccccaggtgaaaaatcaagaaaccctaatgtagctggtcctgcaagtccagggcggctcactgggggaaccagggatgtgcaatcctagcagcggcagcaggaaccggccccggccgcctgcagctccatgcctttgacttcctggtcaaaggggacagaggggacacagcgtgtttttttcttttgagagggagttttgctcttattgcccaggctggagtgcaatggtgcagtctcggctcactgcaacctccgcctcccgggttcaagcaactctcctgcctcagcctcctgagtagctaggactacgcgcgcgctaccacgcccggctaattttgtattttcagtagacagggggtttctccacattggtcaggctggtctcgaactcctgacctcaagtgatctgccctcctcagcctccaaaagtgctgggttacaggtgtgagccaccacgcccggccaattttcttaaaagatgagggtcaggctgggcacagtggctcacacctgtaatcccagaactttgggaggccaaggcggaaggatcacttgagctcagttcaaggccagcctgggcaacacagcaagaccccatctgtactaaaaaaaagaaaaaaagaaaaaacagccaggtttgctggcatgcgcctgtagtcccaactactcaggacgctgaggtgggagaactgcttgacctgggaggtctaggctacagtgagctatgatggcaacactgcactctagcctaggcaacagagtgagactgtctcaaaaaaaaaaacccaaaaaaacaaaaaaacaaaaaaaaaacccacatgaaattaaaaaaaaaaaaaaaaaagcaaacatgagatcctaaaaccctcactgcagtacaactcgctcttcctgcgtaactgggtgctgagaacgtctctccacgtcaccactcagacctgctcactgttttgagggagactgaacagtgacataatatatctacccacctccttggcctaggtgagaaaagggtttcttagcagttgccttgactggcacacacgcactcactgtgtgtccacgtggacacctccagttgcaatgtttgtgttgtttcaccataaacggcttggggaaggggaaggggaaggggaagggcctggctgagaggctcagagcagatctgcaggaggctcttggggaggccaaggcagtcctcagatgcagcaggtgagcgaagcaccagaaatcatggatgtggcagccagcttctcacctgcaggtaccggggagactcaaaaggcacgagttctgacaagaacgtaaacaggaagaccagggccttcttgctgcagccatggtagcctcgtgtgctcccaaaggaggcctgtgtggagagaagagcgtgaagcccaggacagccaggcgcggctgcaccacctaggcagtgtcctgtgtggagagaagagcgtgaagcccaggacagccaggcgcagctgcaccacctaggcagtgtcctgtgtggagagaagagtgtgaagcccacctaggcagtgtccgggcggctgctgtagtcggcctcctaaacagaaaggaaaaaagagaaacaccaaaaagtcatgtggttcatacatttacagatgtcacgactgcgctttgactgaagagatatctaaaagttattcgaagaaaaacagttaaaaatcattagctataacaaacactaactatgggatccttttgggatccttaggggtacaatttgctaaatgccctaagaagtgtttgtgcacagcaaacaaattgattttgtgggatgaagccacttctgaacacactttaacttctaacctcatccaccagtggacagatcactgcaagagaggtgggtaaggaacacaggccaaggagggccacccctcagacaatgaagctgcaagaccctagcagagcaagcgaggaacatgagcaaaccctcccaggaacgaagggggctgcagcaaagtcctgggggctgcagtgagtcagggaaggaaggagattttaaatgggcatggccctgaacgcatcatagtgaacctgcagacagaatgtgggcctctgtgaacactgaaccgcttacctgcaaaaccagacgagctcctgccaccctagccccacttgagaccacaggacatcctggtgaaacctcagcaagttaccatctatcaggaaacctgaactccaacgtgaactgaaggctcaccttggtctttctgaaagcgtgcaaaattgtgttttgtttttttttttttggagacagagtcttgctctgtcacccaggctggagtgcagtggtgccatcttggctcactgcaacgtccgcccacccaggtttgaacaattctcctgcctccctagtagctgagattacaggcatttgctaccactcccagctatttttttttttttttttttgagagagagagtctcactctgtcatccaggctggagtgcaacggtgcaatcagggctcactgcaacctctgcctcccgggttcaagtgattctcccacctctgcctcccaagtagctgggactacaagcacgtgccaccaagcccggttttttttttccttttttctgagacaaagcctcactctgtcacccaggctggagcgcagtggcgtaatctcggcttaccgtaacctccgcctcccaggttcaaacgattctcctgcctcagcctcctgagtagctgggattacaggtgtgcaccaccatgcctggctaattttgtgtttttagtagagacagggtttcatcgtgttggccaggctactcttgaactcctgacctcaggtgataccttggcctcccaaagtgctgggattacagacatgagccaccacgtctgacctagctaatttttgtctttttagtagagatgaggttttgccatgttggccaggctggtctcaaactcctgacctcaagtgatccacctgcctcggccttccaaagtgctgggattacaggcatgaactatcacacctgaccatgtgtagattcttttgaatgttatcatcatgcagacagacccaaaaagccattagataaaaagcggaaaatgctgataacgcttgtcaaatgtctctgagagggacagagtcacggaaaaacaaagctcagagacatgaactgtctgtgccaaataccaggaaagcagctcaatacttgtcagttaaaaatttaaataaaacctgagaccactcaagggttcccttctcaaaacatcagcacccagtttcaacctgaaattctcccgccaagcacaccatgtcttatcaccctccattcagccatccacaacacaactgctcctgtctcttggcaacgttcactcaattaacagtgagccagatgatcactggccgcagcaggaacagtccagacccgtcgccaaaggcatttctgtaaagcatctaagtgacacgcgcaagccagacctggggtcacagcagccattgttagagttgctgagataaaaggcagttctgtttgctatttttgaaaaaattacacttaatggctgggtgcagtggctcaatccggtaattccaacactttgggaggttgaggcaggaagatcacttcagcccaggaggtcaagaccagccaggacggccgggcgcggtggctagcgcctgtgatcccaacactttgggaggctgaggcgggcagatcacgagttcaggagatcgagaccatcctggctaacccggtgaaaccctgtctctactaaaaatacaaaaaattagccgtgtgtggtggcaggcgcctgtagtcccagctactcaggaggctgtggcaggagaatggcgtgaacccgggaggtggttaccgtgagccaaggtcgcaccactgcactccagcctgggcaacaagagcgaactccatcttaaaaaaacaaaaagaccagccagggcaacatagtgagacactatgtccacaaaaaattttttaataattagccaggtgtggtgacatacacctgcggactcagctgctcgggaagttgaggtgggaggatcatttgagcctggaaggttgagactgcagtgagccatgatcacaccaccacatcccagcctgggagacagaacagagaccttgcctcaaaaaaacaaacaaaaaaaccccacaaattacatttaactacataatgtgatatgctgagaattatattaattaccccaaagggctcaaattcacgatcatttggtctacttatattaacatttcctaaaagtaaaaaaaaaaaattttttttttgagacggggtcttgctccattgcccaggctggagtgcagtggtctgatcttggctcactgcaacctgcgcgttccgggttcaaggaattctcctgcctcggccttctgagtagctgggattacaggcacctgccaccataccagctaaattttgtatttttggtagagatagggttttgccacgttgcccagggtggtcttgaactactgggctcaagcaatcggcccacctcgtcctcccacagtgctggtatttgccctcaaaagtaaaaattaaaacagatgttcaggccaagtgcgttggctcatgcctgtaatcccagcactttgggaggctaagtggggcggatgacaaactcaagagatcgagaccatcctggccaacatggtgagaccccatctctaccaaaattacaaaaattagccaggtgtggtggcaggcacctgtagtcccagctactcaggaggctgaaacaggagaatcgcttgaacccaggaggtgggagttgcactccagcctggtgacagacggggactccatctcaaaaacaaaacaaaacataacaaaaacagatgttcaaacactgaatatgcatatatacatttatcaaaactcatctaactatctggacatggtggctcatgcctgtaattccagtacttcgggggttaaggtgcggggatcgcatgaggccaggaatctgagaccagcctgagcaacacggtatgacattgtatttacaaaaaaattttttttaattagctgggtgtggtggcacacacctatagtcccagttactctggaagcggaggcaggaggactgcttgaccccaggaggtaaaggctgcagtgagctatgatcatgccactgcactccagcctgggcaacactcagtctcttaaaagaaaacacaaacagaaaaaaacaaaaaacctcatttaatggtacacttaaattggatacctttcattatttcatttaaactatattttgataaagttgatttgaaaaggtaaaagaaaagcaaacaaaaccaaaacaccaccaccaacacagcacttcagagtattcctctcccaactgtcgcctctggaaccgaagaaaaagcagcccagggagacacctgagccgcggctcggggagacccatcaactcctgacccaagagcaccaggtggattctggcacaaatctctcagcgcctcactaaaaggacagaacaaacacctctcctcttagtttagtggaagccccaggctaactgggcagagctggggagagcctgagggcaggtgagaaggaactttaaggaatagaagtgagttgacactgacactgcaccagtcaccaccttctcccaacacaagcagatgcggctcagcctcctgtgcagcctcagctcctcagaaggcctggggggggagcaggcaccgcagccacgatggcgatgcaggcaccgcagcccttgaaaatttcagggagctgagactcctacaaagaggcaactacttcaccgaggtggtgatggcaggaaaactcaatacttttttttttttttttttttttgagacagagtcttgctctgtctcccaggctggagcgtagtaatgcaatcccagctcaatgcagcctcaacctcctcggcttaagtaatcatcctgcctcagccggtaagtagccaggaccacaggtgcttaccaccacacccagctaattgttacattctgtagagaccggggtctcactgtgctgcccaggctgatcttgaacccctgggctcaagcaatcctcctgcctaggcctcccaaactgctgagattacaggcatgagccactgtacctggcccgaacccaaaacttctacaaaaattagctcttcaaatggaaactttactcacaagcactaaaagagaaaccatggcggtccttcaaagctgatatctcaaatacacccaactccccacatgaactgggggttttcacaggggttgcccagggatccctgaggtctcaggagctcagactcagtagtctcaaatgggccctggatctttatttccaaagccccctccaggcgagtctaatgcccacttaggttcaggaacagctgcataaacttctgtcagagagcacactgtgtgtgttccaaagaaaaaggaagaatatgtgatacggctgaagaaatgaagtacttgtttcaggacttacgtgaaaattagagacgcaaggctgggcacggtggctcatgcctgtaatccctgcactttgggaggccgagggaggcggaccacttaaggtcaggattttgagaccagcctgaccaacatgatgaaaccctgtctctactaaaaattagccaggtgtggtggcgaacgcctgtaaccccagctactcgggaggcggaggcaggagaattgcttgaacccaggaggaggaggttgcagtgagccgaggtcgcaccagtgcactccagtatgagtgatagaatgagactccacctcaaaaaaataaataagtaaataaataaaataaataaataaataaataaaaaggaaaggccaggtgcgctggctcatgcctgtaatcccagcactttgggaggacaagacgggcggatcatgaggtcaggagttagagaccagcctgaccaacatggtgaaaccccgtctctactaaaaatacaaaaatgaactgggtatggtagtgcacacctgtaatcccagctactcaggaggctgaggcaggagaatagcttgaaacggggcagcggagtttgcagtgagccgagaaggtgagctttctgtaccactgcactctagcctgggcgacagaggaagactccatctcaaaaaaaaaaaaagggaaaataagagacattgtatactctgcaaaaagcagcatccacttctgtgtcccctctttcctgatttcactcattttcttttttttctttttgggatggagtctccttctgtcacccaggctggcgtacagtggtgcaatcacagctcactgcagccttgatctcccaggctcaagtaatccttgcgtctcagcctcccgagtaacgaggactacaggtgtctgccaccacacctgcgtagtttttgttttgtgtgtgtgtgtgtgtgtttttttttttttttttttttttttggtggagatgaggtttcactatggtgtccaggcttgatttcgctaattttcttataaaagacagcaggaggctccgtcaactaagtgagacagaaaccaggggaaggagctgaggccccgacagggagaacccaggctcctcggaacatgcagaggaagatccgctgaggccccgacagggagaacccaggctcctcggcacacgcagaggaagatctgccaaggccactcggcaaagctgacagcaaggttgctcactcacatgacagagaatcaggtggggacagcatggtccccactcccaggccttctgggaagatcaggtattaggtagccgattggcaggtcacttaccttgaaccagtctgcatatgacaggaacgcagaggggccctccagtgctgcctggcgcacaaccaggaacgcagtgaccatgctgtccagctggcagctctcgaatgcctgggccatcaaacgcgccacccagtctagttaagaaccatgacatagtcacagcaaggcaagggcagccagcaggaacatgacgtgagttatgctgggtgatcaagtattccagaaggagactgtgcacacccaaacaccaagttttaaaagactacacagcaattacagcatgtcaagtgcaaaccactagagacctgaatgaagcagcagtggacactctggcctctcagagcagcagtcagtgcttatggaagcgtctgacaaagaatgttccatcgacaggaggcactgcaggttccgggcaggtagggaagggcttcactgagaggctcacccacagtcagctgggactctgctgacacccccctacacacactcttgaccagcaccaccgggctcgcgtaaaagctcaccttcaagcagctgctgcgcttctggaaagcagacaaccagggcagacacaaaggagagcactctctgccagtgaacctcctgcgtttccagaacttcttgcaaatggccaaccaactcctctgcactcagcatcacaaagagctgaaataaaagcatccgctcccttcaatatccaagcaaaccaatgtgcgacagatgacccctcaccttcctcccagccggtggccaccgcagccccctcacttcccactgcaaaggtaacacatggagctgtgacagctcacaccgtggcgtctctcccctcacagtggccagcacctgcttggagagaattctccctatctcaaggaggaggggctcggcccaagggacaagttcagtctcctgacctgagtggtggccttgatgaggacagccacatctcaccagacatccctgaacctctcgatgtgccgtccacggcaggcagcatgacaagtactaggcagatcttaatccccccgccacgagctcagaagcaggtataataccacatccactcaccctgcggtacagtgaggtgagcagagggtgtgtccgcgcaaagctccactctctctgcatctgaacagcatcagatgctgcagggggagaaacagacaaaaacttcaagtcagagatcaaaaagttgtgggtttttgttaaggaccagccccacagggtcggtgggtctctccccgtgtgcggcgacgagagagtgtagaaagaaagatacaagacaaagagataaaagacaagacagctgggcccgggggaccactaccatcaatgcgcggagaccggtagtggccctgaatgtctggttgtgctgttatttattggatacaaagcaaaaggggcagggtaaagagtgtgagtcatctccaatgataggtaaggtcacgtgtccactggatagggggcccttccctgcctggaagccgaggcagagagggagaggagatagagacaaagacagcttatgccattatttctgcatatcagagacttttagtactttcactaatttactactgctatctagaaggcagagccaggtgtacaggatggaacatgaaggtggactaggagcgtgaccactgaagcacagcatcacagggagacggttaggcctccggataactgtgggtgagcctgactgatgtcaggccctccacaagaggtggaggagcagagtcttctctaaactcccggggggaaagggagagtccctttcccggtctaagtagtgagtggtgttccttgacaccttttgctaccgctggaccacgatccgcttggtgacgggcgtcttcccagacgctgccgtcaccgctagaccaaggagccctctggtggccctgtccgggcataacagaaggctcacactcttgtcttatggtcacttctcaccatgtcccctcagctcctgtctctgtatggcctggcttttcctaggttatgattatagagcgaggattattataatattgcaataaacagtaattactaccaactaatgattaatgatattcatatgtaatcatatctaagatctatatctggtataactattcttgttttatattttattatactagaacagctcgtgtcctcggtctcttgccttggtgcctgggtggcttgccgcccacaggttttgtttttggacagggtctcactatcacccaggctggagtgcagtgctcaccacagcctcgacctccctggctcaagcaatccacctgcctcagtctcccaagtagctgcgaccacaggcgtgtgccaccatacccagatactttttgtatttttatttttttgatgctgagtctcactctgtcacccaggctggagtgcagtggtacaatctcggctcactgcaagctctgcctctcgggttcaagcgattctcctgcctcagcctcccgagtagctgggactacaggcgcccaccaccacgcccggctaatttttgtattttttagtagagatggggtttcactcttttggccaggctggtctcgaacttctgacctcgtgacctgcccgtctcagcctcccaaaatgctgggattacaggcgtgagccactgctcctggccaaaaagttgtgtttcaaagcttcagtgtgaagacagatcttaatatgtactttttcagttattaaagttcaccatctccctgtttgttgcctatttgctatatcatcaattctgtttctcaggcccggttacttacttgtaatgctttgtcatattcacaataaatattttccaatgtaccaactgcatttcaattttcctgcttttaaactgtcagtaaggtcaggctaggtggctcacgcctgtaatcccaccactttgggaggccgaagtgggtggatcacaaggtcaggagttctagaccagcctggccaagatggtgaaaccctgtctctactcaaaatacaaaaagtagctgggcatggtggcaggcgcctgtaattcaagcttggcagggaatagcttgaacccaggcggcagaggttgcagtgagctgagatcgcaccaccacactccagcctgggcaacagagtaagactctgtctcaaaaaaataaataaatacataaaataagataaactgggaataaaccaatcatggtggggatgctgttcaaaggaagctcagctcagtcaagtgatgataaactcctgagcacctcacagcacctgttgggagccatctgtgtatccctcatctcccaccagtttcctgcctgagcatctaccctggggatatgctagatacagaaaaagctcaaagtgttcatcgtggccttattcgtaagactgatatcttgggtacagtctgtcatacatgggtaacaggacacccactgggcagacgatgcctgggccatcaaacacgccaccgagtctagctgagaaccatgacacagtcacagcaaggcaagggtagccagcagaaagataacgtgagttgtgctgggtgatcaggtattccagaaggagaatgtgcatgctcaaacaccaagttttaaaagactagacagcggctgggcacagcggcacacgcctgtaatcccagtattttgggaggccgagacgggcggattacctgagattaggagttcgagaccagcctggccaacatggtgaaagcccgtctctactaaaaatacaaaaattagccgggcatggtggcacatgcccgtaatcccagctactgtggaggctgaggcaggagaatggtttgaacccgggaggtggaggttgcagtgagcccaaatcacgccactgtactccaacctggcaacagagcaagactccatctccaataaataaataaataaataaataaataaataaataaataaaataaagatatttctattttacgctgggtgcggtggctcacacctgtaatcccaacacttcgacactctgggaagccaaggcaggtggagcaccgaaggtcaggagttcgaggccagcctggccaacatggtgaaacccagtctctactaaaaatacaaaaaattaaccgggtgtggtggttggcgcctgtagtcccagctacttgagaggctgagacacgagaattgcttgaacctgggaggcagaggttgcagtgagctgagatcacgccactgcactccagcatgggcaagtgagtgagactctgactcaaacaaacaaacaaaaaagatatttctattttaatgacaattattttgtccactcataattctgaattttcttataaaaatctgttgctttcaggtaaaaggatatttagtaacaatctcaggcatctgaggacccagtctctggttcaagacagacgtaaaagaggtcctagaattcctggcatctccagtcagcgttaccaaggcaacaaggcaacagcaatccccaaaatgggtagcaactgagcagcctccacactgggcctacctttcagcacagggctgtgagtgagtatctgagtcagggtatgactgaagaacctcttcagaggatctgtggaaattacactgccaagcgtgtgtccactgaacactccgaacctgccaatgcagcagaaagaggggtcaggaaagggagggtgccttgcacgccacccaccaatcccagcacaaactgtggctcaggctcatcccttctttaagcaaggaaggggctttcttggccaggccactataaccacagacttgaaactgaatccaaggaggtggcagttcaacgagaaagggggcaaggcaacggcgaaacccacggagcagagaagcgaaggagcagaaggaaacaggtggggaagggcaggccgcgccacacccgggagtggagcagaaggaaacaggttgggaagggcaggccgcgccgcacccgggagtggagccccgggagccaacccgacggggcctcagcggcaccctctgtgacacggaactcccccagagggtcgtgccaagcctgagagaagagcccagcacaccagggcctcaaacagtcacaacagggactgaggccagctctgtccatgaagatgaggaaggaatggaagggactaaggtttcctgggccatctgtgtgagagaacacgatgttctgggggtgaatggggtcacagagccaggtggcaagagcacttgaggtctgttagcctgccacatcccagcaggcctatacagaccaccaaaccaaacccagaccctctcgtgaggcttacaacctgcaaccagcaagcggcactttatgccgattccccaggtaagaaaatcaagggtccagccgggcacggtggctcatgcctgtaatcccagcactctgggaggctgaggcgggcagatcacaaggtcaggagatcaagactaccctggctaacatggtgaaaccccatctacactaaaaataccaaaatattaggccaggcgcattggctcacacctgtaatcccagcactttgggaggccaaggggggcagatgacaaggtcaggagctcgagaccatcccggccaacccaacgaaaccccatctctactaaaaaaatagaaaaaattagccgggcatggtggtgggcacctgtagttccagctactcgggagactgaggcaggagaatggtgtgaacccagggagcggagcttgcagtgagcagagatcgcaccactgcactccagcatgggcgacagagcgaaattctgtctcaaaaaaagaaaaataaaaaaaattagccaggcatggtggcacacacctatagtcccagctatgtgggaggctgaggcaggagaatcgcttgaacccaggaggcataggttgtagtaaaccgagatcgtgccactgcactccagcctgggcgacacagtgagactctgtctcaaaaaaataaagaaagaaagaaagaaaatcaagggtcctggcggttcagtgaactgccccagggtcacacacccaacgaggccacgtcggctctgtgcaaactcaagacactcacacaacagggtgtgggacatcgtggagattcacttctcagccctgctgtccttcctcacagggcagggctttgggacaccacagcccccagtgtgcaagggaagctggccaccaagactgttggaggatgtctgattttaaattattggcaggccaggtgcggtggctcacgcctgtaatcccagtactttgggaggctgaggtgggtgttatcacttgaggtcaggagttcgagaccagcctgaccaatatagtgaaaccccatgtctacttaaaaatagaaaatacaaaactataggcttgtgccaggtgtggtggtgcatgcctgtaatcccagctactcaggaggctgaggcagaagaattgattgaacctgggaggcagaggttgcagtgagcagagatctcaccactgcactccagcctgggcaacaagaataaaactctgtctcaaaaataaataaataaataaataattggcaactaattacaaaatataaaaatcggcaggtcagtggttgttacctgactctcaggacatcagtgtgagtaatcttatcacacagattataaaaaaaagcccttgccacagactaaactgtatccccacaaagttcctctgttgaagcccagcctctcaaggtggggtgttgataaggctgaggtgatgatgagatgactgcccggagaagacaccagagggcttgctctcccctctctacctcatgaagacacagaaaaagtaggtctcctgcaagccaggaagagggtcctcaccagaacccaaccctaggggcaccctgacctccaacttccagcctccactgctgtgagaacacatctgccgtccacaccgcagtctctggcactttgttacagcagcccaagctaactgatgcacatgtaaacattcaggaaatcacacagtgctttattcactgtttcagtaaaagtaccgaacggtacaacacatttaattgagcagttaaacagttactgtgagggatgggaaatgaggagcaaaataaagaatgaaaaggttgacaaggcctggaaacagtggcaaattctactggtttctcaagacttcacttcaaggtcccctgcccacactagagggaagcaaaccccagagccccatttccaccaaaccccgatgtccaccttccacccagcccccactcctcagcttccgcctcccgacctgtaagggtctccgcacatctccacagagccatggagagaaaaagctaatagggccaagctttgcctactggtgaatctgagcaggatctgtggaggccaggcagcgggagtctgtagaggcacagctacagtgtgttctagaaatgtggggggctgagaggcagggccagctctagagcctgaatcacacccagggaaggaggagcaaggggagactccacacaggaggaggtcacagtgagtgggacaaacattggtgcaggacttccagaggcggaacaggatactgcagtgggcgcaccttccgacctcatcctcacaggaaaaggctgaccagagcgttccccgggctttcccatggtcgcctcctcctcacgcacgttatcgtaactggcagaggaagtgtgctcaggagcgggctgctgaagctctggaagtgtttaaaatatcttggctctttaatttggcagacacctccctgctgcacactcaggcaggccaccctcaggaacataccagcacctcacgatcttgtgagtggaggactcctcctgtactccagcagccaaagcgtcaagtgcaactgaagacagagccaggaacagaaaacagatgtcagcacacggcggcagcccaccagaaacaatccccaggcgctttcagacaacagatccacttcaaccccccagagggcccacatccatcaagacttctacaatctgtaggccttaatcaaaacacacagacaagaaaatgcttccctgtgacccacagattcatgaggtatcccttcacagctctgaaaatgccaaaacaagggcattccagtaccaggactctgcacagtgaaacatacagaggagaaatacctcaaatggaaaggcagaaaactgatacaattgctaataagcaaactaagtcatttacagtctgggctgcagtgcaattaacttacaaatcagcattctctgcagtacatcaaccgtgacctgtcaaaatagaatgtgagttaccatcttggtaatcttctgtaatttgtgtgatacctgcatcacacaagagaattattacttgttactctaaagtaaagaaacggcacttcaggaggccgaggcgggcggatcacgaggtcaggagatcgagaccatcctggctaacatggtgaaaccccgtctctactaaaaatacaaaaaattagccgggcgcagtggcggacgccctgtagtctcagctactcgggaggctgaggcaggagaatggcgtgaacccgggaggcagagcttccagtgagctgagatagtgccactgcagtccggcccgggcgaaagagccagactccgtctcggaaaaaagaaaaagaaatggactttacaaagagatcaactttaaaaaccctcatagacctagaaattactccagtaccgaagggacctagacagagtgaaaaggctgaactttctggaattaccctaagactgctctcagcatggcctgaggccatgagcctagggctgggcaggacacttttgcacgcagagttttgctgaagtacttcagtgaagagaggaaagctcaggccttgaatctgggctgtggaactaaggactttcacccttgatgcctctggagccagaagacggtgagaaggtaccattgtccatttcccttcttcacatctcctgggcttaaagcataccactactcagagagcaactcatggtaacaataaaacagacttcctcaaacaaagcccacagactgcagtgtaggcaaaatgggagccactggctcaggaacctccaaaagggaataaaaatttgggacgtatccaaaactatctacagattcaatgcaatccctatcaaaataccaataacgttcttcccagaaatagaaaaaaagattctaaaattcacatggaaccaaaatagaacacagataagcaaagcaatcctgaggaaaaagaacaaagctatagaatatagaaatcacactgcctgaggtcaaaatatactacgaggctacagaaatgaaaacagcatgaggttgatataaacatacacacagaccaacggaacaggatagagaacccagaaacaggccgggaactgtggcccacgcctgtaatcccagcactttcggaagtcgaggtgggtggatcacctgaggtcaggagttctagaccagcctgaccaacaaggtgaaaccctgtctctactaaaaatacaaaaaaattagctaggtgcggtggcgggtgtctatagtcccagctactcgggagactgaggcaggagaatagcttgaacccggtaggcggagcttgcagtgaaccaagatggcaccactgcactccagcctgggagacagagcaagactccatctcaaaaaaaaaaaaaagaaaaaagaaaaaaaaaggccaggcacggtagcccacgcctataatcccaacactttgagaggccaaggtgggcgggtcatgagatcagaagttcgagaccagcctgaccaacactgtgaaagcccatctctactaaaaatagaaaaactagccgggagtggtggtgggcgcctgtagtcccagctattcaggaggctgaggcaggagaatggcgtgaaccccggaggcggagcttgcagtgagccgagatcgcgccactgcactccagcccgggcgacagagcaagactctgtctcaaaaaaaaaaaaaaaaaagccaatgtcactaatcatcagggaaatacaagtcaaagccacaatgagctattatttcactccagttagaattatcattatcaagaaaacaaaaaataacaaatgctggtgagaatgcaaacagaactcttatatgctatcagtgagaatgtaaattaatacagccattatggaaaatagtatggagatttctaaatagttgggtagttctaaaaacagaactaccagcccagagggtctcactttcaccaggcatggtggatcacatctgtaatcccagcacttcaggaggccaaggcaggcagatcatgaggtcaagagatcgagaccatcctagccaacagagtgaaacctcacctctactaaaaatacaaaaattagctgggcatggtggtgcatgcctgtaatcccagctattcgggaggctgaggcaggagaatcggttgaacctgggaggcagaggttgcagtgagccgaaatcgcgccactgcactctagcctgagcaacagagagagacaccgtctcaaaaaaacacaaaaaaacaaaaaaaaaaccagaactgccatatgatccagcaatcccattactgggcttacagccaaaggaaaggaaatcagccagctgaagagacatctgtactcctacatttattgtggcactattaacaatagccaagatatgaaatcaacctgtgtgcccaacaagagatgaccggatacagaaaacgtggtatatacacacaacggaatactggtcagctttaacggagtctcgctctgtcacccaggctagagtgcaaggcgcaatcttggctcactgcaacctccgcctcctgggttcaagcaattctcctgcctccacgcctgtagctgggactacaggcatgtgccaccacgcccggctattttttttttttttttactagagacagggtttcaccatgttggtcaggctggtcttgaactcctgacctcaggggatccaccagtctcagcctcccaaagtgctggattataggcatgagccattgagcccaacctcagctatttttttctttttctgagatggagtctctgtcgcctaggctggaatacagtgacacgatctgggctcactgcaagctccgcctccaggtttcacgccattctcctgcctcagcctcctgagtggctgggtccacaggtgcctgccaccaggcccggctaattttttctatttttttagtagagacgggattttaccatgttagccaggatggtctcgatctcctgaccttgtgatccgcccgcctcgtcctcccaaagtgctgggattacaggcatgagccaccatgcccggccagctattctttttttttaaagtgaaatcctgtcattcacagcaacaggaatgcaactgaaggccattatgttaagtgaaataagccaggcacagaaggacaaatattgcatgttatcacaaatatgtgggagctaaaaagtggctcttgtggaggtagagagtagaacgagagataccagagatgagaagggtatatgcagtgggggaacgaagagagttggttaatgggtacaaacatacagctagacagaagaagtaagttctaatgttccacagcagagtgaggcggctatagttaacaacagattgtatatttcaaagtaactgcaacatgtgaaatgttgccaacacacagaaatgatacatactggaggtgacggagactctaaacaccctgacttgatcattacactctatgcacaaaacaagtatcacatgtaccccgtaaataggtacaaacagcacgtttcaatagagagacacgtaaatacatttcaacacttggaataaggacggctccttccgctaaactcttcacttgacttttcctcctacctgcggcattttttcaggctccacagttcttctcagatctgagtttttctgaaatcccctcaaaacaaacatttgaacaaaatctgaaaaaccataaaaccaaagttatttatggacatcatggtctccaagcaactgtgaatggcacagaccatccacttcagaggggcgggtgagcatatggcttgggcccaccaggacccctgtgagctgctcctaacctgaggaacgctgcagaagttactgctcacctgaccacagctacactagcgttcaccaaacccaatcaggacccttagatgaaccagattttttcctcttgcacttctatttgaaagggaacaagtttatagtcagatttttttctttttttttttttttgtgagacggaggcttgctctgtcgcctgggcttgagtgcaatggtatgatctcgctcactgcaacctccgcctcccaggttcaagcaattctctgcctcagcctcaccagtagctgggaatataggcgccgccaccacacccagctaatttttgtatttttagtagagatggggtttcaccatcttggccaggttggtcttgaactcctgacctcatgatccacctgccttggcctcccaaagtgctgggattactggcatgagtcaccccacccagcccaatttttttctcttaaataaaagtggtttccaagggaggtcttatggattgtcttgcctgccaatctccaataccagagggtctagagggacccagaagcatcctattctgaggaatgtgatgggggaggaaaggcattcttagctttttaaaaaataagaccaagaggactgaaatccacaagattttctaactttgatttaaatttaacctatctggtaccaggttatagtagctcaggaatgctaagtcgctcatgccaccaaaaagctttaggaaaaaggaaaaaacccacaagctactgtacagatcagtttctcatctaatttttatttgtaggtgtcacttgtagtgggatgggtctcccagcaggtgttcctcagaacccaaatatcccagagaggatctgagaactcaccaaggaaaagagtctcatcactcaaacacagcaggcaaagagccagaaaacgagcttcaatgcaccttagagacaggtggtggggcggttctctagagctgtcctgccgccgtccaggagtgcgctgaatataagtcctgacaaacccaactactcctcaagctggattggtccaagccattctctgacaagcccaactactcctcaagctggactctggtccgagccatcctctgacaagcccaactactcctcaagctggactctggtccaagccatcttctgacaaacccaactactcctcaaactgggttggtccctagtctgagccatcctctggtctctcagcaccttcttagtttgtggggggacattacagtcccaagtttttctcataatatcattcctcaggaaggccaggcatagtggctcacgcctataatcccagcactttgggaggccgaggggggtgcatcacgaggtcaggagttcaagagcagcctggccaacctaatgaaaccccgtctctactaaaaatacaaaaaaaaaattagccgggcatggtgccacgtgcctgcagtcccagctactaaggaggttgaggcagagaatcacttgaacccaggaggcggaggttgcagtgagctgagatcgcgccactgtactccagcctgggcgacagaaggaagcagctgcggtcactctatgggaaaggtgaatggaaacacttaaactcatgtcaaggccgacttactagtatttccacatcagtcaagtaaaatgcaaccccacaacaggctgagactgggagtctgtcatgccaggttcccacggccacggagagacaggctgttctgcctcgcagagctcttgagagcagaaggcattatcacagatcaaaatgagttttacccaagaacccgcatcttgtcatgaacgcaccagaaagcatggccctggcgacgtcagcatgctggcaggatgcttccatctgttcacaaaggcagcacagattcctgaagagccacgatcccacagcatgcatgtcgggatggctggagacacacacagaggcagacgtaaggctcaactaaatcccatcatcaggggattgagttgagccatatgtcccaattttttttttgagacagttttttgctgtcactgaggctggagtgcagtggcgcaatcagtcactgcaccctcgacctcccaggctcaagcaatccttccacctcagcctcctgagtagttgggacaacaggcgcataccaccacgcccagctggaggtcttactactttgcccaggctggactcaaactcccgggctcaaaacaatctcccaccttgccctcccaaagtgctgggatgactggtgtggcactgtgcccagtctcaagttattttctaatttcccttgtgacttctttgactcattatgttaactttcaaatattgtggattttcccaattcccttctgttgtttattctaattaaattcatttgtggttagagaacatattttgaatgatttcagcccttctaaatttattcctctttgttttatggcctgaaccttttttttttctcttgaaacagttttgctcttgtcatccaggctggagtgcaatggcacaatctcagctcactacaacctccgcctcccaagttcaagcgattctcctgcctcagcctccacaacggctgggattacaggcacctgccaccttgcccagctaatttttgtaattttagtagagacagggtttcaccacgttggacaggctggtcttgaactcctgacctcaggtgatctgcccgcctcagcctcccaaagtgctgggattacaggtgtgagccaccgcacctggccttggcctgaaccttatgctgtatcctggggactgttccatttggacttacgaatacacactctgctactactgggtagagtgctccacagtcagtcaggtcagctggtttgcagcattcaacttctatatcattcttttttttttttttttttttaattgatcattcttgggtgtttctcgcagagggggatttggcagggtcataggacaatggtggagggaaggtcagcagataaacaagtgaacaaaggtctctggttttcctaggcagaggaccctgaggccttctgcagtgtttgtgtccctgggtacttgagattagggagtggtgatgactcttaacgagcatgctgccttcaagcatctgtttaacaaagcatatcttgcaccgcccttaatccatttaaccctgagtggacacagcacatgtttcagagagcacagggttgggggcaaggtcacagatcaacaggatcccaaggcagaagaatttctcttagtacagaacaaaatgaaaagtctcccgtgtctacttctttctacacagacacagcaaccatctgatttcgcaatcttttccccacccttcccccctttgtattccataaaaccgccattgtcatcatggcccgttctcaatgagctgttgggtacacctcccagacggggtggtggccgggtagaggggctcctcacttcccagtatgggcggccgggcagaggcgcccctcacctcctggacagggcggctggccgggcggggggctgactcccccacctccctcccggacggggcggctgttctatatcattcttaatctaacttgttctacccattactgaaaggggagtattgaaacctctaatgattattgctgaaatgtctacttctccctttaattctggccatttttgcttcatagattttggtgctgagataagatgtgtatatcctaggaagcaggtttttctttttttttttttttttgagatgaaattctgctctaggccgaggcgggaggatcacaagatcaggagttcgagaccagcctagccaacatggtgaaaccccatctctactaaacatacaaaaattagccgggtgtggtggcacgcgcctgtagtcccagctactgaggaggcaggggcagaattgcttgaatccgggaagcggaggttgcagcgagcccagatctcaccactgcactccagcctggcgacatagcaggtctctgtctcaaaaagaaaaaaaaaggccgcgcgaggtggctcatgcctgtaatcccagcactttgggaggccgaggcaggggaatcacctgaggttaggagtttgacaccagcctggctaacatggcgaaaccacatctctactaaaaataacaaaaattgccaggcacagtggttcatgcctgtaatcccagcgctttgggaggcagaggcgggcagatcctgaagtcaggagatggagcccatcctggctaacatggtgaaacccagtctctactaaaaatacaaaaattagccaggcgtggtggcggacgcctgtagtcccagctactcgggaagctgaggcaggagaatggcgtgaacccgggaggtggagcctgcagtgagccgacatcacgtcactgcactccagcctgggtgacagaacgagactctgtccctaaaaaaaataaatacataacaaaaattagctgcgtgtggtggcgggcgcctgtaatcccagcgacttgggaggctgaggcaggagaattgcttgaaccctggaggtggaggttgtagtgagctgaaatcgtgccactgcactcccacctgggccacagagcgagactccgtctcaaaaaaaaaacagacaaaaagcaaacaaaaccaaaacaccataaacgttctcttgaaataataaagcaatagttcctccaggtctagtctagtataaatatgcaatgcaatctagtctagtacaaattatatgtcaaagccagaaatcaaacccgtctgattctgggctttgaaatataatttatactagactagactgcaaaaacagtaacactgaatcatcattagcacgctacctttccagcagctcttgcaggctcacaatgccttgtacgtgaagatgccacaccgcttcaagcaacaaagaactctgaaaaacaaaacaaaacaaacaaaaacaaaaacaaaaaaacccccagcattctgagtcctttatgaatgcattttcctacaaaatgttcaacttaggttcttaaccatgccgtattgaaaattaacctcaagcaaaaacttagagcctgaaacacatctttttttacaaagctgtactggttttcaaactccctggcctttgggcacccacacaccgttgcccaacacttgcttctcttccttctctcttcctacgcactgtagcctacttctaaccctttctccacactacagccaacacagtattacacacactgacatgacagtctctccttcagaagccttcactggctcctcgaagctgccaggacaaaggtcaggcttcagtgtgccctgtgcatgtcccttgtctttctcactcaaccctctcccatttgataaaacaggatctgctttagccactcactgtgaacactgtgcctgtcacactgccctgatctccctgcagcctccccttctcatccccctaactcacactctatttttttttttttgagacagagtcgcgctctgtcacccaggctggagtgcagtggcgccatctcgggtcactgtaagctctgcctcccgggttcacgccattctcctgcctcagcctcctgagtagctgggactacaggtgcctgccaccacacccggctaattttttctattttttagtagagacggggtttcaccgtgttagccaggatgggctcgatctcctgacctcatgatccacctgcctcggcctcccaaagtgctgggattacaggtgtgagccactgggcccggcccctaactcgcactcttcacagtccgtgcaggaaggctttcctaactctccaatctgatatgcatgtccaacatcttcttcgcaaatctgtgagcacatgaatcatcgcacttcttgtggatttagtggcttgtttcccaagctacgtgataatgagggcagggaccaaagcaataactgaaaaatctaatgaattctataatgtatgctggataaaagaatgggaaaggccggacgcagtggctcacacctgtaatcccagcacttgggaggccaagatgggcagatcacctgaggtcaggaattgaagaccagcctggccaacatggtgaaacctcatctctactaaagatacaaaaattgggcagggcgcggtgactcacacctgtaatcccggcactttgggaggccgaggtgggcagatcatctgaggtcaggagtttgagaccagcctgaccaacatggagaaaccccgtctctactaaaaatacaaaaaaaattagccaggcatggtggcgcatgcctgtaatcccagctactcgggaggctgaggcgggagaatggcgtgaacccgggaggcggacgttgcgataagccaagatagcaccattgcactccagcctgggcaacaagagcaaaactccatctcaaaaaaaaaaaaagatacaaaaattaactgggcatggtggcacgcgcctgtaatcccagctactaaggtggctgaggcaggacaatcgcttgaacctgggaggcagacgttgcagtgagccaagattgcgccactgcactccagcctgggcggcagagcaatattctgtctcaaaaataaaaataaatgccaggcgcggtggctcacacttgtaatcccagcactttgggaggccgaggtgggcagatcacgaggtcaggagatcgagaccatcctggctaacacggtgaaaccccgtctctgctaaaaaatacaaaaaattagctgggcgtggtggcagtcacctgtagtcccagctactcgggaggctgaggcaggagaatggcgtgaacctgggaggtggggcttgcagtgagccaagatcacgccactgcactccagcctgtgcgacagagcgagacttcgtctcaaaaaaaaaaaaaaaagaccagcctgggcaacaaggcgagaccctgtctctggaaaaaaaaattacatacatttttttttaatagtttactatactaccctggaaaattctccatactaatatacccaaggctaaacgtgtttttcaatatattctagtctaataaatattactaatgataggtgaatagggacaaaaaatggcaattgaaggtacttctttccaatccacagatgatttctaaaccctttttcatccactctctgtaattaatgagaagcttggagaattcccaagaaaacccaggtactctgttgcctccatccagatcaacagaacattgcctggaacactggagagtcagatttgcaatctcaaatttacctgtattttccataattcttgacagaaggaaagacgggagaacatactgtgtgccaataaatactgagcaaactctaacagggaagacagcttcttctgaaaagagagattacattttttaaaaaacaaattacctgaaacaatactaaagctatgtcctattttcccaaccagcttaaaagtaacaacgggcaggtttcctcatctttgctggtgtcttactctctgctccacagtcagcagcacagggtgactggtctccgctggagccgtgcagatctgtcccacgctagaggcaaccatcccggctgagagaatacccacgggaacccccagccttgaggcttgatcctgcaaagcagagccttaaacacaaaacaaaaccatagctttctcttaacacatgagacaaaatctaaaaccaaagacttgctgtttaaaatgccttattttaagatgcagcacaaaaaaaattgccttttaaacggggagaatagatgcaaagggaaaaacatgagataaaaatgagaatttgatgatccaagcagctcacaataaaactggtggcaacacctgaacccagagttatacattggtatttgttacgtttcccatgacacaaaaggagcaagataaagaaatatattctgaccaagaactttatcatctttttacaaaggagcacaataaattgagaactgcagcaggctctttcaattacattgtttttctaattacttcagagataagcctgcccctgttgactcacattgatggttgtgataaaattaggcagggatttcccaacattctgccatgcacctggtgggcaggtgcagtcacagctgtgctcagtccgcaggccaccaagtggaacctcactaacagcctgcaggcagccaccattctcctgagcaaccagccactggtctgcattcaataaagtgagaaacggtgggcaacctggaagcaggcaatgccaagaaatcattttctaatttatttgtcttccaaaattaatttttttttgttttatttttttgcaatggtgtcttacactgccgcctggactgaagtgcaacggcgccatctcagctcactgcaacctccgcctctcaggttcaagcgattctcctgcctcagcctcccaagtagctgggattacaggcacgcgtcactacgcccagttaattttttgtatttttagtagagatggggtttcactatgttggctaggctcgtctccaattcccaacctcattaatccgcccgcctcggcctcccatactgctgggattacaggtgtgagccaccacgtgagccaaaattaattgtttaaagaaaccgggccgggcacggtggctcacgcctgtaatcccagcactttgggaggccgaggcgggcggattacaaggtcaggagatcgagaccatcctggctaacacggtgaaaccctgtctctactaaagacacaaaaacaaaattagccaggtttggtgacgggagcctgtagtcccagctactcaggaggctgaggcgaagaatggcgtgaacccaggaggcggagtttgcagtgagccgagatcacgccactacactgcagtctgggcgacagagccagacttcatctcaaaaaaacaaaacaaaaaaaaactggaggccaggctcagtgggtccctcctgtaatcccagcactttgggaggccgaggcgggtggatcacctgaggtcgggagtttgagaccagcctgaccaacatggtgaaaccctatctctactaaaaatacaaaattagccaggcgtggtggtgcatgcctgtaataccagctactcaggaggctgaggcaggagaatcactttaactagggaggcagaggttgcggtgagtcgagatcacaccattgcactccagcctgggtaacaagagcaatactccgtctcaaaaaaaaaaaaaaaaaaaaaaaactgttaactgcagtacgaacctgttattgtaatgtactggctctaaaaacacattatcaatacataagtaaaaacatttacaggctggttgcggtggctcatgcctgtaatcccaacactgcaggaggccgaggcgggtcgatcacgaggtcaggagtttgagaccagcctggccaagatggtgaaaccccgcctctactaaaaatacaaaaattagctgggtgcggcggcgggcacctataatcccagctattcgggaggctgaggcaggagaattgcttgaacccaggaggcagagtttgtagtgagccgagatggcgccattgcactccagcctgggcgacagagcaacacttcgtctcaaaaaaaaaaaaaaaaaattttacaatagttctagaagcttaaaattatagtacgagaaatcatcagctgctggtgaaattctcggtagaaaagtagacagatggggcacagtggctcatgcctgcaatcccaacaccttgggtggctgaggtaaactgattgcttgagctcaggagtttgagaccagcctgggcaatatggcaaaaccctgtctctatgaaaaaattagccaggcatggtggcgcacacctgtagtcccagctactcaagatgctggggtgggaggatcacttgaggccaggaggtcaagactgcagtgagccgtgattgcaccacggctctccagtccaggcaacagagtgagaccctgtctgttaaaaaaaaaaaaaaaagtagacaatgccattttctgttctgagacagagttttgctcttattgcccaggctggagtgcaatggaggggtctcggctcaatgcaacctctgcctcccacgttcaagcaattctcctgcctcagcctcctgaatagctgggactacaggcacccaccaccacacccggctaatttttgtgttttttagtagagacagggtttcaccatgttggccaggctcgtctcgaatcctgacctcaggtgatccgcacacctcagcctcccaaagtgctgcgattataggcgtgagccactgtgccaggccaacaatgccaatttctagtcatttgtttccaatgtgtctccataggaaagtttttttatctacaagtcttttactgtgtgtgtgtgtgtgtgtgtgtgtgtccgtgtgcacgtgcgtgcatgtactaactatatctttagcagaaaaaaacaaactcaaaaattaatgaattaaaggtttatctgtgtggctgagcttggttccttggaatgataatatgcaatttgtgaaattcaaatacaatcatggcagtgaaaatctgtatcatttgccaatgacattcagtgaccagttgtcaagggagcgctattactgaaggttattttaacagaaacaagtcatcacataaggacgtgaaggatcagaaaataacttactgttgttgacccagaacttaccctatctcccactctcaaactggggggagaaggaggtacctagaaaattgttctcccgtctgctctcctgggcacaccacagcctgtctcactacttccatgagcaaggggcacatccctgctgttgctatgtcccatgtttttccaagggacactctgggtcctactgcttctgagtcgcaggttgaatcagacgctgtttttaaacacagcatcgtaagaagcccaagagcaagtcacacaaacatcccatagaatttgcgactacacacaccagtggaaacccatcgcctgagaaaatttacatttctacttaatttagcaaactatggttactatataaaaacccttctgcaattcaaaatagagaaaatgaagctataacttacctataaatgaactagaatgattagcataggcctcagaactgtcacagtcaatcactttgctgagagacaattttttacacagtggaccttctacctagaatccaaaacacaacaaactccatttaaaaaattcaagctccaggccaggcgtagtggctcacgcctgtaatcccagtactttgggaggccgagatgggcagatcacgaggtcaagagttcgagaccagcctggccaacatagtgaaaccctgtctctactaaaaatacaaaaattaggagggcatggtggcgcgtgcctgtagtcccagccactcgggaggctgagacgggagaatcacttaaacccgggaggtggaggctgcagtgagccgagatcaccccactgcataccagcccaggctacagtgtgagactttgtctcaaaaaaaataaatgaaaataaaaaataaaaataaaaaaaattcaagatctgtgcataaacacaacctgtgtgtaagtaatgcttccctactgggctattttcctttttttcttttttgagagggagtctcactgtcgtccaggctggagtgcaatggcgggatctcactcacggcgacctccacctcccaggttcaagcgattctcctgcctcagcctcctgagcagctgggattacagacacctgctaccatacccggctaatttttgtattttaagtagtgacggggtttcaccatgttggtcaggctggtctcgaactcctaacctcaagtgatctacccacttcggcctcccaaagggctaggattacaggcgtgagccaccacgcccggctttttttttttttttttttttttttttttttgtgagacagtctcactctgtaatccagactggattgcaaggggcgtgatctcggctcactgcaatttctgcctcccgggtccaggttcaagcaattctcctgcctcaggctcccgagtagctgggattaaaggcgtgcgccaccacacccagctaatttttgtattttcagtagagaccgggtttcactatgttggccaggctggtctcgaactcctgaccctgagtgatccacccgccttggcctccccaaaagctgggattacagccctgagccacggcgcccggcctgtttttttgttgttgttgttttgtttttaataaaagaggcggggtctcaccccgttgcccaggttggtccagaactcccgggctcaggcgaccctcccctctgcgggccaggccaccgcgcccgccgcctcgggtgttttcttaggaaagctgtgcggtggctggactcaaaaaccccgaacctaaatctgcccgcagacggacaccagcttcctcttacctcaagcaaaagggcattcaggtcctgatggcttcgcaggaggcgcacagctgattcctttaatttctgtgccctttcaggattatatttttccctcttgacccttcccgctacggagagaagtcggttcgaaaccatcacagcacaattcacacacggggtccccggcccgacgcgcaggtggacgccgcggagaaacccaccagcgacaccctcccgaagaggggccggggctcctccccagggcgcaggtctcgggaaactaacggagacggccccaccgcggacgccggggaagacggcccaggagggcccgaggcaggggagcccggggacggctggcgaggggcggcctctgcgctgaggggagccccaggccgcgcaccccaggcccgcctgacagggcggccggcgggggcggcgttcgggaaagaagggagcgccccgcgggcggcggctgggggcgtccgcccaggcgcaggaggggccgggtccgaggcagccgcgccgccccagccgggcgcccaccccgcacagccccccgggcgcggcgtccggggatccgaccggcggaggctctggcgggaagggatcggggaaccggcgaaaccgtcccgggccggacgccgcccactcccgcggcctgccgcgcccacctacccagcagctcggcccaggccctccggcggccccctgggtcctggcccgaggcggagttcgggacccacgagtcggacatggccttggcgcctacagccccggcggcggctccctgcgcccgagcccgcgctgccttcctattggctgcggccaggcgcgcacacccgttggctggcggcggccaggccacgcccctcaggtcgaggccttgcgtcgtggccatgttggtcctgggggaggcgcctgcgcgcggtgaggtagtttttgcgtttggctttgccgccgcggtgtagtccgcgggggcgtctcgcgcgggcagactgccgcccctcaagcgtggttcctgccgggaatgactggggttggtcctgaagagaccacctggccaaccaagccgaggcaggctcagagcgccgcggggagcgcaaagccgcgcgcgcctctgagctccgggcagccgctgttcctcccggcggccgaacggtccgcgcgcagggcggtgtttcggcagccggagaccgcgcggtagccgcgcctgtattcccagcgctttgggaggccgaggctggagggtcgcttgagcccaggaattccagactagcctgggcaacagagcgagaccccatcacttttgtttcttttcttttttttttttttcctttttttgagacggagtctccctctgtcgcccaggctggagtgcagtggcgcgatctcggctcactgcaacgtctgcctcctgggttcaggtgattctcctgcctcagcctcccgagtagctgggattgcaggtgcgcgccaccacgcctggatgatttttgttatttttagtagagacagcgtttcgccatgttggcccaggctagtctcgaactccggacctcaggtgatccgcccgcctcggcctcccaaagtgctgggattacaggcgtgagccaccgcacccggctgagaccctatcttttaaccagcctgggcggcagagcgagactctgtctcaaaacaaaaccaaacataagaattcgtaaaagcgagtgcctaggcgaagctaatgtgcctcaaagtcctgggtaagtagaggccctggagacccgtccgcatcctctggcagtggccttggaaccaccgaagggattcagccgaagggccgcgttcccggcaggcgtctttattgtgttgattacgtagatggcgtagatgacgtagatgacgttcagcaccacaaacgaagagccgaggcacagagtggggccttggattcatgagatggggatggagcagaaatgagaattcggagtccatgaaacccccacaaagactcctgcacggcccgactcggacactttgcaatctgctggttgagggggatggtgtgaactcagggaacagcctgagatcgcgccgctgcactccagcctgggcaacagagcaagaccctgtttcaaaaacaaaaaataacactaagcaattaacaggactagactcagaggtgatcgagaaattgaaacaggctggaaatttaaattaactgtgattaatatgtggaggtctcttgtacgaaaggtgaacaatatgcatgaggaggaaactcatcaaattataagaaaggaagaacgctgataacaggtaatttttctgatggggcagcagtaggatcaacacagctgagaaaaataggaattacccacgttggaaaataaagaagaaaaaaagtttttttttaaaaaaagcatccaagaactgtgggaaaatatcaaatgatatcatatgcatgtaataggactcccaaaagaagaagaaagaacaaatcataaaaaatgtttgaagagaaaattaccaataattttcccaaaataatgaaagacctgagctcagagcacacacaaaacttgataaatatgagcccctgcctgacacatgcagtgtattcaaactgtggaaatcagagagaaaaccatgaagatggccggaggaaaaagatacgttaaatacagtaacaaaggtaagaattccagcctgggcaatatggcaagacctcgtctctacaaaaaatacaaaattttttttttgtattttttgtattgcccagtgtggtgacacgagcctgtagtcctgtgggcggagaattacccaggtgccgaggcaagagaccgaaggcacaaactatttcagtataataaaatcgttacaataagaacagtcataatacaaattatggagatgatcatggacaattatcaattattataaacattaatcattagcttttaatattactgtttgttgcattactaatataacctaggaataaccggtgggtatagggtcaggtgctgaaaggacattgtgagaagtgagtggaaggcaagaggtgaaccttctgtcatgcccgcataagggccgcttgagggctccttggtcaagcggtaacgccagtgtctgggaaggcacccgttacttagcagaccatgaaagggagtctcctttgcttggaggagtcagggaacactctgctccaccagcttcttgtgggaggctggatgttatccaggcctgcacgcagtcatccggaggcctaaacccctccctgtggtgcttcactggtcacgctccttgtccactttcatgttcctcccttacttctggttcgtctttgaagttcgtagtagatagcggtagaagaaatagtgaaagtcttaaagtctttgatctttcttataagtgcagagaagaaaatgctgacgtatgctgccttctttctctgcttcacctacctgaaagggaagggcccccatcctgtaatcacgtgacatgcttcaccttgtcaatcacttagaagattcaccttccttacgctgcccccttgtcatgtatgcaatagatatcaaagagcctagccgttcggggccgctaccagtctccgcgtcttgatggtagtggtccccggggcccagctgttttctctttatttcttggtcttgtgtctttatttattacaatctctcttctccgtacatggggagaacacccactaagccccatagggctggaccctacatagtcccagctacttgggaggctgaggtgagaggatcacttgagcccaggaggctgaggctgcagggagccaccatcacgccactgcactccagcctggatgacagagtgacaccctgtctcaaaaaaaaaaaaaaggcaggggtgctgggcacggtgtctcacacttgtaatcccagcattttggggggccgaggccggtggatcacctgaggtcaggagtttgagactagcctggccaacatggtgaaatctcatctctactaaaaacacaaaaattggccaggtgtggtggctcatgcctgtaatcccagcactttgggaggccaaggcaggcagatcacctgaggtcaggagttcaagaccagcctgacgaacatggagaaaccccgtctctactaaaaatacaaaatcagccaggtgtggtggtgcatgcctgtaatcccagctactcgggaggctgaggcaggagaatcgcctgaacccaggaggcgaaggttgcagtaaaccaagattgcgccactgcactccagcctgggcaactagagcaaaactcttgtcttggcccggcgcagtggctcacgcctgtaatcccagcactttgggaggctgaggcaggcgggtcacctgagagcaggagttcgagaccagcttggacaacatggtgaaaccccatctctaccaaaactacaaaaattagccgggtgtggtggcaggtgcatgtaattccagctactcaggaggctgaggcgggagatttgcttgaacccaggaggcggagcttgcagtgagctgagatcgtgccactgcactccagcctgggtgacagagcgacactccgtctcaaaaaaaagataattttctgtctaggacaagtggggtggctcatgactgtaatcccagcgctttgggaggctgaggtgggtagatcacctgaggtcaggagttcgaatttggcctggccaacatggtgaaaccacatctctactaaaaatacaaaattagccgggcgtggtgaccagtgcctgtaatcgcagctacttgggaggctgaggctggagaatcacttgaacccaggagatgtaggttgcagtgagccgagatcatgccaactacagcctgggcgacagattgagactctgtctcaaaaaaaaaaaaaaaagcgtatggtggcgcgcgcctgtaatcccagcactttgggaggccgaggtgggcagattacctgaagtcaggagtttgagaccagcgtccccaacatggagaaacctggtctctactaaaaatacaaaaaatgagccggctgtggtggtgggcacctgtaatcccagcttctggggaggctgagacaggagaatcgcttcagcctgggaggcaaaccttgcagtgaactgagatcatgacactgcactccagcctgggcgacaagagcaaaactccctctcgaaaagaaaagaaaagaaaagaaaagttcatctgtcctttgatctggcacatcttttataatggcctgttctgcctctgccttgtcactgagcagtgtggggagaattatgcccatgagttgtgaggaacttctgcattcttttttttttttttttttaagatggagtctcactctgttgcccaggctggactgcagtggcatgatcttggctcactgcaaccactgccttccaggttcaagcgattctcccgcctcagcctcccgagtagctgggattacaggtgcctgccaccacgcctgtctaatttttgtatttttagtagagacagggttttgccatgttggccaggctggtctcaaactcctgacctcaggtgatccgcccgcctcggcctcccaaagtgctgggattacaggcgtgcgccaccgcgcctggccttttttttttttgagacagggtctcactctgccactaaggctagagtggcgcaatctcgtctcactacaacctccgcctccgcctcccaggctcttggtcctcctacctcagcctcccaaagtgctgggacgacaggtgtgaggcgccacgtccagcctagttctctcatcttacaacgttcaggcccctgggcgggcactggaggtgctttcaccatctgagacgatgtttgctgtcacgtggggaggagcttgtcaaccccatgttcacacaggaactagtgtctaagtgacacatctcagcatgtcccattcttgttttttttttttttgaggcacagagtttcgctcttgtcacccagcctggagtgcaatggcgagatcatggctcaccgcaacctccacctcccgggttcaagagattctcctgtctcagcttcccgagcagctgggattatagccctgcgccaccatgcctgactaattttgtatttttagtagagacagggtttctccatgttggtcaggctggtctcagactcccaacccccaacctcaggtgatctacccgcctcaacctccccaagtgctgggattacaggtgtgagccaccacgcccagccaggacccattcatttttaaccaccttgctttatctgttcaaaagagaaacaaattcagcatgtgtaaataactctgaccaccctcaataggaagcagacagggccttgagtatttctctcatctcctgactcagaatcgcagcgtgtgtctctcttcaccataccgcacgggtcctgctcgctgacccagcccgcctgctgtccagggcttcctctgtctctgctctgggacctccccatggccacgcattccgccgcatggtctggatccctcgcggtgtctgggttcagccatgctcagcctctgtgtcggtcaccagcctagaaaccctggagcaccccgggccggaacccttccctcagatctgtcgtgagttccctttcagagatcaagcccagcctggctcagtcttgcaccccttgggatccacggcctgtatagttaccctaaaataaacacaacacaaaaccagggctctcaaatgtctgcttttcctcctgggcccctgagctctgaccctgcctggctgcacagactgtgacaaagagagtattcaggggcctcgggggtgcaggaggccaggctgctcaccagtacagtgtgcacataatcccttgggaggagccaaccttgtttttgagtctgaaatggaatgagtaaggcgtggccaaagaaacctctgcactccactggccccaggtgaagtggctctgcctgagtccagatggtggaggaggcctttgacctgaagttgactttgtgtctgacttgctctgacttctgtcccaaggcactcagggttcttgctatgccaccttgtaccctggggccctgcactcctctcctgaaatgaagaaccctggaattctctgtgtaattagagccacagaacacctggggaaccagcgccaacttaccttctcagcctccaggaacctacagttgagatcttctaggctctgtctgtaaagatgctgagaggtataattcctagagctttttaatctgtggccaactgcagtcatgagccacacagcccctctgagtgcactgccatggtgtggagaagatttacagcccctcaaagggctccgtctgatattattcaaagcaccaaacacagagcatgggcaaaagcaaacatgaccagtgggttcctgattgatgtcggcacctggagcccttccccacctgctgtgctggtctttgtttccttgtgtatcgttgctctgcctgtaagaacagaggggcaggcacctacctggggttgccctgctctttccccaggcatgagaaatcagtgcctggtaaattggcatgaatgagcagctggtaccatgagataaacattttgggggtgtttctgttaatgtgataacttgataaagtgattgtccagccccaagcactgctggattcatcatcatactaaatgtctctagtttgtccccaagcggagcagcccagttactgataatttccctctcccaggatttcctaatctactggaaatgaaggacaaggagcatgtttttagatgcaggcaatccataactgtagaaatggccttgatctaaagca

SEQ ID NO: 36 - DNA, 98345 bp, Homo sapiens
  misc_feature (49350)..(49350): n is a, c, g, or t
gcttgagaaagtttccagggatccatttgtttatttacaacagcattctaggagaaaggtgaatgggcccctctcctcagtgcccaaggggacaggactgaggcagccccacctggcccatggctctgcagagctctgcaccctccccaaggctgttacccacgatggacagaaggacgttctctcaacaccagggttgattttggggaggctggagggaaccacgtctaggacctaccaacactagcccctccctgggggctcccaagttctgaaaagaaaaccaaacgcagtgagcccacgtcagggtctccacgttcctgcacgtaacacccacgacaccactgcagcctcagcatgggctgcacggggtgggcaggactgaggaggggagggcaggactgaagaggggcggggacccgcactccctgccagccgcccaccacctgccttttctactttggcaaaaacaaaaacaaaacctggaagcctcaagacaatgaagtaaactttaggaaatggaaaagacagcaggctgtgcccaaagcctctctcagcctcccagcaagtccttcccaagagctgctggtgactctccagggccacaatggcaggttttcctcacagcagccccaaccccagcccagctgaagacggctctcctgagctcccttcatcagctgccttggcttccaagctgggaaggcattggggtgtggtcggggaaggcacccagttgtttacagatggtagagggtgacacaggcagcatcgtcatgaagcagggccccaaggaaaggtcctccgggagaaccaggctgcccaaggggaggagctgcagacgcacccgctgggaccgcagcctgctggtggacaggctccctgtcgaggagacaaacagcacagcacatgtggccaaaggcacctccagaggcagcagctgagtgaggatgaagactgcagggtgggcacacttgaatgtggatctgagtgacggttctgtccccatggactgggcagctttgggaactgagggaagtgagggagcgcaggaggccagggggctcagccagctggtaggggcggccgagacaccacccctggagtgatggaggaggaggatgtcattgtaaataccaccaggacagcgttgggtggcacctgacatcccccagcacacatagacctgtggtgcctccttgggctatgtctgtccacatggtgggacctcctgcccgctgaggtggtgcggagaggcctcagggagttgtttggcaacagggcagccctgaccccctctggctgatgggaagcagcatgtctgctgccccagagtctgaaggcccccacagtgctgggtgaaagtccacagggcccctcttggcctccccgctgtgggcccagagtcacagaaatcacccccagaaatttgcagaaactcaacaccaggacacagacccaccgcccaacctaaaagaacaggaacaaccctaaggccacgcaggcctggcaggtgagagacgcagagtggctgccggccgcagccccgcggggtcagcacaaaggcaagacgcggtggggagaggacaggagccttccagcacatcacggggcagaggcggtgcacaccggcggggcacggctagttcctcaaggcggccaacctggaaaccaacaacaggactcgggtcagggcaggggaagggggcctctgaccaccacgtgctcccagcacaggtgacccttttcctcctcagtgtcctgagataacatgagtgacaggccttggaaacagacatgccctgtcccactcttacctgatctgttaggaagggtgcagtattctaaagtgtactgcagacgtgtgtaaacgccatgcctgacacacactcaagcccccacgccagccggagcaggacggggcagcagcagggcggctcgcttgggggcggctgcagctggggcctctgagtcgagatcagggctccctggtcggagcctcagcccaagctctcctccagcctctaacccacaaccctctctcccttcccacagcaccagagcgtggggttggtgacacagcgtttcggggaccgaccctacctccgtgacagctggtcctcctggctgcgcacagagctctcgcccacggcagaggcgccctcgggcagctggctgagctggtccagcacctccaggccattctcctcggcgatctgcatgatgaggctgtccacctgctcctgcggcgtggtcagggtggtggccgagctcatggagtcctccatcacctgggggcaggggcatgctctggacaacaggtggggccaggcccatggggccccactcagcttcacaagggtacgactgcacttttcgttccctcacacagccagccaccttcttgccctgttctctcagtgactctctctgtctcaccttccaccaggagcctttcctgcccccccacccagccccaccctctgactgtgccatgcctgctgccgcgggtggacatctttccacacctctgcatgcttgtctgccatccgagcctccccacaaggagccaggtgcctgcaggaggcccccgccgccctgcccaccctacctgtcagggtcctggcagggacccagcacagaggatgcttggtgacgtcagggagcaaccacaggtatgcagagacagcacgtcagcctgtgagccacccctcccgatgagctgcccacacacgctccttgtccccaggccacagccccaagggtaggggccacataccgatgtatggacgtccaggttctgcacctgctgctcgaacctgtccatcactgaggagaccttctgcaggtccatggtgctcagggccttgtccagggctttggtcacctgggccatattcttggtcacctgagacaggagagagcgcaggagggaacaggatgaaaggcaagtggagctcacgcaccagggacgggtcccctggactctgacaggagagctggggcaccccaaccctgacccacaaaaccccaactctgggctgagccatcatctgggtcctatggaaagaccaccaactcgacggaaaaggccatggagacccagtgcggggtcagtggagaaaaggccgccgacgtggagacccagtgcggggtcagtggagaaaaggccgccgacgtggagacccagtgcggggtcggtggagaaaaggccgccgacgtggggacccagcgcggggtcggtggagaaaaggccgccgacgtggggacccagcgcggggtcggtggagaaaaggccgccgacgtggggacccagcgcggggtcggtggagaaaaggccgccgacgtggagacccagcgcggggtcggtggagaaaaggccgccgacgtggggacccagcgcggggtcggtggagaaaaggccgccgacgtggagacccagcgcggggtccgtggagaaaaggccgccgacgtggacacccagcgcggggtcggtggagaaaaggccgccgacgtggggacccagcgcggggtcggtggagaaaaggccgccgacgtggggacccagcgcggggtcggtggagaaaaggccgccgacgtggggacccagcgcggggtcggtggagaaaaggccgccgacgtggggacccagcgcggggtcggtggagaaaaggccgccgacgtggggacccagcgcggggtcggtggagaaaaggccgccgacgtggagacccagcgcggggtcggtggagaaaaggccgccgacgtggagacccagcgcggggtcggtggagaaaaggccgccgacgtggagacccagcgcggggtcggtggagaaaaggccgccgacgtggagacccagcgcggggtcggtggagaaaaggccgccgacgtggagacccagcgcggggtcggtggagaaaaggccgccgacgtggagacccagcgcggggtcggtggagaaaaggccgccgacgtggggacccagcgcggggtcggtggagaaaaggccgccgacgtggggtctccaggactgctgtgccctcctggcccacctgcactgtgtgaaggaaatgcctgcaacagccaaggctctgctgtgacgtccctgacccagcagatgagcctggccatgcaggctctgcctcttgtgggagttgccaagaccgaggcctggccaggtacagtgacagtgagtggttcacgcctataattccagcactttgggaggccgaggtgggaagattgcttgaggccaggagtttgagaccagagcggccaacatagacaccctgtctctacataaaaatgaaaaaaatcagctgggcatggtggtggatgcctgtggtctcagctacttgggaggctgaggcaggaggatcgcttgagcccaggaggttgagaccagagtggccaacatagacaccctgtctctacttaaaaatgaaaagatcagccgggcatggtggtggatgcctgtggtctcagctacttgcgaggctgaggcaggaggattgcttgagcccaggaggttgaggctgcagtgagctgtgactgcaccactgcactccagcctgggtgacagagcaagacagtctctaaaaaatatatatttaaaaaaaaaaaagcccaagtcttatcaagaggtccttcctggggcatcagtgcaagctcagggtgcagcctcacctgtgtccctgccagcatttcccaccccacgctgatccagcttaactcaacctccccaccccacgctgatccagccctcaacctccccaccccacgctgatccagcttccctcaacctccccaccccgcgctgatccaccttccgtcaactctgagctgccccagatccagaccgcagagcccattcctgcttcagccagcgaacgccacccatccagcaccagggcccagcactcacccccttcatagtcacagctgtctgcaccttggaggccactgcgtctacgcgggacgccatccgaagccagttcacaccttcgttcttcttgcggatggcgttctcggcatacacacgggcacactctacatttttctgcagaagggcctgaaacccgcgggggaaagcagctggaagagcttggtggtgtgtgtgccccctgctaggagcccagtttttgttttgttttgttttgttttgtttgagacggagtcttgctctgttgcccaggctggagtgcagtggcacgatctcgactcaacgcaagctccgccccccaggttcatgccattctcctgcctcagcctcccgagtagttgggactacaggcgcccgccaccatgcctggctaatttttttgtatttttagtagagatggggtttcaccgtgttagccaggatggcctcgatctcctgacctcgtgatctgcccgcctcggcctcccaaagagctgggatcacaggcgtgagccaccgcgcccggccctaggagcccagtgttgaggcggtgggcgggcctctccccagaaatgtttgagctaaaaatgcaaacacccaggccccagcccagccccccaagcaggcttctgcttccccccgcacccctccagcactccactgggcacgggacacagcgggtgacactcagagcctgtggcaggcagttctccgagctccattctccctgggagcctggctgtgggtgaagagttaccaaagtccaatacgctgggacctacttcaccgattacgcagttttaagagctgcacaagatcctaccttcttttcttttttttctttttttggagatggaatctcgctctgtggcccaggatggagtgcagcagtgtgatctcggctcactgcaacctccacctcctgggctcaagcaattctcccgcctcagccttccgagtagctgggattataggtgtgaatcactgcgcccggcctagatccctcctctccttctgccctgtccatcatggggaggggacccctcctggagaggcacccctgtaagcctccagccccatcccaccccatggggcaggggcatcatgactctgcccagaccctgatgccctagacaccagctctgtagggaggagagagctaaaaatgataggatccgctgggcccagtggctcatgcctgtaatcccagcactctgggaggctgaggcaggtggatcacctgaggtcaggagtttgacaccagcctggccaacacggcgaaaccccatctctactaaaaatacaaaaattagccaggtgtggtggcgcatgcttgtaatcccagctacccaggaggttgaggcaggagaatcactcgaacccaggaggcagaggttgcagtgagccgagaccgcacctctgcactccagcctgggcaacagcgagactccatctcaaaaaaaaaaaagataggatcgtggcagacagctagctagcagccctcctcctgcagatggcaaaatcaagttcagaatgttggaaatgcaaagaaggaaaacaatgaaggcaatgcactcatctctgtgctctggacgccctcagtgggctgggaaggtctggcaggggctgtagggcagggacagaaaccattctgggctgcaccacacacagcacctcccttcctgagtgcctgtttgtcttatgtgggaagcaaatactttgaggctcagaaatcatagtgaggattaggctgggcacagtggctcatgcctgcaataccagcacttttggaggccaaggcaggtgggtcacttgaggataagagttcgagaccggcctggccaacatggcgaaaccccatctctacaaaaaaattaaaaaattagctgggtgcaagcctgtaatcgcagctacgtgtgaggcgaaggccctagaatcacttgaacccgggaggcggaggttgcagtgagacgagatcgcacctgtgcactccagcctgggcgacagagcaagactccgtctcaaaaaacaaacaaacaaacaaacaaacaaacaaaatatatatatatatgtacctcaaggtgacgattaaatcatgatgtagaaagtgccctgcccctccccaaaaggcatcaaaacaaaacaggacacaaaaataagggcagaaaaggacagaagacaaaccaggagagtcatgaccccacagcccccagggtctcaccttcttcactttggcctgctccgccttggagtccttctccgccttcttggccagcttctccagctgcttcgccgtgaactgagcggaagccggaatgtcctgggtcagacatgcggagcccatcccccaggcccggctctccacacccccacacctgtgcccacacctgtgcccacacaggttcctaagcccccatcagccagcctgggcccagcacaccgcagggaaggcgtgaagcctgtgggcgtgcatcctgggcggcgagagatggcaccagctggaggaggaagctgcctgctctgcctcaggctctgtctgggttttctccagtgtctgtcttctctgtgaacagcctcacccaaggcctcctccagagcggaagggtcaaaaacctctcactctgatctcggctcctgcttatggatggcttttcaacgtcaaagaaagactgaaggaaactcatttcaggctacccccaagtcataacacagaactccaggtaaaaacacacctgaaagtgttatctcgagagaatgctgtggatgcaggaggttgctgggcagcacaagcagcttccggggatctaactgctctgccagcaccacacggaaacagggcctctggcaacaccacaaggacacaggacctctggcaacccacccggaaccacagacgccctggtaccaggtagccctggccaccagcacctcaaggaaacagggcctctggcaacccatctggaatcacagacaccctggtatcaggtagccctggccaccagcacctcaaggaaacagggcctctggcaacccatctggaaccacagacgccctggtaccaggtagccctggccaccagcacctcgaggaaacagggcctctggcaacccatctggaaccacagacgccctggtaccaggtggccctggccaccagcacctcgaggaaacagggcctctggcaacccatctggaaccacagacgccctggtaccaggtggccctggccaccagcacctcgaggaaacagggcctctggcaacccatctggaaccacagacgccctggtaccaggtagccctggccaccacagcaccacagggtgcaggacacaagcaggcctcagccggtcccctctgtgcccaacagcaactgacaggcccaccgtgatgggaaaacatcccaaagctgcatacggtagctccggcacatcactcctgcccagtagctcagagccagcgacaaggcaagataaagctggccacagatgagcagccaggagcacatcccagggaaatgcacggaaacctgccctggattaccggaagctgcaacctccaccccacgtgggaggaatactcagaaagctctccttcaaatgatctcaaagaatgagtccacacagcggaacaccaaggcctaatgcccaagttgtcttttttttttttcttttctttttttttttttttttttgagacggagtctctgtcacccaggctggagtgcagtggcacaatcttggcttactgcaagctctgcctcccaggttcacgccattctccggcctcagcctcctgagtagctgggactacaggtgcctgccaccgcgcccggctaatttttttgtgtgtttttagtagagatggggtttcactgtggtctccatctcctgaccttgtgatccaccccacctcggtctcccaaagtgctgggattacaggcgtgagccaccgcgcctggccccaagttgtctttcttaagataacactccgggccaggcacagtggctcacgcctgtaatcccagcactttaggaggccgaggtaggcggatcacgaggtgaagagatcgagaccatcctggccaacgtggtgaaaccccgtctctattaaaaatgtaaaaaaaaattagctgggcatggtggtgggcgcctgtagtcccagctactcaggaggctaaggcaggagaatcgcttgaacccgggaggcagaggttgcagtgagccgagatcacgccaatgcactccagcctgggcgacggagtgagacgccgtctcaaaaaaaaaaaaaaaaaaaaaaaagataacactatttctttcatggctttcatggatgaccctaaggatctgcctccacttagcctcagataagaaaagagctaatatgtcaccaaggtggctcaataatcccctccttggtcagcagtctgagccctgtgtggcggtcactcaactgttatataatctgcccgactgtttctgtggctctgagtgagcgtggcttatactatctgtcctcaccagaacagggctggggtgaacggccattcggtacataccttcaactggaacagggtatctgcaaagaaagagggaattaatggtttgaggattgggaatgggacgttacacttctggcaggcaggactcactaggttccttctagacaccaggagctagaacacacacacagaccacacctgcctggggccttcggggagccccccccaacaggggaggcacgagacagattcgtgtgccagccctggctccttgctagccacagggcccagcaaatgcagaccctccctccctgtttccttgttgggaacatgagggtggtaccagccaatctcaaagggttagtgtgaggacagaagaggtcatggacgcagcatcttttggccatggttagaatccaaaagatggtggtttataattaatgcaactttgcaaatgtcccttgggattctttcccaatttaaaagttcacctgtaatcccagcactctgggggtgccgaggccagtggatcacttaaagccagggtttgaggccagcctgggccaatttaaaagttcagtacttgacagtttactttttacagactctttctcctcaaaggtaaatggataaaaatagcaaggtggtaactcttagacatcaaagagctgatttccagcggtacagtcgctcacgcctgtaatcacagcactctgggaggctgaggcgggcagatcacttgaggtcaggagttccagaccagcctagggaatatagtcagacctcatctctattagaaaaatatatatttttttgccgggtgcggtggctcacgcctgtaatcccagcactttgggaggccgaggccggcggaacatgaggtcaggagatcgagaccatcctggctaacacggtaaaagcccgtctctaccaaaaaatacaaaaaattagccaggcgtggtggcgggcgcctgtagtcccagctactcaggaggctgaggcaggagaatggcgtgaacccgggaggcagagcttgcagtgagccgagattgcgccactgcactccagcctgggcaacagtgcaagactccgtctcaaaaaaaaaaagaaaaaatattttttttaaaaagtaggattgatctcaattcattcaactgctaaatttggagagcgaccctgaccccagattcctgaaagggctttaccacactagccacaacgaggaaatggagcctgtaaaagaatgaggttactgagtgttcacaaatgcacaccaaggctccaagatgagatctcccggggttccagaaagctctgggcatcgttcaatctatcgcctgtcagtgcaggcgtggtcaaggccaagttcaacctgtcatctatcagttcaggtgtggtcacggccaaggttatctgtgactggaaaacagccagcctgacccagatggcacagtgcaggccaggcgggccgtcccacccaactcactgtgggatgctggccaaaccgccctcctcatctcagctttccctcacctcagctttccctcacctcagctttccctcacctcagctttccctcacctcagctctcctcacctcagctttcctcacctcagctttccctcacctcagctttcctcacctcagctttctcttccagccgtgtgtggcagcacaaaaacccagctaaggcaaaatctgactctgaggaaatctgacatgggcttgagagaagtcccctcaaaagagttgagtgagctgtggagtgaaaagccacaatttttcttttttttttttgagacggagtctcactctatcacccaggctagagtgcaacggcaccatcttggctcactgcaacctctgcctcccaggtttaagcgattctcctgtctcagcctcccaagtagttagaattacacgtgcacgccaccaggcccagctaatttttgtatttttagaagagacggggtttcaccatgttggccaggctggtctcaaactcctgacctcaggtgatcaaccaacctcggcctcccaaagtgttggggttacaggcgtgagccaccacatccggcctcccaaagtgctggaattacagccgtgagccaccgcgcccggcctcccagagtgctggggttacaggcctgagccaccacacccggcctggccagcatattttttgtggcgggaggtagatgttatctttcatcttctctcagggcagaaaatctctacacatttccttcatgatgatgacacggtggtactatagcttttcacacttctaactaaaagaattttttttgagacggagtctcgctctgtcgcccaggctggagtgaagtggcgcgatctcggctcactgcaagctccgcctcccgggttcacgccattctcctgcctcagcctcccgagtagctgggactacaggcacccgccaccacgcctggctaatatttttgtatttctagtagagatggggtttcactgtgttagccaggatggtctcgatctcctgaccttgcgatccgccggcctcggcctcccaaagtgctgggattacaggcgtgagccaccgcgcccagcccttcaaaaagtatttttaaaagcctgcccatcacaccagcccaacgatgtttcagcaaacataggacttcattttgccagattcttcctgttctttggtatccctgagcacacagccggctagccccagatgtagaaggtaagaattagggcgacccattgagcacagaaacgcttgtgctggctcctgctcaaacctctgcttccccacatggagaatggacgcaaagagctgctgtgaccagggcctggcactcagggagcgctttctgtctgagtccttctgatttgcagtgatgctgtttggggcagggggtgcaactgtcactttttctggtgccctctgacccgacattccaagtcccgaaaggccgaacaggcatcgcacagtcccccctaccgagctggcgggaaagggcgcctgacgctgaggagtgccaggggcgggggaaagggtcctgggtcggtggtcgggggtccaggccctgggcaaggggtcctgggtcgggagtctaggtcccgggtccatggttgggggtcagaggtcgaggccccggggaaggcataccgggttgagatttggggatggaggccccggggaaggggtcccgaatcgggggtcggggatcgaggcctggggggaggggtcccgggtcgagggtcgaggcccggggtaaaggatctcgggttgggggtcgggggcctgggaagggtcccggtcggtggtcgggggtcgaggcccgggagaaggggtcccgggtcggtggtagaggccctggggaaggggttccgggtcggggatcgagggtcgaggcccgggaaaaggggtcccgggttggtggtctaggccctggggaaggggttccgggtcgggtatcgggggacgaggctcgggaaaaggggtcccaggtcggtggtcgaggccctggggatggggtccgggtcggggatcgggggacgacgaccgggaaaaggggtcccaggtcggtggtcgaggccctggggatggggtcccgggggatcgacggtcgaggcccgagctctcctgagtcctgcccgcggccccaggtgggcggagcccacgccagtgggagaagcggccccgccccgcgcgcgagtccccggaggacggccgcgacctcttaccgtccatggccacaatgacaggagcagcactcggagagggagaagggacgccaactccgggcggtgtcaggtcccggcggcgatcgaaccgaccaagctgcacccggcggggacttccggggtcgccgccccacttccggtcgcacgggatgctctcgcgagaggatggtggccggtcccgccagaggggcggggcgcggctgcgcggcgcgcggtcgccatggtgacgcacgccgctggcgcgaggaccttttgtgagtcgctcccggctccgcggccgcggaggtgtggggacccgggcttgcgtcggagggggcggtgggctcacccatgggcctttccaaaagcaaagagaaacccaggaaaggtaaaggaggcgcaggcgctgggctccccgcgtctccgcccctgggcgcgggcccagggcggggctgggctgggcggggcggtgtgagcgcaggcgccaggctcggcccggtgcgaaccgttcctgccgccgagtccgccacggacggcgcgtttcccgcctgaggcggttacggaaacgcggagactcgagacttgaagccagcttattctggatccacgcaggcgactgaagacgatgggacccactgccctgcattcggtaagtcccgggtctaacggatgatccatatatttcaggtgaggagcaaaagaagggatccacctattcagttccaaaatctaaggagaagttgatggagaagcattcccaggaagccaggcaggcagacagggagtcggagaagcctgtggacagcctccacccgggggccgggacagccaagcacccgccgccggcagcttcgctggaaggtaggagacggcgggagggagcgaagcgaggtcagtggcttggaggatctggggctggggtgaggagcctactgtaagaccctaccggatggacactagtagcaggcacgcgccgtaaagatgaaactggtttgttttgggaactttatgtaggaggtaaatatccagaaatcttagttgaaaacataagtttaatgaaaatgtaggtcagttcccgagtgataagtgcgtaccaggtggtcgaggggctggggcagtgtgcgtgtgtctcacctgaggttctcctcgagggctgggtatcttggtgccactgagaatccctgagcctccgcacactggaacagagcattgggaggccgtcccaggctggactgtagctctccgagggctgtggggataagtacattgcggagggtgaccgaggagtagaacctgggtgcgacaaaggtgtcttttataacagcctagtgtggccagacctttgggtgtgtgtggggaagatgaggccccaaaagtaggaagaagctagaatacaaagttttccatcagttttaccacgtggagctggaagcgttaaatattttaaacaacggaggtgctgcctggggcggtagttcacacctgtcctcccagttatttggccgaggcaggaggatcttttgagcccaggagttcaagaccagcttgggcaacatagtgagaccctgtctctacaaaaaataaatatttaaaaataaaaaacaagggcggcatgatgaggtctgtgcctaccaacaggggaagccagttcgcaggggaggtggcccggtcagagacccattgctgtggcccagtgggagccagcaaggccttgcagtaggaattgcagaagggtcaggcagggagaacccgcagagcctgccgtccgaggagattgggggcctgtgccaggaggaggtgttttaagtttcatcacaagaatgaaccactcggctgggcgcagtggctcacgcctgtaatcccagcactttgggaggccgaggcgtgtggatcacttaaggtcaggagttcaagaccagcctggccaacgtggtgaaaccctgtctctactaaaaatacaaaaattagctgggcgtggtggcatgtgcctgtaatcccagctactcaggaggctgaggcaggagaattgctcgaaccttgaaccgggacccgggaggcagaagtagtggtgagcgagatcgcaccactgcactccagcctgggctacagagtgagactctgtctcagaaaaaaaaaaaaataataaggagagaaccactcgggtcagacaagaaagaatgtcagggggatgactggcctgctaggcagaggagctgggcctggactgcttcacactgacacgcttgtaggatcaagggctgaaagtaggaggctctgggccttggacttggaagaaagacttggatttgaattcccaactttggaacctcccactggagggtggaacccctcacaggagggcgcaaccccccaccggaggatggaaccctgcaggaatagcatcacccttgggtggcagtttggaaaatgctacctgtctgtcacggtgcttttagctgaaagttacagaaaagctcactaaacgcagctttaacacagggatttaatgtctcacgaatgaagggtcagaggtggagcttccaggttggcttgttagcacaacagtgacatcaaagactttgcgtgtctcttcttgaccactctcagtgtccacagcccccgatgagtgtacagccccccacacgcaggcaggactgcatctactgcaaaggcattgctccttgcttcatattagcaaggaaacctttcccaggaaggcttcgcctgcccagcctctgcaggactcattcaatggtgcaaattcaccaggggctggagggagctgtgaagcatgggagtgggcaggacctctgccagtaacggaagtgggggaaggaggaccgcctgttggaagggccccagcagtgtctgtcacaccagagggtgggggaggaaggtggacatgaagggaaaacagcagagcaagagtgagaacagagtttcagcagataaaatgaagtgtgcacgctctccatgcagtgacgggctgagcgacagtgaggagcaggctgctgactcccttgccacaccgtgaaggagtcccaaaggtgggacactgagtgagacaagccagaggaaagaccactcatgttgcagttccctttccatggaatgtccagaaaaggcacatttacagagagaagcagatgagtggttgctgggcagaaatgggagccggccacagctgagcacaagaggactttggagggtgatggaaatggttttcgacctgaatctgaacatgggaagcactgcagtttagtagtcctggtccctaagcccttccagcccaggagccagacctgtgagcaaacaagcctttagtgattccaggctctggctggaaccttgagtcttctcagcttggggcatgcacctcagggggagccagcatcagtgtccagccccaagagcttccctgtacgtctcagtgagtcttcacatgcctccaactgcctggacaaccacacgtgatacctgtcctgccaaacgtgtcctgaacccataaaatccagagaaaagaaaatcgttttaaactgctgaggtttggggtaagttactatgaagcagtagtgagaagaacagaagggccatgatggggagaaagtttggccataagttaatcactgtggcagctgttaggatattgatgtggcttggctgtgtcctcacccaaatctcattttgaattcccacatgtgggaggaactgggtgggaggtgattgaattatgggggcaggtctttcctgtgctgttttcgtgatagtgaatgagtgtcacgagatccgatggttttaaaaacgggagtttcctgcataagctctctctctgcctgctgccatccatgtaagatgtgactcgctcctccctaccttccgccgtgattgtgaggcgtccccagccatgtggaactgtaagtccattaaaccttcttcctgtgtaaattattcagtctctggtatgtctttattagcagcatgaaaacggactaatacagatagatgtattatactgttacccctactacttctgtatatgcttaaatttttgcattacaaaattcacaaacatacaaacattatagagaactaacatcacagatttacagtcaccttattccacaatgttggaaattctaccacaaataaagaacttgaaaaaaaaggaggggatgttagaaggaaatctgagcgacctagacctgggctcagtcacgcctgagacagtcagatggggtatctgaggatgagtcagtgttaattttctcagacctgggctccgtcactcctgagacagtcagattgggtatttgaggatgagtccgtgttaattttcttagatgtgggaatgctattatagttacgctaaaacacaatccctatctaataaatacactgcaacatttatgggtaaaatcatatgtctgaaattccttaaagatactcagaatgccaggcatggtggctcatgctgtcatcccagcactttgggaggccgagacgggtggatcacttgaggtcaggagttcgagaccagcatggccaacatggtgaaaccctgtctctacaaaaaatacaaaaaaattagctgggtgtggtggtgcacacctgtaattccaactactttggaggctgaagcaagagaatagctggaacccaggaagcagaggttgcagtgagccacgatcatcccactgcactccagcctgggcaatggagtgagactccatctcaaaaaaaaaaaagatactcaggaaaaaaacgaagaaagaacaagataacaaaatactgattgaagctgagtgctctataggtgcaggtgctcattcactattctattttcttgtgtgtttgaacacttttttttttttttgaaatggagtttccttcttgttgcccaggctggagtgcaatggcatgatctcgggtctcaactcactgtagcctccgcctcccaagttcaagtgattctcctgcctcagcctcccaagtagctgggattacaggcgcccgccatgacgcccagctaattttttttgtatttttagtagagatgaggtttcgccacgttggctaggctggcctcaaactcctggcttcagctgatccacccgcctcggcctcccaaagtgctgagatcacaggcgtgagccaccgcacctggcctcccagagcgctgggatcacaggcgtgagccaccacgcccagcctgtttgaacacttttgtgacgttttgttgtttgtttgttttgagatggagtcttgctctgttgcccaggctggagtgcagtggcacaatcttggctcattgtgacttccgcctcccgggttcaagcaattcttctgcctcagcctcccgagtagctgagactacaggtgtgcgccaccatgcctgggtaatttttgtatttttagtagagacggggtttcaccatgttggtcaggctggtctcaaactcctgactttgtgaaccacccgcctcagcctcccaaagtgccagtgttacaggtgtgagccaccacgcccggcctgtaacattttcatgaaggtagagtatacttaattgcaagaaaattttgaaaaagaagagaaatggaacacttctattggctattaaaaaataccatgctgagtgaaaaaagccaatcccagaaggtcacatgctgtatgattccatttcttttttttttttttttaggctggagtgcaaatggcacgatcttggctcactgcaaccttggtctcccgggttcaagcaattctacctcggcctccggagtagctgggactacaggcatgcgccaccatgcccagctaatctttgtatttttagtagcgatggggtttctccatgttggtcaggctggtctcaaactcccgacctcaggtgatccgcttgcctcaaactcccgatctcaggtgatccgcttgcctcggcctcctgaaatgctaggattacaggcgtgagccaccatacccggccgtgattccatttctgtaacattctctgaatgacaaaattatagacagggaggacagattgttgattgctagggccttggcgttggggtagggagtgagggggtctgtgaagggcagggctttggggttggggtagggagtgggtgtgtctgaagggcagcaggaggaagatgggattgttggttttggtggtgattgattaaatggcgtagctgtacatacactcatagtaccggagtccatttcctcgtgtcgataatggtactatagttatataaaacgttcgctttgggagccaagcacagtggctcacgcctgtaatttcagaactttgggaagcctaggcaggcagatcacttgagcccagaagttcaagaccagcctgggcaacatggtgaaacctgatttttacaaaaaagacaagaattagctgggtgtagtggagtgtgcctgtagccccaactaatcaggggcctgagataggaggatcccttgaccccatgaggttggggctgcagtgagccaagatcgtgccactgccctccagccccggcgacagagtaagaccctatttatgcttcctagcaaggaaagacagtacacatattgaagaatttgactgcgttaaaatgttaaacctctccccaaactcttataaacaattgtagaacaaatgataagctcaaaaaaatatttacatctatgagaggccaaagaatatcagttgactctggatcaggggctcggacacgttgctgtggaggcacacatcttcctggaaggcggtttggtaacaaggtggcaggactcaagacagcccacacgatccctgcccctgggaaacagccatgtgtaaccctcccctcgagtgtgggtggaatgaggaagagggaggtgtgtctctcctgcgattagctcactcatccattgagtttgacgtcatcaaaatgcgagatgatcctggatgggcccgacctgatcagggaagccagacagtaaaagtgtcagaggctctttagggcccgacctgatcagggaagccagacagtaaaagtgtcagaggctctttagggcccgacctgatcagggaagccagacagtaaaagtgtcagaggctctttagggcccgacctgatcagggaagccagacagtaaaagtgtcagaggctttttagggcagcgagaaaacgggaacttcattccttgaaccgggaataaattctgcctccaaccagaatgggcttagaagagggtcctccagctcctcatgagaatgcagtgcagccggcccctggaattcagcctgcgtcccagccacgctgcacctgcacccctgacgacgaatgcagtaagatgataagtggatgtgctggtttcagccctgaagttggtggtgatttgttgtgcagcaatagaagtacacacaatatgtaccaagaaccttgagaagagtcacatttattctttctgttttgtttctgagatggtctcacccaggctggagtgcagtggcaccatcttggctcattgcactcttgacgttctgggctcaaacgattctcccacctcagctccctgagtagctggggccacagtgcacgccaccacccccagctattttttgtagtttttgtagagatgcggttttgtcatgttgcccaggctggtctcgaactccagaggccaagcaatctgcctgcttcagcctcccaaggtgctgggattacaggcgtgagccaccgcacctggcccaagattaatatttctttttttttttgagatggagtcttgctctgtcgccacccaggctggactgcaatggtgcatctctgctcactgcaagctccgcctcccgggttcatgccattctcctgtctcagcctcccgcatagctgggactacaggtgcctgccaccacgcctggctaattttttgtattttttttttttttaagtagagatggggtttcactatgttaaccagaatggtcttaatttcctgacctcgtgatccgcccgcatcggcctcccaaggtgctgggattacaggcgtgagccactgcgtctggcctaatatttctaaatgaagaaactatactttgaggaagatgaaataagtcttgttttagactagaaaatttcaatagtgtaaatacgttaacttctgtaaaatcagtcaacaccaagtcaaaacacaaaagatcttttgggaatatgagcagattattcaaaggttcatctaaagaataaaaatgaggccaagtgtagtgattcacgcctgtaatcccggcactttggaggccgaggcaggtggatcacttgaggtcaggagttcaagaccagcctggccaacatgatgaaagcccatctctactaaaaatacaaaaattagctaggcgtggtgatgggtgcctgtagtgccagctacttggggaggctggggcaggagaatcacttgaacctgggaggtagaggttgtagtgagccaaaattgtgccactgcactccagcctgggcgacaagagtgagaatccatctcaaaataaataaatgaataaaaatgaaagcagtaggaaacatctggaaaaccagaggcatgagggggtcgggccctctgatactcaagtaggttagagtaaaaaaaagccagatatggtgatgtgggaatatatggtcccataggtgggatctgtggttccagctactcagtgaggtccgaggatcacttgggcctgggaggttaggactgtagtttgctatgatcacatccacgaatagccactgcgctccttcctgggctacagagtgagacccttctctaaaaatggaagaaaatggccggcacagtggttcatggctgctgtaatcccagcgctttgggagggtgaagtgggagaataacttgagcctgagagttcgagaccagcctgggcaacatggcaaaaccgtgtctctacaaaaaatttcaaaattaggtgggtgtggtggtgtgtagggtccagccccacagggtcggtgggttttctccccatgtgcggagatgagagagcgtagaaataaagacacaaggcaaagagataaaagacagctgggcccgggggaccactaccaccaagccgtggagaccggtagtggccccaaatgccaggctgcactgatatttattggatacaagacaaaggggcagggttaggagtgtgagccatctccaatgataggtgaggtcatgtgggtcatgtgtccactggacagggggcccttccctgcctggcagccaaggcagagagagaggagacagagagacagcttacgccgttatttcagcatatcagagacttttagtactttcactaatttgctactgctatctaaaaggcagagccaggtgtacaggatggaacatgaaggtggactaggagcgtgaccactgaagcacagcatcacagggagacgattaggcctctggataactgcgggcaagcctgactgatgtcaggccctccacaagaggtggaggagcagagttttctctaaactcccctggggaaagggagactccctttcctggtctgctaagtagtgggtgtttttccttgacactgacgctactgctagaccatggtctgcttggcaacgggcgtcctaccagacgctggcgttaccactagaccaaggagccctctggtggccctgtctgggcataacaaaaggctcacactcttgtcttctggtcacttctcaccatgtccccccagctcctgtctctgtatgacctggtttttcctaggttatgattgtagagcgaggattattataatattggaataaagagtaattgctacaaattaattaatgatattcatatataatcatgtctgtgatctagatctagtataactattcttattttatatattttattacactggaacagctcgtgccctcggtctcttgcctcggcacctgggtgacttgccgcccacagtggtgcgtgctggtggtcccagctacttggaaggctgaagtgggaggatcatttgagcccaggaagttgaggcttcagtgagccatgatcatgccacagcatttcagcctgggccacagaccttcaagatcctgtctcaaaaagaaaaagggatatcgctcagtgcttagtgcagctgtgggtcattcggcagctgacacagatgaggctatgtaacgcagcactgcaggcagagggggaggccaaggcctgaataccccgtctgactagccttaggcaggcgacttggcctctctgcctcccccatctggttagccttgggcagtcgagttggcctctgtgtctcccctgtttgactagccttgggcagatggcttggcttgtctgtacctcagttttgtctgaaatatgggttgtcagagacctatagcagaagctgctgtgtgtcattattcactgttctagggctcagaacaggcacgcgataaaagccagcaccgttggccgggcgcattggctcacgcctgtaatcccagcactttgggaggccaaggcaggtagatcacctgaggtcgggagttcaagaccagcctggccaacatggagaaaccctgtctctactaataatacaaaaattccccaggtgtggtggcaggagcctgtagtcccagttgctcaggaggctgaggcaggagaatcacttgaactcaggaggtggaggttgcagtgagccgagatcacaccactgcactccagcctgggtgacagagcgagactccgtctcaaaaactaagaagaagattaataataaaccagcactgccattgccagcagtccatcctacctcgcatccaggttcgtgagctaccaagtgtccccacaaagctgtaaaacaacatgaccactgtagttacgtttctgtaaaaaggtgactgagtcttctaaccctgaccacacatatgtgtgcagagagagccagctccatcctgctctcccagaagcctgaacagctgtgccctagctcgtagcagtggcactccaggaagggggcgggcggctgtgcccgagctcgtagcagtggcactccaggaagggggcgggcggctgtgtctgagctcgtagcagtggcactccacgaagggggtgggcggctgtgcccgagcttgtagcagtggcactccaggaaggggcggccggccagccaggagagcagccggtgaaggagcacttttgctttgtacgtggcaacgctcggcaggctcagcagtttcacaggtctcaggcgttccttgtaaccttaacaggtttaagaaaatgtgagcaacatcagacatgtccatttctagaacattctaatggatgaagttctgtacagagggctttagcagaattagagacctttggagtggaaatgatgtctctgaaccttgagctctgaggcggttcctgcctggacgtgtgccctccctccttcctttgctggtcgccctgacaccatcctgccacggatagtggaagtgtttctcctgttttcttccctgaaaaagggtgtccagcatcagcaaccttcatggctgagttgcacatcccttaagccctgtaatgttcatggacagttttgatcacttttggactcacccattttttctgctaaccatacatcttaattcctttactctgaccaatggcaggaggtgtgtgcatcgtggaaggagctttccacacatctactaaatgcctggatgttttttcctctagagaaacctgatgtaaagcaaaagtccagcaggaagaaagtggtcgttccacagatcatcatcacgcgagcgtcgaatgagacgctagtcagttgcagttccagcgggagtgaccagcagagaaccattcgggagccggaggactggggcccctaccggcggcacaggaaccccagtacagcagacgcctataattcacatctcaaagaataaacaagcacctttgcatggcactcgctactccctgcgataggcgtctcgggaacagccgcctcaccctgtgagaagccgaggccccttctccagtgctctcggggaggttgcaccaggcccaccccaccctgtgagaaactgcagcccccttctccagtgctttcggggagggtgcaccaggcccgccccaccttgtgagaagccgtggcccccttctccagtgctctcagggagggtgcaccaggcctgcccccgccgtgagaaactgcagtccccttctccagtgctctcggggagggtgcaccaggcccaccccaccctgtgagaacctgcagcccccttctccaatgctctcggggagggtacaccagggttgccccaccctgtgagaagccaccgcccccttctccagtgctctcggggagggtgcaccagggctgccccacgctgtaagaagccgccgcccccttctccagtgctctccagcccgccccaccctgtgagaagccatggccccttctccagtgcttttggggagggtgcaccagggccaccccaccctgtgagaagccgtggcccccttctccagtgctttcggggagggtacaccaggcccgccccaccctgtgagaagccgtggcccccttctcccgtgctctcagggagggtgcaccaggcctgcccccgccttgagaaactgcagcccccttctccagtgctctgggggagggtgcaccaggcctgcccaccctgtgagaaactgcacccccttctccagtgctctcggggagggtgcaccaggcccgccccaccctgtgagaagccgcagcccgttctccattgccatttggtcctgccttccccagagctgctagcagctcggtcgaggcaagagtgactggctcagagagcgagctttgtggtattgataaatgaataaattagtatgttcatgttggaagtggctggctctgcagagtgatggacagcaggtggcatcttacattgtgatttgtggtgcacagttaaaacacttcccttcgtttcagaaggagacaatgtgaatacttggaaattatagtgaataagatgcctcccaaacttgaggaaaaggtcagattctaagagctaaacgttaagatgtaatgttccagaacaaagaggcccagagtcactgaacggggccccagggctcctagcttgagtgtaatctgagtcagcttatgaaaaggccccaaagaagaaagtggaatgtgtgctgggcacatgggacagccatggcactgagactttggaagtggccttgccagcgctgtcctgtctttctggcccacagatgagggctcctgattgtggaaggccacggaagggacctgaacacgatggcacgagacaagttatctcctgtgactgctcctctccagcaaccctcagctcaggctagactttccccctgtgttgagaatgccctgccctgtgtggaagcctgatgcatttagtgacagtgtgttagctttgttagtttctagtctggccagcaggctttccatgtgatctgccattggcttgcttcagtggccagtggagccaggggtgtccaccagagtcttggacacagacttctgaggtggcagcgggagggagcctgctccctgccacacacgtacaatttctaatccatacaggcctatgtagtatatacacacatacgcagagccttaggaattgtgaaaggccaatcaaaacttggggccctaatttcactctgccaaaagaaaaaaaaaaaaagctgaaagatgagtcacccaagaaactgcttcctttttgttcctaagcagagagctaccaataaaaagttaaagtttctccataggtagctactctgttcaccttctgtgaagtgccaaattttttttttattattatactttaagttttagggtacatgtgcacaacgtgcaggtttgttacatatgcatacatacgccatgttggtgtgctgcacccattaactcgtcatttacattaggtatttctcctaatgctttccctcccccctcccccctaccccacgacaggccccagtgtgtgattttccccttcctgtgtccaagtgttctcattgttcagttcccacctatgagtgagaacatgcggtgtttggtttattttacttgcgatagtttgctgagaatgatggtttccagcttcacccatgtccctgcaaaggacatgaactcatccttttttatggctgcatagtattccatggtgtatatgtgccacatttgcttaatccagtctatcactgatgggcatttgggttggttctaagtctttgctattgtgaatagtgccgcattaaacataggtgtgcatgtgtctttatagcagcatgatttataatcctttgggtatatacccagtaatgggatggctgagtcaaatggtatttctagttctagatccctgaggaatcgccacactgtcttccacagtggttgaactagtttacagtcccaccaacagtgtaaaagtgttcctatttctccccatcctctccagcacctgtttcctgactttttaatgatcgccattctaactggtgtgagatggtatctcattgtggttttgatttgcatttctctgatggccagtgatgatgagcattttttcatgtgtctgtaggctgcataaatgtcttcctttgagaagtgtctgttcatatccttcacccactccatcaaaaagtgggtgaagtgccaatttactgagcacgagacaaatacatcattgacttcttttgtcttgtggattcaaggatgtgtccacgcccgccctccttcccctccagctcctccccttgaaatactgaagccctcaacatcatctttggaggaaggtacagagttggctctcacgcgcacatccttaaccttggcctaataaacctctaaggtggctgagacctgtctcagatacttgttggcttacaaattgaccaccatgcagggactcagagtggaggtggccctgccctttggcaggtttcctcctggtgcttaggaccagtttgggccttctttattgctcaggacagtaggacaatttgctgagatccgggagccctaccaccctccagagaatctctgatctcccgaaacttggttgaggtcgaaagtttattttgcgcacaatgccttttccttttccggtgttttacttgcttccaacaaagaaggcgagttttcctgcttccgtgatgatggggagcaggagacttccctggagtttcagctcggaaacaactcgagtttttcctgattccacgatgggggagagcagtctaaagcctgggccccattcctaggtaagtggctgaattggggttctgtcttggaagttctccttaatgactaaagctaacattaacgactggctggtcttaacttcttactattagcatgctcagtaagtgtataaattgtgggattgtttgttttgcttaactgctttttgtttgtttctgtgtttgctatttttgctgtttcagtctttttcccgttggatttgacgaattctgttagacttggtcaaatctgaagcaaacttccaagttgtgggaaacaagcctctgaattagctgaattcccacagctgggaaaaaggaaaaaaagccagaaaaagggaaaaaagattttgaccacgtgatgggctttatttgcataacgaggccacgtttttccagccaagccacactcgaagagtaagtgccgtcacctcacgctgcagttcggtaggtagagtccgccatttttccaccaggacagcccgggtttggttcctacatcctttctggtttgaaatttgtgttacttttgaaatatcagcagtttgtcccggctgaaataaggtagtgagatttaaagatttaaaaggattttctttttttttgagacggagtctcgctctgtcgcccaggctggagtgcagtggcgcgatcccagctcactgcaacctctgccgcccaggttcagccattctcctgcctcagcctcccaagtagctgggattacaggcacttgccaccgcacctggctaatttttgcatttttagtagagacggggtttcaccaccttgaccaggctggtcatgaactcctgatcttgtgatccaccctccttggcctcccaaactgctgggattacaggcgtgagccactacgcccagccaagaggatttttaaaagggcttaatggtcaaaagtaaacttaactaaaagctaatatcggatatattccaacatagtagcttaattaagtccgtatgccacatacacatatacagacccctgtgtagaaaagaaggcaccagactcctttttggggagaaacttctgtttttcttatggaactccaagagtggaaacagacacgttcctctcagatcttaaattgcttgctattgtattgtgttacctgatttttttttactaaaatagttgacacaggactttttggggtgctgcttctctagctggaggcctctgtggccggtggtgcccctacccgggtctcctgggctccagggttggccctggagtaccccgcccacctagcccggccgtgggatccgccctcagcccatggctggactgcgcatgcgcacgccgcaacccgcttcagccttgagcactggagtctggacaagaggagtgtggtggcgcacaaaacgcccaaagatgccaggaacggcagagccccaagggtgtcacagctcgattgttccccccgcctgcggtctggtgagtgggggtgtgttacagtgtcaccccccctttttttttttttgagacagagtctcactctgtcactaggccagagtgcagtggcacagtctcggctcactgcaacctccgcctcctgggttcaagcgattctcctacctcagcctcccaagtagctgggagtacaggtgcctgccaccacacctggctaatttttttttttttttttttttttttttttgagacagagtttctctcttgttgcccaggctggagtacaatggcacgatcgcagctcactgcaacctccacctcccaggttcaagcgattctcctgccttagcctcctgagtagctggaattacaggcatgcaccaccatgcccggctaattttttgtatttttagtagagacagggtttctccatgttggtcaggctaatcttgaactcccgaccttaggtgatccacccgcctcagcctcccaaagtgctaggattacaggcatgagccaccacacccagccagtttttgtgttttcagtagagatggggttttaccatgttggccaggatggtcttgatctcttgaccttgtgatccgctcacgtcagcctcccaaagtgctgggattacaggtgtgagccaccaggcctggccgtcaccccctttttgaatctgtgattcagcaagtcccaaatgcttctcccatgtccaagaaaaatgaaggtatgcagacaaccggagggtgagcaggacaacgttttgttgagcaacagaacagttctcagtgaagaggggagccaaagtgggcagcccctactcaaagttgggtacgcccccactgaagtcccccaccatgcacagcctataattttatctttgacttggcattcttttttttttttttgagacagagtcttgctctgttgcccaggccggagtgcagtggtgcgatctcggctcgctgcaacctccgcctccagggatcaagtgttctcctgcctcagcctcctgagtagctgggattacaggtgcccgccactacacctggctaattttttgtttgtttgtttgtttgttttttgagacagagtcttgctctgttgcccaggctggagtgcagcagcgcaatctctgctcactgcaagctccacctcccgggttcacgccattctccggcctcagcctccccagtagatgggactacaggcgcccaccaccacgcccagctaattttttgtatttttattagagatggggtttcaccgtgttagccaggatggtctcaatctcctgaccacatgatccgcccacctcggcctcccaaagtgctgggattacaggcgtgagccactgcgcccagcctaatttttgtatttttaatagagacagggtttcactatgttggtcaggctggtcttgaactcctgacctcatgatctgcctgcctcggcctcccaaagttctgggattacaggtaacattcatttttaatgtccctctaacacacccagactctccctctgtattttgagatgtaaattttgctatctgatttttcacctaagagttcttcctttggtatgtcaatttagggctatcaagctgaaaattgcctaagacaatgaaacaggttatcaagaaattggaagtttaggccgggcgcaatggttcacgcctgtaatcccaacaaattgggaggccaaggcgggcagatcacttgaggtcaggagttcgagaccagcctggccaagatggtgaaaccccatctttactaaaaatacaaaaattagctgggtgtggtggcacgtacctgtaatcccagctacttgggaggctgaggcaggagaatcgcttgaacctgggaggcggaggttgcagtgagctgagattgcgccattgtactccagcctgggcaacaagagcaaaactccatcttaaaaaaaaaaaaatacaaaaattagccgggcgtggtggcaggtgcctgtaatcccagctacccaggaggctgaggcaggagaatctcttgaacccaagaggtggaggttgcagtgagttgagactgtgccactgtactccagcctgggtgacaaagtgagactccaactcaaaaaaaaaaagaaaaagatcgaaagaaagaaattgtaagtttaaaatagtagaaaaaaaagaaggggtcttatgcatcttctgtgtgtcgaatgcatctatgtatctatgagtcatgtatacaatgtttcactaccaaaaatatataaaagagttttaattaattgggttaaaggaaaaaaaagcacttaaatactgtatcagaaaaatataaacttttttttttttttttttttttggagacagaatgttgctctatcacccaggctggagtgcaggggcacgatctcggctcactgcaagctccgcctccagtgttctcacgccattctcctgcctcagcctcccgagtagctgggactacaggagcccgccaccacgcccggctaattttttgtatttttagtagagacggcgtttcaccgtgttagccaggatggtctcgatctcctgaccttgtgatccccccgcctcagcctcccaaagtgctgggattacaggtgtgagccaccatgcctggccagaaaaatagaaactttaagcccaaatgctttttcaggttcatgtgacttaagtaaatccttaaaaaataagctagttttaaaattattggtaaaataaaatagaaatgccttcagaattgtcaacatacattattgtttagatttattggtaaaggagttcaatatttatcattacgagatactgtaagttgtcaaaatttggcatgagggttataaggcttgcaacacaaaagggaattatgtttgactaatttcttgataaataaggcatttaatattgtttaatggaaagagataaatcctgagttgctggcaaaaaaaaaaagaggaacatttatttaaccataaggttcttacttaggtaaacacctaaaattcacaggctataaaaatggttaggccaggtatggtggctcacgtctgtaatcccagcaatttgggagtctgaggtgggcagatcacctcagatcaggaattcaagaccagcctggccaacatggtaaaaccccgtctctactaaaaatacaaaaattagctgggcatggtggcaggtgcctgtaatcccagctacttgggaggctgaggcagcagaatcacttgaacccaggaggcggaggttgcagtgagccaagatcacaccattgtactccaacctgggcaaaaagatcaaaagaaaactccatctcagaaaaaaaaaaaaaaagaaaatggttaacagagaaataactttaaatgaagactatcacagttttctttcctttttcttttttttttttgagaagagttcactctgtcacccaagctcgaacgcaatggcgtgatcttggctcaccgcagtctccgcctcccaggttcaagctattctcccacctcagcctcccaagtagctgggattataggtgcccacaaccacgcctggctaattttttttttttttttttttgagacagagtctcgctctgtctcccaggctggagtgcagtggtgctatctcggctcactgcaagctccgcctcccgggttcatgccattctcctgcctcagcctcctgagtagctgggactacaggcacctgccaccacgcctggctaattttttgtatttttaatagagatggggtttcaccgtgttagccaggatggtcttgatctcctgaccttgtgatccgcccagtctggctaatttaaaaaaaatatttttatagtaggctgaggcgtgagaatggcatgaatctgggaggcggagcttgcagtgagccgagactatgccactgcactccagcctgggcaacagagtgagacaccatctcaaaaaaaaatttattttaaataaacaaataaataattacagatgtaaagatagttataaggagatatttttagtatgaaaagttaaaaggaaaataatttcatatgagaaagaatcttgtgtggtaaatttttgttctaaaatggctagttattttggaaagagggatgttcagaataaaacaggaagtccaagtatatcataaatggtttgtgtaagttttgataaagtttgtaaaaagctttttttttttttttttaagatggagtctcgctttgttgtctgggctggagtacagtggtgcaattttggcctatgtcagattaacaaggctttcttggagcattaacccactctttaattaaaaaaaaaaagttataaaaatgtttatggaaattatcttttttgtttttgaggcagagtttcgctcttgttgcctaagttggagtacagtggtgtgatctcagctcactgcaacctctgcctcctaggttcaagcaattcttctggctcaggctcccaagtagctgagattacaggcgcccacaaccatgcctggctaatttttgtatttttggtagatacgtggtttctccatgttggccaggctggtctcgaactcctgacctcaggtgatcgacctgcctcggcctcccaaagtgctgagattacaggtgtgagccaccgcacccagccttatggccttattttttttgtttttttttagatggagtcttgttctgtcacccaggctgaagtgcagtggtgtgatctcggctcactgcaacctccacctcccaggttcaagcagttctcctggctcagcctcccaagtagctgggatcacagacgcacactaccatgcctggctactttttgtatttttaggaaagatgaggtttgccatgttggtcaggctggtcttgaactcctgacctcaagtgatccgcctgccttggcctcccaaagtactaggattacaggcgtgagccaccacacccagcctgaaaattatatcttgtgctcaagatgattacaatttaatagatttgtttataaaattttagagagatttaattggccttatgctgtctttatcttttgagaagaaattccctcaaagaataaaggtttctacatttttttttgaaatctttgagttatctcagcaccataggaaaggtaaaaacagaaaaaaaaaaagaaaataaaaaaagaaatctgtgagttatcactgtggctaagtgaatgacttattttacaatgacctgtgatcctatttagtgatagcaactgttttaaaactttttctaggccaggcacggtggctcacacctgtaatcccagcactttgggaggctgagatgggcaaatcaagaggtcaggaaatcaagaccatcctaactaacatggtgaaaccctgtctctactgaaaatacaaaaaattagctgggcgtggttgcaggcgcctgtagtctcagctgcttgggagactgaggcaggagaatggcgtgaacccgggaggcagagcttgcagtgagccaagattgcagcactgcactccagcctgggtaacagagcgagactctgtctcaaataaaaacaaaaacaaaacaaaacactttttatatttgacaaactttccaaaatcaaattctttcttcagtcctcattaatttttgtgtgtgtgtgtctgatggagtctcactctgttgccccagctggagtgcagtggcacaatctcggctcacttcaacctccacctcccaggttcaagcgattctcctgcttcagcctcccaagtagctggaactacaggtgcccgccaccacacctggctaatttttatatatttttttctttttgagatagagtcttgctctgtcaccaaggctggagtgcagtggcacgatctcagctcactgcaagctccgcctcccgggttcataccattctcctgtctcagtctcttgagtagctgggactacaggcgcctgccaccacgcccagctaattttttttttttgtattttttagttgagacagggtttcactgtgttagccaggatagtctccatctcctgacctcatgatccacctgcctcagcttcccaaagtgctgggattacaggcgtgagtcacctgcctcagcctcccacagtgctgggattacaggtgtgagccactgcgccaggcctcccaaggtgttgggattacaggcgtgagccaccgctccgggcctcccacagtgctaggattacaggtgtgagctgctgcacctggcaattttttgatattaggtcccctgaagtccaaaaagagatatatggcttatttggtataatgaaatcatacaggaagcattgttaaaggtgaaatggtgtttttcttgggattatatttatataaatgtgttgttagtgtgtgttccaaaattgtatgagatgcctgtgattctgatacatcttagtatatggtattagtagtaattatgattattatgtaaaattgttgtatgccacataagtaaccaaatttgcttgtcaattatgtcttttttttttcttttttctgagacagagtcttgctctgtggcccaggctggagtgcagtggtacagtcttggctcactgcaacctctgcctcccaggttcaagcgattctcatacctcagcctccagagtagctggactgcaggcgcatgctaccacggccagataatttttgtatttttaatagagacggggtttcttttttttttttttccctgacagagttttgcttttgttgcccaggcttggagtgcaatggcgcgatcttggctcactgcaacctccacttcctgggttcaagcaattcttctgcctcagcctcccaagtagctgggattacaggtgtacaccaccatgcctggctaattttgcatttttttagtagagacatggtttcaccatgttgatcagggtcgtctcaaactcctgacctcaagtgatccacccgcctcagtctcccaaagttttgggattataaatgtgcgccactgcacccggtcaagacagggttttgccatgttagccagggaggtctcaaactcctgacctcaagttatccgccctgcttggtctcccaaagtgctgggattgcacacatgagccactgtgcctggcctcaattatgtctttaactgtggctgttctaagacttttgtcatccacaattgttgttttacttttatcctttcacagagcagtttataatcagctatagaactctgaggtactcttcaatctaagtttctgatcacttttgagattgtgccattggaatagagcaaaaaacttccaagactctcattgagagctgctatattcatgaggattgttcatccaatattgggcaaaatgagagttaattttatggactaaactaatataagactgaaataatctttttatgtttttgcttaaaacattactgattctttctgttctttcagaaccaagaaaacttttttttttttttttttgagacagaatctcactctgtcgcccaggctggagtgcagtggcgccatctcggctcactgcaagctccgcctcccaggttcacaccattctcctgcttcagcctcccaagtagctgggactacaggcgcccaccaccgcgcccggctaattttttgtatttttagtagagacagggtttcaccgtgttagccaggatggtctcaatctcctgaccttgtgatccgcccacctcggcctcccagagtgctgggattacaggcgtgagccacggtgcccggctggtaacttttttaactttgagctatttgcagcttttagcaattgagtaaagtacactcctgtgaggaagatttggaacatatttctgttttcttttttgttttttatattttgcttgggtagcatatttctttctgatttctccaaaaattgggaactatctgtgagcactatttaaaaaaaaaaaaaaaacttttccctctcccttcccctatttgtattctaatgtcaatataatgatgtgtgcacgtgcagtaacaatctgttttctcttgtaataggacatagagacactgcatattttaccaaggctttgactggaatggcatgctttcaaatataaacagacggctttaaggaatcagagttgacctatagtgcccatcaaagcccttgggaaaactggcttcatactgtatccacccagtggattcttcttgcccagatggagcccatgtatcaaggtagggaaactgcaatagagaaagggtttaattcacacagagacaagtgaatgggagaccagaatttgatgattactgaaatcagtctccccaagaatttggggactagggtgttccaaaggtagtttgggggaaggggtggggtagcttggcagtgggtgcttgctgctgatgggttgtgggggcggggggccatcgtagggtgtgagacaggatcctcccgtgtgctgaaccgcttctgggtggggctgcaggagtagttggcaggtccaggtggagccatcatcagtcagtgggtcctgttggagccgtaggtatcagacatgcaaaaaacccttgcgaggtactgcaaaaggccaatcttaggttacaatagcattgttatctgcaggacctctggaataatggctgataattgtttatgtctacatcttagccaaattcaggctcctctcctctccctagcctggtggcccctcattagttttacaaatacagttgagttttggggaggggctattatcatgtaaactataaacatctcccaaagctagcccaagaataactgaaggcagcttgaaggctaaaggtcaaagggggtttggctacatcagatcttccccaattggcataattttctcaatgatacaatttttgtggccgggctcggtggctcacgcctgtaatcccagcactttgggaggccaaggcgggcagatcacgaagtcaggagattgcaaccatccttgtcaacacagtgaaaccccgtctctactaaaaatacacaaaaaattagccgggcgtggtggcgggcgtctgtagtcccagctacttgggaggttaaggcaggagaatggcgtgaacctgggaggcggagcttgcagtgagccgaggtcgcaccactgcactccagcctgggcgacagagcaagactccgtctcaaaaaaaaaaaaaaaaaaaaaagcctacatggtaaatatttattcttgctacagtttatacaaataaccaggccaagtacaataagactaaaacttattttgaaaacaaatcagtactacctgatttcactttggtaaaaataggagactagagagagaaaaattatgtttcaaaataaactatagtatacctgttattagattctagccttgcctaaggtttttcaacttttattattttctctttttttgtttgtttatttgttttttcagacagggtctcactctgtcacccgggcagtggtgtggtatcagttcactgcaacctctgcctcctgggttcaagtgattctcgtgcctcagcctcccgagtagctgggattattggtgtgcaccactatggccagctcatttttttgtatttttagtagagatgcgtttcaccatgttggccaggctagtctcgaactcctgacctcatgatccaccggcctcggcctcccaaagtgctgggattataggcatgagccactgcgccgggccaaagccgtgcttttcttaaagctctgcgaacgaaagctagacaacttaaacctcagaagagaataatggtacctatttatatacataaaccactttcacgcctgcctgctgtgtatggacttcagaggaacacagcctacgtcagttttctaggattgttctctccacgtgctctttgttttctttctttcttcttccctctattttcctccctccctcccttccttccttcctttcacaaagtctcactctgttacccaggctggagtgcagtggcacgattttggctcactgcaacctccgccttccgggttcaagcgattctcctgcctcagcctcccgagtacctgggactacaggcaaccaccaccacacccagctaattttgttagttttagtagagacggggtttcaccatgttggccaggctggtctcgaactcctgacctcaagtgatctgcctacctcggcctcccaaagtgttgggattataggcatgagccactgtgcctggtcacaacacctgcattttcttttttttttgtttttttttttgagacagagtctcactctgtcacccaggctggagtgtagtggtgtgatcttggctcactgcaagctccgccccgtgggttcacaccattctcctgcctcagcctcccgagtagctgcaactacaggcacccgccaccatgcctgcctaattttttgtattttttagtggagatggggtttcactgtgttagccaggatggtctctatctcctgacctcgtgatcgacccgcctcagactcccaaagtgctgggattacaggcatgagccaccacgcctggccaacacccccattttgtataccacactcaactcccccattttctacatgctgatcaaaaccaatctgaatggagtctaggtctggctgtgggctgttgggaagaggcccccaaatctggccatcaactggccgcaaaactggccataaacaaaatctctgctgcactgtgacatgctcatgatggccatgactcccacactggaatgagggcaaggaacacctggcccacccagggcggaaaaccgcttaaaggagttcctgaaccacaaacaatagcatgagcgatctgtgccttaaggacgtgctcctgctgcagataactagccagacccatccctttatttcccgtaagaagtgcttttaatctataatctatagaaacaatgcttatcactggcttgctgtcaataaatatgtgggtaaatctctgttcgaggctttcagcttcgaaggctgtgagacccctgatttcccactccacaccctatatttctgtgtgtgtttctttaattcctctagcgccgctgggttagggtctccacgaccgagctggtcccgcagtgggcagtggtttgggcccgaccgagctggtcccgcagtgggcggtggtttgggcccgaccgagctggtcccgcagtgggcggtggtttgggcccgaccgagctggtctcgcagtgggcggtggtttgggcccgaccgagctggtctcgcagtggtctcgcagtggtttgggccctgcttgctcgactggatttcaacagtgaagccagattagaggacatgctggctgccccgatcctggacctggaccaatggtgcttcctaaacattccatgtcaacttttctttttccaccttccagggctgggctgtgaaagagattggagaggcaggtgcctgtgagagaagcttctaccagcctgggaagtcaggtcttccatgagtgaggggaggtatctactttgccaaaccttgttagggaatgctgacatagctgcctcttcctgcccagaagctaagcttgaatgccacccctcacagagcttctctcctgtctttcactcactcctgcttatttctgtgacagaacttgacagcatggacattgccacttgcttccttcagtctcctggagtccccatgtcctgaacacagaggaggcacccaaatgcttgctgaagccacatccctggaccaagtgacctgaccctcacctggaggaccttcaccttcacctctcacctggaggaccctctcacctggaagactctctcacctggaggaccaccccacctgaaggactcccaactggaggaccctcttacctgggggaccccctccgctggaggaccctctcacctggaggaccctcttacctggagggcccttcacctgggggactcccccacctagaggatcctcttacctggaggtcccctcacctggggaaccccccccccacctagaggatcctcttacctggagggcccttcacctggggaaccccccccccccacctagaggatcctcttacctggaggaccccccaccgagaggaccctccccccccacctggaggacctccccacatgaaggactcccacctggaggaccttcttacctgggggaacccgtctcacctggaagaccttcacctgggtaatcgccgtggcctcccactacggcgcagccgggtcggctgcccgggcttcaccctaaaataaggcccgaactgcagcagtcggagccgatccctggagcccagcgcctagggcggacccgcgggagcgtctcttggtaaccgttgctaaggagaggaagcccgggaaggagctttcgcgcctgcgccgcggggccgtccgcgtctgcgcctgcgcgcaagagaggcggggccagcgctcggcatggcggagccagatctggagtgcgagcagatccgtctgaagtgtattcgtaaggagggcttcttcacggtgcctccggaacacagggtgcgcggggtgccacccgggcagctctgcccgcctcgctagcggcactgcccggctgggtctggggagcctcgtgtcgcgctgccgcgccgaggcttccggcacgggcgggaacgacagtcccagagttccccgcggcgggggcggaagccggggcggggcgggctcaggacccccgacagccggtccctggagatctgaggggccggggcgggctcagggatgcctcgcgcccgcggagagacgggcccgggacttgggaagagcaagctccgggatccagctcgggcgctgctgggttcagcgcccgagctgggctttgcaggctgagccgcgagccacttgtttgtggggagaatttacacccgcgacgagttcgagcttgaaggctcccgctgggcttgggctgcatggagcggggtccagcgctgcctggcggcttcacgcgaaccctgggcgcgtcccttgcggaggtgccggtgcctccctctgcagagaccaggagagagcctctgggcgttgggcggtgttgcccaggtgcacggctggtgggggtggagagccctgaactttggccgctggtttgtgtttttaactgctggctggtgctctgagaggccaagccacgtgttcagtaagaatcattaacagatcgtggctggatgacaacaggagccacactttactcatccagacgtgcagcaggcgctcaccgcgttgagagccgtgtgctggactctggggtgaagtagtgagttggccttttcttttttgttgtttttttgagacagggtctagcgctctcgcccaggctggaatgcagtggcgtgatcacggctcagtgcatcgtcagcctcctgggctcaagtgatcttcctgcctcggcctcccaagtgctggaattacaggcgtgagccaccgcccccagcctggcctggcatttctttgagttcaggaagtgtgacaaggatttggacacccagaaataagcgtgtcgagaagagcacaagcagaggatgtgagaaggggaattaaggcgggaaagggagtttgagactaggccatcagtgagtgacaggccagatgcttctgactcggtccccaggtgtcaggaaggaatcagactgaggacaaatgcggccagtggctcacacctgtaatctcagcaatctgggaggctgaggtgggaggattgcttgagcccaggtttgatactgagggttaagagaagggaagccgggaaatgggggctgtgaggtttcaaaccttgctacgtgtgcttttttttttttttttttttttgagacggagtctcattctgtcacccaggctggagtgcagtggcgcagtctcggctcactgcaagctccacctcctgggttcacgccatcctcctgcctcagcctcccaagcagctgggactacaggcgcccgccaccacgcccagctaattttttcatatttttagtagagacggagtttcaccgtgttagtcagggtgctctagatctcctgacttcgtgatccacccacctcagcctcctaaagtgctgggattacaggcgtgagccactgcgcccggcttacatgtgcttcttagatccatggagaaggatacagactctactagttcagagaccccaaaatacagggcctcaagatgatgccttttttcactctcccctaacattctggagagaagcagttgttttgcacaggtgggtcaggcattctggttccattttttcttcccgtcactgaggtgagaagaggtgaaagcttcctttcacctggaagtcacacggtcccttcagctcacattccaaggccagatgccactgggtagcgtttcataacttccaggaggtagtgatacagggatgctgggacagcagcctctgccacagatgtatttttgtatgtgggattgaaagggagtatctgagtggccgcctctgatatttctttcaaagcattggcccagtatcgtcaccaccttttctcatcagaaaagcccaagaggccgggtacggtggctcacgcttgtaatcccagcactttgggaggccaaggcgggcagatcacttgaggtcaggagctcaagaccagcctggccaacatggtgaaacccagtctctactaaaaatagaaaattaggcggttgtggtggcacctgcctgtaatcccagctactcaggaggctgaggccggagaatcacttgaacccaggaggcggaggttgcagtgaaccatgttcttgccactgcactccagcctgggcaacagagcgagactcagtctcaaaaaaagaaaaaaaaagcccaaacgtgtggttgcctttctgtttggtgagcaagacgtgagtgggctccctggtacaaattccatttgaaatttcctcagttgttccatcagctgccaaatttccacactggcaacacccttctgtttcagctgggacgatgccggagtgtgaaggagtttgagaagctgaaccgcattggagagggtacctacggcattgtgtgtgagtggccaaggctaggacatgtggccgcagctcgtggctgtgacagtgtgggacgagactgtcgaagcagcagccgcgttggggctggaagggactcagaccctgtgctctgaaacagggcagaaacctgttcaggaacttcaattcctgatgtagttatcacaaacattgtaccatttctgggtaaacgtaagcatccggttgctaatgcccataatccaaacgtgtcactgcagagtacacagaactgttagagaaataaaatacagaactttccagaagcagcaggagctggacatggtgctcatgtctatcacctcagcaactctggaggagtcacctgagcccaggtgttttttctttttgtttgtttttgagatgggtcttgctctattgcccagactggagtgcagtggcatgatcatagctcactgcggcctcgacctcctaggctcaagtgatcctcccacctcagcctcctgagtatctgggaccacaagagtacataagcacacccagctaatttttaaatttttggtagagatgggatctccctatgttgcccaggctggtcttgaacttctgggctcaaatgatcctcctgcctcggcctcccaaagcactgggattacaggtgtgagccactgcacccggccaagcctaggagtttgaggctgcagtgagctgtgatcacgccactgcaccccagccttggcaacagagtgagaccctgtctcaaaaaaaccaaaaacaccacacacaactaaaggttataacagatgtgaaattggcgtaggtcattctggaagctgcacacattagcaggatgttttgtagagccatcttcacacaaaataaggtttgcttttttctgcatagagtaccttatttgcttttaggacattacaagagagcacaaagcagtgatctgcatgctaaggaggacatggagagcctggagccacagaactgagtggctggaggccagggtccagcacagagcaaagttgggcaccccctgcccagttcaaatgaggaaaccctccgggggaacgcgtctcgggctaggggcgttgcacagagtggggactgagtgtcactgggcatgaggttgtcagaggaaagaacggggacccctgtggctcagggagagcctcccgttcagcgctagggagcccacgaggggcatcgagatgatgtcatcaccaatgtgtttccattccagatcgggcccgggacacccagacagatgagattgtcgcactgaagaaggtgcggatggacaaggagaaggatggtgagcaggaaattggggtgttgggacctcgcactgggaggaggcagaaggatgtgagttacctgaagtttcctcagagcgactgcacggtgcttgtagcgggggccggcctctgggagggttctggtgtggcccagcacatcacccccaggtccacacgcagcctcagctgtctgccaggagggctctgcagtctccatcccctcctccccctcctgtctggtgaggccacctcactgcaggctcagctctgctgtcccctccacccccagcacctgcctgtgcaggcagggccctgccatgccccacatagatgtccacggtgtttagagaggtgccgattcgtatttggtcaaggaagagttaaaagtgcttattgggccgggcatggtggctcatgcctgtaatcccagcactttgggaggccgaggcaggcggatcacctgaggtcggcagttcaagaccagcctgaccaacatggagaaaccccatctctactaaaaatacaaaattagccaggcgtggtggcacatgcctgtaatcccagctactagggaggctgaggcaggagaattgcttgaacccgggaggcagaggttgcggtgagccgagatggtgccattgcactccagcctgggcaacgagcgaaactccgtctcaaaaaaaaaaaaatgcttattggggtcgccccaattctccctgaggtggggacactgcagcacctgctatcaggtgttcgtgaagcccaagagtggctggggttggggcttccccgccatcactggggtggggctcgctgaggccacctccctccccaggcatccccatcagcagcttgcgggagatcacgctgctgctccgcctgcgtcatccgaacatcgtggagctgaaggaggtggttgtggggaaccacctggagaggtacgtggtctcctggtctgcacattgggccctagggagcatgtgtcttgggctagaggtgttgcacagagcgaggactgagtgtcactgggcatgaggttgtcagagaagagatgaccccacctcaccgcctggctcagcccattgtctgagggggacacaggttgtcctgcccatgtcccctcctgcagcaggggaggctccacttccaccccttaggagaaggccggagagtggcatgcatcttctgtttcttccagcatcttcctggtgatgggttactgtgagcaggacctggccagcctcctggagaatatgccaacacccttctcggaggctcaggtgcgtggcagaggggcctggggtgggggaatgggcttcatgggcccttgtggtgcacatttataacgaaacagggcacttggggacttgaagagctgctgctgcctctgcctccacctcccagtgtttcagcgagcttcagtgaggtggaattcctgtggtgggggcatctgctgggagcgggcagccccagggccgagagccttatgagggcactggtttcctgggctgttgggagcaggcagccccggggctgagagccttctgagggcactggtttcctgggctgctgggagcggggagccctgggcggagagccttctgagggcactggttttctgggctgctgggagagtgcagccccggggccaagagccttgtgagggcactggtttcctgggctgctgggagcgtgcagccccggggccgagagccttctgagggcactggtttcctgggctattgggactgctagtcctgctggccagtgtgggtgtggcagggcccagctgggcttccctgcaggctcaccctgactggtacctctgaccctctgcacaggtcaagtgcatcgtgctgcaggtgctccggggcctccagtatctgcacaggaacttcattatccacaggtgggtgacagctaggcagagttggaagcacaaattcggctgaggcctaactctgctgcccctgtggagttactaaaagctcaggggttcccagctgcagcagcctgcccgctgctcgcactccatttgtgtttttttctaaaatagagaaggggtctctctgtgttgcccaggctggtctcacacacttgggctcaagtgatccacccaccttggcctcccaaagtgctgggattacaggtgggagccaccacacccaggcatgcactccgatttttaaaaggtccaaacatcaacagcatgtaagagttaatgaaaaaaaaaataataaagatactacgccgggcacagtggctcacgcctgtgatcccagcactttgggaggccgaggcaggcggatcacgaggtcaggagatcgagaccatccttgttaacacagtgaaaccccatctctactaaaaatacaaaaaaattagccgggcgtggtggcgggcgcctgtagtcccagctacttgggaggccgaggcaggagaatggcgtgaacccgggaggcggagcttgcagtgagccgggattgctccactgcactccagcctgggcgacagagtgagactctgtctcaaaaaaaaaaaaaaaagatactaaaaagcccaaagctgaggaaacgtgcaggaagtctacgggcattggtgccgtgggggagctctcagcccctgtggccctctgggagccacctgccactgtttttccatcacagggacctgaaggtttccaacttgctcatgaccgacaagggttgtgtgaagacaggtgggtgcaacttgggccaggccctgtccctagatggcacttggtgacacacactcccctctctgctgcagcggatttcggcctggcccgggcctatggtgtcccagtaaagccaatgacccccaaggtggtcactctctggtaagtccttctgaagcatggtggcccctggggaccaggcctgtctggtggaggtctccttggggatgtcaggccgaagctgcaactggccttgggaatgttaagctacagggtctgtgcacactcagaaacgttgggtctaggacagcctccaggacacagcagggctgtgccacaaaatggtgagagacgggctcagtggcgtcaagggcctgcctagatcagacacacctcgccttgagagctggaaacaccgtggccgtgaaaccatctctggagggaaggctgcttcacnggactgaaggacaggcagcttgcatgctttccctggttcttcctcctggatacttttaaccaaacagggtcatgcttagccagggctgaatatcagagttggtcagaatcaggtcaggaccccagtgtcgtgtactccccatctgagaacgggttggtagtggctggtgtggctgtgtgccgagggtccgtggtccctgcgactctcaggacaccgctgcacgtgacagctctcgcccccggcaaccattgctgtgtgtgccacctggatctgcagggcctggggcagagggtggtccgagttgggacaggtttccaggccaccacaggctctcggggaggctgtgtcctgtggaggcctgggctgggggagaggagccggctgtattgaggtgggtgcttctgtgtgtaggtaccgagcccctgaactgctgttgggaaccaccacgcagaccaccagcatcgacatgtggtgaggagatacggttaccgctcctggggcctcaggaagggctgggacaggagccgggtcacctggttcctgagctcagcctcaggggaggggcaggagtgcagtggggtctttgccagcctcccactcccagggaggtgggcctgagcctggaaacccaggaggaggtgtgagaacttagcttgctgttctcaggctgggagcacagaggtctggaggaggcacgcctgcccctgcacttgtcaccccgggaggcctgcggggcccaggaggggagccagtggtccctgcctgtccttcacagtgtccctgacccagcgtgcctcacactggcagggtcagcaaaggtctggctgcagtcaggtcctctgttcctcgcgctggcggggtcagcagacgtctggccgcagtgaggtccactgttctctgcagggctgtgggctgcatactggccgagctgctggcgcacaggcctcttctccccggcacttccgagatccaccagatcgacttgatcgtgcagctgctgggcacgcccagtgagaacatctggccggtgggcgtcctgggcagacccgcagcccccgcccgtgcccacgccctctgcgcccgcagcccccgcccgtgcccacgccctctgcgcccgcagcccccgcccgtgcccacgccctctgcgcctcagctcctgcctcccatagggcttttccaagctgccactggtcggccagtacagcctccggaagcagccctacaacaacctgaagcacaagttcccatggctgtcggaggccgggctgcgcctgctgcacttcctgttcatgtacgaccctaagaaaaggtgctgatctctgcacggggggcagggaccctcaccacccacactgtccagaccgtttcccagagcccagcctcactgcggtggagaggcccctccccaggcacagccgctcggagtggccacctggcttcctttgagcatttgaatcacaggctgctcagctgggtgggaggtgaggaagccgcactcacaagtcgcactaacgcaggctgcctcctccagggcgacggccggggactgcctggagagctcctatttcaaggagaagcccctacgtgagtgtgcagggttcctgactcgctctgtggggtatggctgggagcccgttttgcccggggtgggtggtggagaagtggcctgctgccctcactgacggcacaccctttctggggtaagaggacaggggcatgtggaggcacagacagcccagggccaggtccagaggcagagctggactcagacctgggcctgctcctcctatctggggccctgccccgcccagcactgaacccttctccctgcagcctgtgagccggagctcatgccgacctttccccaccaccgcaacaagcgggccgccccagccacctccgagggccagagcaagcgctgtaaaccctgacggtgggcctggcacacgcctgtattcccacaccaggtcttccgatcagtggtgtctgtgaagggtgccgcgagccaggctgaccaggcgcccgggatccagctcatccccttggctgggaacatcctccactgacttcctcccactgtctgccctgaacccactgctgcccccagaaaaaggccgggtgacaccggggggctcccagcccgtgcaccctggaagggcaggtctggcggctccatccgtggctgcaggggtctcatgtggtcctcctcgctatgttggaaatgtgcaaccactgcttcttgggaggagtggtgggtgcagtccccccgctgtctttgagttgtggtggacgctggcctgggatgagagggcccagaagaccttcgtatcccctctcagtcgcccggggctgtcccgtgcatgggttggctgtggggaccccaggtgggcctggcaggactccagatgaggacaagagggacaaggtatggggtgggagccacaattgaggataccccgagactaccaggagagccctgggctggaggctgagctgcatccctgctccccacatggaggacccaacaggaggccgtggctctgatgctgagcgaagctataggctcttgttggataaaagcttttttaacagacatggtttcaccagcgtttaatgtgctctgatgttgaccgtccctctgagtgttctggggaggagggggtggggcggagggtcaggaaagcaggctcagcttccagggtcagggagttgtgggcccagaggggctgtcacagtggatgcaccctgccctctccctcgccagacccgagggtagggcagaggcacctcctcgccagcctgtgggctgcacccacagggaatggaggggaggggcaccattaccactggacccaccaagaccccgccgcctgggcgggctgtccacaggcccttccgcccagcagcagtgacgctcagggccttcccagctgtcagccactgcccgttcctgcgcctctcgtgcacctccacatctggtttgaggtcaggtcatttcctgtctgtgggcccagctgctgtgacacccaaggggagggccggcgtccccgaagccaggtcagccgtgcacccggcagagccccgcagattggctccagcagagcttggggtggggggagctcggtgtcaccaacaggcccttgaggacactcgtgtggagaatccctgggacacgtggaggacccccaagtcctgagccccgtactccgtactgcagggagcaggccaggagccacgggccttggggcacagggtccttctcagggacaggttcaggcactggctggaacaggctggacccctctacccagcacatgtgggcatgcgtctgggttccgagggtggggaaatgtggaaaggctcctgctggccggcttaggcctgctgcccttggagccttccatatacagagagtcccacctccagcaagggttggcctggactctccaaccccctgctgtgcccaggactcccccagggacaaggcaaccagaggcccagacccctccccagcaaagagaagcaccacgggagctgtctcccaagagcccttgacctggggcccagctggcctagggccgggccccggggctgttgtagagcagagtgtccatctgtgcacgctgtagccacaagcgccgctgggcgtcgccaagcagcacacgcagcgagtggcctggacggcaggcgggcagggctgcacagtgggcagcatgcagctggcgacaggtgtcgcagcagagggtgggcagggcgccaggggacaggcagctgtgtgcctggtagcctgggggctccgagacagacctataggctgaggctggtaccccctctgcccgaatacgcctcgggctggccgctgcagagctttcaggggtggccaggtccccaggcctactcagctcacggcgcagagagaggaaggagaaggcggaaggttcaggttccagcccctcctccaaggccccatatggtgggctgctggcctgcggcagctcctcagctgggggctcccaggcccggcccccagtgccccacagtttggcactctgctcccagagtggtggcctgtaggccagctccgccgggggcgagtcagggcctggtgacggctccccatacaggctggcgtcctccgacccctcgtcttcctgcaagtcccggtataagtccagtggggccctgtaagcagcaggggagcctcgggggggcaggggtggcggctcctcatcctgggccagccgctgctgcagccaggccacacaggaggccacgtccccgctggcacgccgtgcctgcagcagctcctcagctggcagcacactggtgcccagctgggccagcacctcacccaggatctcacactccagccggagggcgaagcagcccagggccacctgcaccagctggcaggcggggggcagggcggtcaccatgagccgatggctgtctctgcgtacgtagcccatcttctggaagctcttcaggaggaggtcgtctgagagcacacccttcagcacgtgcacgtagcccccagagaaggtctgcaagggagcggccaggtcagtgactgcccaccctcccataggccagaccctagggtacagtgggtccgggatctgttggctcaggccttggcagcttctgatgctcagacccaaccccagagactaggcttagccagcttgggccaggcccaaacatgatgatttctttttttttttttttttttttttttttttgagacagagtcttgctctgtcatccaggctggagtgcagtggctccatctcagctcactgcagcctctgcgtcccaggttcaagcaagttcccctgcctcagcctcccgggtagctgggactacaggcgcccaccaccacacccggctaattttcatatttttagtagagacagggtttcaccatgttggccatgctggtctcaaactcctgacctcaagtgatccgcctgccttgagctcccaaagtgctgggattacaagcgtgagccactgtgcccggcctagaatttttttttttttttcttttttgagacagagtctcgctctgtctggagtacagtggcacgatctcggctcactacaacctcctcctcccgggttcaagcgatcttcctgcctcagcctcctgagtagctgggattacaggtgcgcaccaccacgccccactaatttttgtatatttagtagagacggggtttcaccatgttgaccaggaaggtcttgatcccttgacctcatgatccacccaccttggcctcccgaagtgctgggattacaggtgtgagccaccgcacctggccgaatttcttaaatttaatggaaaaaacaatgaatacattaacctagctcacaaatcagaacaaaatgaagagcccctgtactgagaaattccactgtcttctgtcccaccgctcccttcacccctggagatggcctcatctaattagttttgaatgtacttgcccaggtgtttgttttgcaaacccaaatacagatttcgtttgctcctcgtatgaggtagtccccccttttttttcacctctttgtaaggtctctaaccaaagctagacaggtagcctcttaaacgtgttgttctgaactttgtttttttccactacagtcttgcagacaaggacagaagctgtaacgttcattccccctgctgtgtagtattccaccatgggggtgacacgtctgttttcagcgctctccagaggctgtccatgcactgggctgacagccgtgggacggtagaagggtgagtgctcttttttttttttttttgagacggagtctcactctgtcaccaggatggagtgcagtggctcgatctctgctcactacaacctccacctcccaggttcaagtgattctcctccctcagcctcctgagtagctgggattacaggcgcgtgccaccacacccagctcatttttgtattttttaatagagacggggtttcaccatgttggttaggctggtgtcaatctcctgacctcgtgatctgcccacctcggcctcccaaagagctgggattacaggcgtgagccaccgcgcccggcctggctgagtgctttctagcctacacttaggtgaagaactaaaggagctcaggacaatcactgcgagcgtctcctgactctcaaattccctaactccgggactcctagcatctaatgcctggacacggcccacgtgtggagcgcccagtgcctgcagcactgagctcggggctttgattcattcctctggccccatgaactggactgttcccgtgtcgctgtctcaggaggaaaggggctgacagagattagctaatttggccaagtcctcgcggccaggaagcagcagaactaagtccaaaccagggctgtccggcactgaagccggttattcccccgccccgccccctgggaggcctcaagggcgggcctgtccgtcctctctcatgaatgaaagtcctggcgcctccgaccagcaggtgtccccggggagccgcggagagactgccgctgccatggcaaccggcggaggcgtagctcgcccacgtgcccagtgacgtcatcggcttcctactcttccgaattagctcagagctcccggcggccctgccccctcctgccgccaggagctcacctggagaggccaggccagccctgggcacagcctcccgccccaggccgtggagttcactaggtctgagcccagccctgagacttcacagggatgcacccatctgcagtcctcccagcctcggcggcctcctctgcaaatgggattggcccataacctggaggaattaggatgaccatgggaactcaagtcccttctgtgcccccgtcctaagatttccatggcaactggggccgcgaggcctcttagggaagacactgacgcaagctctcagggcaggaccccgtaggcagcacccaagcctgccctcgcccaccccatgttctcagccctaggagtgggtgcccccacacgcccacgacccctcagcgctcggagccttgaggagcccaccaggcactgaggacacttgaagcccctctctctcgaaaggcgtggtcccccatggtcggcggccccgcgacccgcaggccaggacgaggggcgcgctcctcctggcctggcgcctaccttgatggtggtgaactccttcctccagggcagcaggtacaggtgcaccgcggcgagctccagaagctcgaaggcgcgagccaggccgcgtagcgcgggcgccaggtcggcgcggccccacagcccgtcggtgagcagagccagcgcgtcgtcctgcagcgccccgtgcaggtcgaagtcctccaccaggatctgccagagcaccgcgcgcagcgaggggtccccgcacacgcccgcgcggccccgtcgcagctcgcgctccaggcactggcggtagtcctcggacagcgagctgctgcccatcctgcggcggacgggggtcgggggggtcagggacctaaggccgcgcccagcccgccgcgctctccccgaaccctcacccagcgtccccaggacccctcgagcctggagaccccgcccccagcggctgggcgcccccggtatcttcggcaccccctacgctggagacctcggccccatcagctgcccgcccacccagcgatccaggcccctccagttgagcgcccccgcacctccagcccctccctccagcctgggtacctcggccttccaggggcgcccccggttatcgaccgcacccttctctagagacgcgcttccgcccgctgagccctctcccgaccagagccccttcgcccggcagatggagctgcggatcccgcgggtgacggcgctacctgtctgtccccagcggtctccggccgccgcggatcagttcgggcctccccgcgcgccgcgcgcttccgccgggagtcggctccgcccggggtccgcggccgtgacgctgggggcggggcggggcttggcgcaggccccgcctccgaataatttaggaggggcggggcctggtgaaaggggaggaggaggtgtcagcccggccgagcccctgcgcgaggcaccccgagagcctcctgtcaccgcgtcgcccgtctcctcgcgggaccggtatcgttcacgacgccgctgggccgagggctgcgggctcatggcaggcgctcagggaacgttgtgcctgggccgctcctccccacgagacagggacccagccccaggcgacccggccgcggggaagcaggtgcgcgggctcgtcccctggggggtggggccaccggcattacctggcggggattggctggatcctgggaagagcctttcctgcggggcggggccacctgcattacctggcggggattggccggatccgggggcgggcctcccctgtggggcggggccatccccttgagggaggggcccgcggcacggaaggtgggcggaaggacaagcctttcagcctcgtctgaaacagcagcctcaggtggatgcggggacctcagattctgtttatgctggctccgcttcccggcctcctgcacttgccatctgcagcccttgagagcatcgtctgggcgggtctctgaggcagggcgaagccgcccccctctctaggctaaaagctgacctgggctgcggatccacccaggctaaatctgggccacgacttcccggggacgttttcttcgctcgggttcctctgttctgtgctacagccactttctcgcattgcccagaagtagaggaggatgagggagacccttggaggtcccagccgaaacccacccctaccccacacccccgctttgggcaggctttgctacttcacgtctgtgtccctcatctctccaggccaccaaaaccaaggcccaagtttgttgaaactttccctgggcctgggcggcgaggtcccccctttttcttagattttttacctggaagttccctgctggcatcttagaaatagtgatcatgaccgggtgcggtggctcacgcctgtaatcccagcactttgagaggccgaggcgggcggatcacctgaagtcaggagttcaagaccagcctggccaacatggtgaaaccccgtctctattaaaaatacgaaagttagccgggcgtggtggcacatgtctgtaagcccagctacttgggaggctgaggcaggagaattacttgaacctgggaggcagaggttgcggttgcagtgagctaagatcgtgccactgcactccagcctgggtgacagagcgagaatgtctggaaaaaaaaatcgtgatgcagtcggtggatctccctgagttatctaggtggccacctctggacagggagctcttttacttactgtttactgaactcactcttggtgcccagtgccaccatgggtccacaccagtcctcaggacagctaacttcgtaagtctcatctttattcttcttctgatgcggaggagggtggaggtaactgttctgcctttgtcctcactgaatttggcaacaccagtccatccatccagcagtgggcctagctctcctcccataggcctgggtgggtttttgcacctgcctcaacccatggaatagaactgatgtggaatgaattccaaggctaaatcataaacatgccataccctggccttgtcttgagatccttggcctctgacatggtttggttctgtatccacacccaaaatctcatcttgaattgtaatcccacaggtctggagcaggaccaggtggagataattaaatcttgggggcagcttcctccatgctgttctcgtgatagtgaattccacgagatccgatggttttataaggggttctcccctttgttcagtgctcattctcgctcctgtcgccctgtgaggagacgccttctgccatgattgtgagtttgctgaggccttccccagccatgcggaactgtgagtcaattaaacgtcttttctttataaattatccagcctcaggcagctatttacagcagcatggggacggactaacacaccctcagaacccagccactagagtgagaaggccacggccgtgtgcagagcttttggcctgcaacttcgacctgcgactcacattcacctgcagcctattcttgggacttttttggaaatagtttttccagacaaaaatcaagatgagtttgttctgggccgagcgcagtggctcacgcctgtaatcccagcactctggaagaccgaggcaggtggatcacgaactcaggagatcgagaccatcctggctaacacactgaaaccccatctctactaaaaaatacaaaaaattagctgggcgtggtggcgggcatctgtagtcccagctactcgggagactgaggcaggagaatggcgtcaacccaggaggcggagcttgcagtgagccgggatcgcgccactgcactccagcctgggccacagagcaagactctatctcaaaaaaaaaaaaaaaaaaaggatgaggttgttctgggttggcatgggccctcaatccagtatgactgctgtccttatgaggagagagaaacttagatatgaacgcacaggagagaagaccgcttaaagacggaggcagagtggaacgagggtgccgtgagcgaaggtaacacagctgtgttagagccaccagaaactggaggcaaacagaattctaccctaaagcctccagagggagtcagccctgctgacagcttgattttgacttcaggcctgcaagatggtgagagagaacatttctgttgctgtaagccacccattttgtggtcgttttggcagcccctggcaacacatccagtcctcacgtcgtcgttccgacagccctgaatgaggtcccagccgacagctggcaccaaccatagacagcagacagctcttcggatgaatccaacccctggtcattgggttaccacctagaaacagcctcccatgatgctgaggagccatctggctgatttttgtactttttgtattttcagcagagacagggcttcactatgttggccaggctggtctcaaactcctgacctcaggtgatccacctacctcggcctcccacagtgctgggattgcaggcgtgagccacggtgcccagcctaatttttaactttttagtagagaggggggccttactatgttgcccaggctggtctcaaactcctgggctcaagtgatccccccgcctcagccttccgaagtgctgggattccaggtgtgaaccaccatgcctggcgtcttgagtatttaagcccctgagttggggtagtttgttaggcagcggtggctacgtgggctgtacacattcacggctccctcccttcctgcccggggatggacactccatgagctgccgtgtggattctccgtccttccctgccctcccgggacagacactccattgcctccactgcatatacatcctctaaaaccggcagcagccttgccaggtcggaggttccgtccacacttacctggactccaggactgcacctggtcccctggggccactgccgtgtccaccccacagtgtgcgtgagctccctccccctcctgtactcagcatcgtccagcttcctcatcttctccggtccaatggatataaggttacatcttgtttacttttcatttgatttttgttatgatttggacactgcttatgcagaatagttttatttttatttttttttagatggagtctcgctctgtgctcaggctggagtacaatggcgtgatctcggctcactgcagcctctgcctctcaggttcaaacaattctccggcctcagcctcctgagtaactgggactaccgccaccacgctcagctaatttatgtatttttagtagagacggggtttcgccatgttggccgggctggtctcgaactcctgacctcaaaagagccgtccgcctcggcttcccaaaccgctggggttacaggcatgagccactgcgcccagccattactttttattttatttttattttttgagacggagtttctctctgtcgtccaggctggagtgcagtggcacgatctcagctcactgcaacctctgcctctcaggttcacgccattctcccgcctcagcctcccgagtagctgggactacaggtgcgggccaccacgcccggctgattttttgtatttttagtagagacggggtttcaccgtgttagccaggatggtcttgatctcctgacctcgtgatccgcccacctcggcctcccaaagtgctgggattacaggcgtgagccaccgcgcccggccatttgtaggatttctaaaaggaagctgctattattcattcctgtcttatgggggagctgcaggctcagcgagggcaaagctgcacagcaaacagcagcacttgaacatgtctgccgggtctcagcgccagggatacagctgagccaggacgttcccggcccccacagtgtgcaggctgcaggtgtggccccgatgccaagccagcaggggctcccacgccaggatttgttcaagacacagctcatctccaccattctatgaagcggactttaaaatcccatcttctagacaccaacgctgaggccggagcagcccaagctccaaggcaccgtggccagctggggttcgtatcgagggctggggcagatgctccagctctgccccacccagagagacacttctgtctccctatggggtccttggcgggtaaaccagcccctgctcagggtgcaagcacagagcatcccaccgaggtccacagctactgcttttaagactgtttccctgagaacagcaacactgccccccagccagctcctggtagcatctagggttgggacctcccaccccaccagccctgccacctgcctcctcatggcatctcaaggtgccaggggtgcctttcttgcagaagagccctccatcctgatctgcccacaccgccctggcagatgctgtccacgcccggcagccttctgtgcacctcagagcatgtgtgtgtcgccatgcacagaacgatgattcctgagaccctcgggtgactgctctgggctcaggtccccagtgatgacctggaccccagcctcaccccacccttcccacccactgatgccctgcagagctctcctgtccaagagggtgaagcccacacctgcctggccaggcacagccccaagaggaccctgcttctatgcagagggtctcggaggctggcagatgttcaagaggttgggccaggcttggtttggggctgggctgtggctcgtcccccacatcctcagcggcctctgccatgggcagcaggggtggttgtgctgcctggccagtggggtggggattgagggagccacacggcgaagcacagcagtgagctctttattttaggctgggtgggggcagcatgtgacagtcaagagggctgacccttgggctgcacggacctagataagatgcccagggtcccggaatgttcacagcccacagccaaggtgagtaaggggcagggaatgtcctgggctcagagcccgagaccctgcaggggtgtccctgcccatcagcaaacagcataccctgacaccagctgcaccccaggccccagccggcccttgttcctgacccagacaagaaactagttcatggggctacaactccccttctaggggtcagaggggagagaaactggactgccgtctccactgctggccggctcatggccccctcttccctgatgctccccaggagctgccccagccagatgttcatcgctgagcctgcacccaccgaagcccaaagcttcccttcttggcctctctgaggcctacacaggagagcagggcctggttcctcctggagctgattcagccccattctgtcggggcagaggtgccaaccccaagctccagggtcagatgtgaggtgaggaaggtgaagagctggagagcacaccacagtggacaagcccccaccatgtgcagagcagcgtgaggctccaggatggtcctcagtagatcccatggctccaggtgtaggagagacagccctgggaggcgaggccaggccctgcagggaccctgggctctagctgtactacttggccaggcctccccggggcagcagctccacgtagctcagggcactctgcagtgatgtgaggcagtagccctcctctccgatcaggtacctgcatggatggcaggggcagccggtgtcatctgaacgaacagaaggatacccccggccctccagaaggtagtgtctgccctcccagttcaggacctgggtgctgagggtgggcaggtggggctgtcagggcggctgggctagaggaggcctttcccacccactatgtgctcgtccttggacggtagagccagggatggcactggatccttatcccctccccaggcagatgctgctcaggggacagcccccagctcctgctgtctgggagaggctgagctaagcgaagggccacgggacatgtggcagcaggcactctgcacaggtggacccacaggggctgcccgaaggcatggctgtgacggagccacacgctaccctccccagctgctactgacaaccaccgtttaggttgagggatgaggtccctgctcttcgcacagagacccccaccctgacccgccagggtctacccctcgtggatgaactcctccagggccgcgcactccgacaccagctgagggaggccgctcctcagcaccacgaaggacaggatgggcagcaggtcatcggcaccactgtcgggagggcatagcggccttgggttggggccaggagcctctcactccgcaaacccagcagctgtggagccatcctggccgtgctggccgccatctctgtgcccttctgcgcagaggcaccggaaggcagctgggcatggtgaggctgtccctaaagggagctcccgtactgcggagccagggctgggcccacacggccctcctgcttctacagtgcagccagctggcacaaggctaaggggcaggaagatagtccctcccgtgaccattgcctttctagggcccttcctccctggccacacctcgccctcctgggactcacatggcagctgcagcgatgggcgggggcccggcctggggtgtggcctctggggtggggcagtagtcttccgcacagacacagatgatccgcagggtccgcactgcgccccagacagggtttcaggggcagttaaccccgtccagcagcctgagccaccccttataccccgcccacccacccacctcctgatgtgcacggctgggaagagccacggtgaccctggcgatgttgctcagacaccacttttgttctggtcccccaacctccccaccggcacgtgacaagagaagctcagtggtgaagacacaggctccaggtcacctactgggatgggagcctgtccctccccctgactctcgaacctgctgacctatgcactccagcttcttctgggggcagctctccaggaccagcagtccgagctcctgggccgccgcgcagtaggggtagccagtggcccccttggcctcagggttctgggggaggagcttggtggggatgccaatggcggtggggggtgcattcctgtagagctccatgctcctgctcagggcagcctcccgggctcggtgcacgctcctggggcagagagaggccaggctaagctgccccagggaccttgccctggggacagaagcagggctgtggctggagctcagtcctggagaaaactggctatgtatctcaagcaaaaagccccagcgttgccaagaccccaggcacgggagagtggcaataatcctacctgcaaactggaagcccctgaggatggcctcagggtaaagcacaggctagggggagcaaacacgagtcttggggatggaggggagcagacagtgccagggagcagggcaggcctcctgggggactgggctggaagacactaggccacgcaggtggttgtacagctgggtccatacctgtacagggccagcagcagaggccacagcggggagaaaaagggttcctcaatgcaggccaggcagcggtccttggaggcagctgtgtttaggccttcgaaggccagaagggtcagcgagagcagcctgtctgctaggaacagagccggggacgtccacagaggctcctcccctgctgggtcaagtggctctaagccacggggcctttctccgcccaagaaacctctttccaccgccttcaagcctcctgcacccacccctgaccctcctcggcccagggcagggagtccgggactggaaacggtcacctacagctgctgccctgttgggccagcagcctgagaagaaaccggagaatgatccttttctcaaaaggggctttacccaaaactgcaggaaccagggaagactttagatccaaccccctgtgggtggggaccctgaccaagttccttagtgtgtgggcagcacagtgagaatgacgcctggactgttgggcctccctcagtggttcttagaaaactctgggctgggcgcggtggctcatgcttgtaatcccagcactttgggaggccggggtgggcagatcaactgaggtcaggagtttgagaacagcttgaccaacatggtgaaactccgtttctaccacactgtttccaaaatgagaagggctgaggcgtgagctgggtggatgtaagtctgatcagagtctctgatcaacagacccttccccaaacagaagcttgaaacggaccaataagcaggggtgaagagctgcggcggctctcccagggagggcctggcctcacctacggcattgtggatctcctccaccgcggtcttcagctgctgcagctggggctccggctgtaccccacggccccggccctgccgctcagacgtccccaggaactgctccaggtcctcgaacgagctgtccttgtctggcaatccagatgcggtgtcccccaggggtgagggagaccccacggggccgggttggagtgggggcgtggggggactgtcctggggccgcggggctgcgctgggctcgggcggggacagcatgcaatggaggctctgcgagggccgcagccgtcggcttccggggttgggggtcggggggcagcagcctggggctggcgcggctgctctgctcacggcgggatacagggcgctgtacacggagcactgcagccgcctcaggagctgcgcgatcgggtggtcggggaggctgcgggagaagaggacgtgagaacgcggccagcctcggcctctccgtggcatccacaggtgccgcgctatgcccggtttcagagaagcgacttgcattacctcctgacagtgaatgttggaaagtctgccccccgcccccgctggggaggttggagaagccgaggaaacgccctcagcgcaaagggagctgcagtgtccacgtggccgggcacaggctccctgtgtcagtccagcccctctccggcacctggcaccaggcagaggtgcccaaggccggtgcgcaggggctctgtggggcctgaaggcccagctacctgagcaggtgtgagaccaggctggtcacgagtgacaggtcccccggattcctcttgagcttggccttccagtgcttcggccagtcctacgggacagggggccttgaaggaaagcacggtgggtccgccacgaccggacgcgcctcatctcccaccagtgccgacccctagagactgtgggagcccgtcctggggtgcaggagacccagcgccagcaggccccgcgacccgcccccgcccccacccacacccgagggaaaccttaggcgaaccctgggcctgcaccctcgctgggaccctccctcctcgcagggaccctccctcctcgctgggaccctcccacgcgacccctgacctcgcctcctcgctctgccccgccccacgcagccctggccccgccccctcaccgggccctcccacgggcctctggccccgccccctcactgccccccacagcctctggctccgccccccacgggggcccacccaggcggctctgaccccgcccccctcgctgggctcctcctacaaagcctgggcccgtgggggacgcacatggtcctgttcgtactccaggatggcggcgtaaagggcccgctgctcccgttcctccggggtcagggcgacttggctgcaaaacctcctggggagaaaggcacgcggtgggtgccggggccaggccctccccgcagcggccccaggggcgggcaggagtcccacctgttggcggcctcctggagccgcagccggcgctcctccatctttctctggagctgggtgcagagtcaaggggccgagcgtgggatctgagcgggccctcggttcccaaccccgtcccacacccggagaggccgggacgtcccagggacctcctctcggtgaggggctgtccccaggtaaggcttctggggcagaaggcagcctgcgctcaagccaggagggccgggccagagaacatgggggacggcggccgggccttcccctgagaccctgcctctgcaaagcggggagcccctcggccctgtaccccgaccccggaacctccgctcccctcgctgcccccttctctgcccttggctcaaggccacactgagtttcccctcggggaccaccagggcggtcagaaaggctgctgtctcctcccgggctttggcaatcactaggttctccatcatctgccgctgtagagagagggtctggggggggaggagggagtaaggccgactcccctctgccccgcgcccacgcacccccaggccctccctagcccccactcaccagggatgtcttctgcatggcctggctggggtctagccgcgccattcgggcctcatacgcagccttcagcttctgattctgcagggaggcctcctccagtggcgtcagctctctggaaatgtgacaagctgctgtctagaccccaggaagcccagtggtgtctggacaccagaggagtctctctcatcctcccggattgctctgaggccaggaggtgaggagaaagaggaggggagccatctggggtgggctgcaacatctgccccttcttgcctgcccttccaaaacacaggttttggccaggtgcagtggctcccgcctctaatgccagcactttaggaggctaaggccgggcggatcacctgaggtcaggagttcgagaccagcctggccaacatggtgaaactctgtctctactaaaaatacaaaaattagctgggcatggtgcacacttgtaatcccagctactcgggaggctgaggcagaatagcttgatcccgggaggtgatgcagtgagccgagatctggccactgcactccagctggggtgatagagtgagactctgtctcaaaaaaacaaaaccaaaacaaaaaataacaaaaagaaagaaaacacaggttttggtattgccaggacttttggtttttctttttttctttttttttttgagacggagtctcgctctgtcgcccaggctggagcgcagtggcgcaatctcggctcactgcaaactccgcctcccgggttcatgccattctcctgcctcagcctcctgagtagctgggactacaggtgcccgccactatgcccggctaattttttgtatttttagtagagacggggtttcaccgcattaaccaggatggtcttgatctcctgacctcgtgatccacccgcctcggcctcccaaagtactgggattacaggcgtgagctaccgcgcccggccggacttttggtttttcaagagaagctggaccactggacttctatggagatccgttatatgtgtttggcaacagtatgaatcttgttaaagcaagcttgtgcaacaatccgaggctgtatgacttcgaatgtggcccaacacaaattcctaaactttcttaaaacatcactgagggctgggcacggtggctcacgcctgtaatcccagcactttgggaggatgaggcaggcggataatgaggtcaggagattgagaccatcctggctaacatggtgaaaccccgtctctattaaaaatacaaaaaattagccgggtgtggtggcatgtgcctgtgctccagcctgggtgatagagactctgtctcaaaaaatcactgaggtttttttgcaaaatttttttttttgagtcagtctcattctgtcgcccaggctggagtgcagtgacacaatctcaactcactgcaacctccgcctcctgggttcaagtgattctcctgcctcagcctcccgagtagctgggattacaggcatgtgacaccacgcccagctaatttttgtattttttagtagagatggggtttcatcatgttggccaggctgatctcgaactcctgacctcaggtaatctgcccgccttggccttccaaagtgctgggattacaggcgggagccactgcgcccagccttgcaatttttttttttaagctcatcggctgttgttagtgttagcgtattttatgtgtggcccaagacaattcttccagtgtggcccagggaaggcaaaagattggacacccctgctttaaaggcactatgtgggtcaaacagccagattagtctgtgacccatgaaaggaagaagtgtcctgtctcctttatacagttcccaacagccactccaccttgaaagctttgttccctcgtaccttcccactgtcagggacaatggaggacaaggaggaaagtcagagcctgacgcctggccaccctgccctgaagccacattgcagaaacaaggggactgggaagccaggccccgccagagcaggggcaggaggagtggacccttctcgtctctcccacttgggagtcactgggctttttgcatttgtgtctttgtatctttcatcagttctagacaactgtctgccattctaacttctaataatgcctctctcccattttctttcttctttttttttgagccggagtctcgctctgttgctaggctggagtgcagtggcacgatcttggctcactgcaacctccacctcctgggttcaagcgattctcctgcctcagcctcccaagtagctggggttacaggcacgcgccaccatgcccagctaagttttgtatttttagtagagatggggtttcaccatgttagccaggctggtcttgaactcctgaccttgtgatctgcctgccttggcctccctcccattttctttctggaactccaacgaacacgttaggctttccatctcttgttttctgtctttattttttgtttctgtaattcattctagctatcttttgaccttttttccaatacatgaatttgctcttcagctatatctgctctgctgttataaacttgtctgctcagttttgtatgtatggatttctacatatatatagatatataactcatccttgttcccagctaaatttttttttttttttttttgagatggagtcttgctctgtcgcccaggctggaatgcagtggcgcaatctcaactcactgcaacctctgcctcctgggttcaagggattctcctgcctcagcctcctgagtagctgggactataggtgcccgccaccacgcccagctaattttttgtatttttagtagagatggggtttcaccttgttggccaggatggtctcgatctcctgacctcatgatccacccacctcggcctcccaaagtgctgggattacaggcgtgagccaccgcgcccggtcattttttttttttttagacagagtctcattttgttgcccaagctggagtgcactggcacaatcacggctcactgcaccctcaacctgtcaggctcaagtgagcctcccacctcagcctccctagtagttgggactacaggggcacaccactatgcctaattttttttgagacggagtttcactcttgttgcccaggctggagtgcagtggcacaatcttcgctcactgcaacctccaccttccaggatcaagcgattctcctggactcagcctcctgagtagctgggattacaggtgcacaccaccacggccagctaatttttgtatttttagtaaagacggggttttaccatgttggccaggctggtcaggaactcctgacctcaggtgatctgctcgcctcggcctcctacagtgctgggattacaggcgtgagccaccaggccgcctgcatttgcttgtgtccggccaggggatattcccattctgggactcattttaaaaacattcgctgtcaggccaggcgcagtggctcatgcctgtaatcccagcactgtgggggccgggcgcggtgactcacgctgtaatcccagcactgtgggaggccgaggcaggcgcatcacgaggtcaggagatcgaaaccatcctggctaacatggcaaaaccccgtctctactaaaaatacaaaaaattagctgggtgtggtggtgggcgcctgtagtctcagctacttgggaggctgaggcagaagaatggtgtgaacccgggaggtggaggttgccgtgagccaagattgagccgctgcactccagcctgggtgacagagtgagactctgtctcaaaaaacaaaaaaaaaatcgctgtcatcagctcatctttctcagcctcaaaaacccaatcccaggctcatcccacctcccatcttgtccatcttacttcttacagctttgtgactctgccccctgaagcttctggaagatctcgggtggcagaaaaggagagagctttcctccttcatcggagtatacacggcggtgtcggccggcaggctggggaatgggagcagctgcaggcatggttggcttcaggcgtgttttccctgcaagccatgggtaaccaggggtcaagcggtgggccacatcccacagaggagatgcgggcttgggggatgccccaggagagccgcctactgcaggagacccaccaagcttggcggccgtcgactgggccctctccagacactgctgtgctagcttcagcatcttggaggtgtcggggggcacagtttccccagcttctgggggagggacaagaaggctggtcacagtcggctctaccactgttacttactgctgagataaaatgaggcaacggaaaaggcaggcaagcccactgcccccctcagcacccccactgaccccgggcaagcccactgcccccccatcccctcactgaccctgggcaagcccactgcccccccatcccctcaccccgggtaagcccactgcccctcccgtcccccaactgactgaccctaggcaagcccactgcccccccatcccctcaccccgggtaagcccactgccccttccaccccccactgaccccgggcaagccgactattcctcatggaccccaggcaaggcccctgcccccaccatggaccccaggcaagtccccccacccacgcatttctaatcatctgccctggttttgcctcctgagtctgctaaggctgtgggcccctcatcgaggcccgtcacagcctcgaccctaaacaggcctttagtgctcactcagcttcacttgcaactgcaggcctctgggaagtggccgttttacagagacaaggacgtgctgaggggatcgcctcacccatctcccaccggctgtgtccccaaagtcctgccttcccgtagcttggcatggagcacctctgcgcgaccatggacctgctcacacagcccttctgcgcgccgtgggagctgcctctctgtgactcgcccctggacccaccgccccagcgcctgacccacctccctgctgcccttcacagaaaacttctcatagactcccattttctcatcccgccccgatttagcccccgactccccccggaaactgcccttacccgtccccaccttgccagacacggtgggccactggagttcctctgtcttctgggactttgctctccccaggggatcctctgccactcctccacccaactcctcaatcttggagcgccagagctcagccgagctcaccggctccctagggagctggggcaactgttagctccccctgacctgtgtgatcctacgtccagtggctgccccgacctctgtgatcccacgtccaggggctcccccgacctctgtgatcccacgtccagtggctcccccgacctctgtgctcccacgtccagtggctcccccgacctctgtgctcccacgtccagtggctcccccgacctctgtgctcccacgtccagtgggtccccctgacctctgtgatcccacgtccagtggctccccctgacctctgtgctctatgtccagtggctccccctgacctctgtgatcctttgtgcagcggctgctggcctctcaaacttaatgtgttcattgcggaacttgctattcctctccttgccagtttgctcctgccccatctgcctcctgcaagtctgctctgttccaccttcaggacgcaccccgaggccgtttactgctcccatcctgggtggtctggccactgccatcctcagtcctcacctgaggctccactcccaggctgtcctctccctcaaagctcaaagtctcttcaagtttccctgcacaccagaacggccccagttccacccaaggcatgcacacagccccaccccgcccactcctatttcagggcctttgcacaccccacagctggaatgctgccccacgtctgtgccgctcactggagccagtgtcttgccacaccccagtctccatcttcttatccacaacgctggtcccttcctgccactatatcacactgagtgtgggctggtccacctactacaaatggtcaggctagaaggatacaagagacccccgccgaagcctggcacccatcaagggctaggatgcccacaatttgtccagcatggaggaagcagcagggctcagccatgcctttttctttttcttttcttttttttttttttgagacggagtttcgctcttgttccaggctggagtacaatggggtgatctcggctcactgcaacctctgctcccgggttcaagcaattctcctgcctcagcctcccgagtagctgggactacagacacccgccaccaggcccagctgattttttagatttttagtagagacggggtttcaccatgttagccaggatggtttcgatctcctgacctcaggtgatagcccgcctctgcctcccacagtgctgggattacaggcgtgagccaccgcgcccggctggctgagccgtacctttagtggtttccacttcttctagtaacacctgggagatatagtggatgctcctcaggtattccgtgtatgcctcctgtgtccaggaaagagaaagagtggggtcaggccagtggagggaagtgactccattattccggccaggtgcccttgtgggataagcaaggaacaccaccacctgcttatctctgagatacacccagagacattgagcctgcggtggttagctgcagccggaacacggttttctgcgcagggcacaggcagcatcgctgctctccagacttggaaaagacatcaggacctgagagagagagagagccagggacgagctggacctcattttctcctctgactgcctttctctccagcacaggaactgatattctcattcagtgggcctggggaagtgacctcagcagtttgctgtcatttttcattctatgcaatgtttccttcttgtgcaactcaagggtgattcattcagtggcttaaaaaaatacttttctgagaggataaagggagtgatactggaagttttcaaatcacttcccggtttaagttccgagaaatccctttcccagaacctgcgagttacgtatttccagtgcacacaggagcctagaactgttacctttcaaggctgtgtgacccctctgacaaggcacaggtcattggaaccacagaatggtggtttgttttgttttgttgagacagagtctcactctgtcgcccaggctggagtgcagtggcaggatctcgagtcactgcaacctccgcctcctgggttcaagtgattctcatccctcagcctcccaaggagctaggattacaggtgtgcaccgccacacccagctaatttttgtatttttagtagagacggggtttcaccacgttggccaggctggtctcaaactcctcacctcaggtgatccaccgcctgggcctcccaaagtgtcaggattacaggcgtgaaccacagcgcccagcaatatgctatgtttttttgttttatccctagctgttaagtttcctatctttaagtctatgcctcagagagaaagacgaaatataatccaggcaggatttctgacttgcgggggcacctgctgccctaaaaaccaacttggggaaagcagcagattcaggaacgaggcttctcctaggcacaggcaggctccttccctccttgggcagccgggtgtggctgggccagcttctctacctggtcgccaaccttagattcggccccatctcaggaacgggccacacccctccggcctgcttttccttcctaagacgactgcaaacagcatcacaaatgagcaggtatgtggccttctctgcatgccgtcccctgtggcaaccggattaaatctaccatctctgcccagaaaaatgcacgaacgcacggacctgcccgtcactcggattttggaaggtggcctggcggaccctcctgctacatctcctctacaggtggagcccaggctgtgatgcaccggctcagcgagcggagtggaaagccaaggtccgcaggatctgagctgtccaaggtcactgcacgcccggctgcgccccgcccccgtcctcgcccgggaaccgcggcccgggatcccggctggcgcccgctcccaagtctccagcccgagccggccccgtcctcgccctccccgggcgggggtccctccaggggccaccctcagcggccaagccccgcccccgccccgcctcacccggggccggttgccggtgtccagctcgatggccccgttggcaagcttcatggcgctctgcagcggcttcaccgtgccgtccccggccgcagcggccatggcgccgagcgggggaggcggcggcggtagccgaggggctggacgggcgaccggaggcccggaacgcagccggcgctggtgctggagccgcccgagcagcggaccgcaggaagggacgcggccgcacttccggcgacgggccccctccgcgcgtactgcgggccccacgggtgttagtggcgggggcggcagagtccgggtgggttgtcgcgacggagccgggcctcttcgccgtcttgagacggggctggcgagaagggcccctcacggagttgccatgggcgtctaaccgcggcagccaggcccctctctacgtgagaccccggcccccctcccctttctgcagcccgcccgccacctgcgcgccgcgtggcctccgccggcgcctgcccgccccgcgcctccgtctcccacggtaagaggcggtgagggccgcgtcgcctctccctggaggactcgtcgtgaggtgtcggcgagcccctccgcccaccgccccgccccaggccagcgctccattggcgacagaggcgggcacggccgccctcgggcccgagaggggagcggtacgagcgggggcgctggcaccgcgggtggaacctcggccggcggggtcccgcccctggcccctggcccgccccgcccgcctcgctttgcttctcgctccgcccctcccccgccccgcctcgcttccagcgcgccgagcggagcctaacgccgggtcctctaggaacctcgggccgggcagcacccgcgggattctgctggcgtcctccgctgccatgaagcgggaccggctgggccgcttcctgtctcctgggtcgtcccgacagtgcggggcctcggacggcggcggcggcgtcagccggactcggggccgcccttcccttagcggtgggccgagggtggacggggcgacggcgcggcgcgcctggggcccggtggggtcctgcggggacgcgggcgaggacggcgcggacgaggcaggtgggtccgcggcccgggcgtggcgggttggggtcgcggcaggggttgctcgtgggaggagccgcactgacgcccggaagccggcgcggcctctcctccacccggccaagggcgtagcggactcggggctgcgtcgggataggcgctgggcggccggctcggttttcctcgcgctccgtgacgccggcgtcgccggcccggcctccccggccgcgggctcggccagaagggacccggcgtgaggagcgctgtcaccgcgggcaggtcgccctggggtgcccgcgcgtgggaatcgccctcccctgcttcgtgccctcgcggagccggaaaggaggcggcacctgcaattggcagacaggaaaccgcggcgtttcctggagggcgcagcgcctgccccgggtctcgcggtcgctgggaggagggtgcagttccaggtttcactcttgaagttgcttcgctggagaggccttagaggcctttgaaatttgaaagatttcttggaccagcggccacatcccccacagggcggcttgtcccgccgagagccgcgcgcccgagccgcttgctgtgtccgggagccgcgcgaagggcgctgcaggcgctgccctcggacctggagtccgggacgccctgtgctcaggagcctcctttgccagctgctaacacttcctgccgctctgtgcaggagcaggccgggctctcgccatgggtcactgtcgcctctgccacgggaagttttcctcgagaagcctgcgcagcatctccgagagggcgcctggagcgagcatggagaggccatccgcagaggagcgcgtgctcgtacgggacttccagcgcctgcttggtgtggctgtccgccaggaccccaccttgtctccgtttgtctgcaagagctgccacgcccagttctaccagtgccacagccttctcaagtccttcctgcagagggtcaacgcctccccggctggtcgccggaagccttgtgcaaagtacgccctagtctgttcagagcacgttcaggctgtcagtactgcagtgtgacgggtgttgagagagggacagggcgtgcctccgcgggagcctctgggtggggggaatgggccatgcccgggttcagtgccaacagccctgggactgttgtggagagatgaactgggaggagctggggtgagggaagagaaagttgcctatggggaccgctgaggtttgagatctcgagagggtcccgtacgacgagcgctgtgaacctccgcctgcttgtcctgctcatggccacactgatcctttgcagggtcggtgcccagcccccaacaggggcagaggagggagcgtgtctgggtgagtcctcccccggtggagggtgggctgggtgccgaccagccgtggatctgacatctctgttgactctctgcagtggatctgatcacatccagcccccagtgcctgcacggcttggtggggtgggtgcatggacatgcggccagctgcggggccctgccccaccttcagaggacactgtcctccgagtactgcggcgtcatccaggtcgtgtggggctgcgaccagggccacgactacaccatggataccagctccagctgcaaggccttcttgctggacagtgcgctggcagtcaagtggccatgggacaaagagacggcgccacggctgccccagcaccgagggtggaaccctggggatgcccctcagacctcccagggtagagggacagggaccccagttggggctgagaccaagaccctgcccagcacggatgtggcccagcctccttcggacagcgacgcggtggggcccaggtcgggcttcccacctcagccaagcctgcccctttgcagggccccaggtaggaggcacctcttgctggtgctagaccaggatgtgtgctcctcagtggggcagggttttcagcagaaagtgaatgtctccactgctctaggtggtggctggggtgtggtgtgagaaggagcagagcttggggcttctgcctgcggctgctcaccacatccagagagcagggaggggcggccagcctgtctccgcctcttgctcctctgtgagcagggctctgttccagcagtttctgtggagacacgctcatcagccgtcgagtctttttctaagcctgtgcttggggctgaggggactgaggaagagggaagaatagggccttgtctgtggatgtgggagaaaagaatggccgttgcctctgcggctgctgccctgggccagctgcaggtcatttcctggcactcagccagccgcctggtgacaccctggtgtgggccagtgtggcgcagctttctctgctgacaggctgaggggaaacacaaggcccttgtttgggccccagaacccatagcactgtgggctggtgcagctgctcctggatgttgttttaggagggccagggccagtttccctccggcctcttgtcctgtgtgtgctctgtgcacctgtccccacctgagcactcagttcccactttgagtcttgaggggagcttccgaaaagcgtagctacctgtaatcccagcactttgggaggctgaggtgggtggatcacttgaggtcacgagatcaagaccaacctggccaacatagcgaaaccccatcgctaataaaaatacaaaaactagccaggtatggtggtgggcatctgtaatcccagctactctggaggctgaggcacgagaatcacttcagcctgggaggcggaagttgcagtgagccgacatcgcacaaccgtactccagcctgggtgacagagcaagactctgtcccaaacagaaacacagctacccagatagtttagctagatacgggtgcacagatgagacagtgcggctcgggggcctcaggtaggaacgggattgtgagtgtcacatcttagagctgcttggctctgtaaacttgtatgcagtgtgttgagaacaattctatctatctgtgtatctatctacctacctacctatctatcttcctacttctttgtctctctctatctacctacctatctgtatatctatgtatctacttatctacctatttatctatttatttacctacttatctatctatctatgtgtttatttatttttgagacagagtctcgttttgtagcccaggctggagtgcggtggtgccatcttggctcaccgctacctcagcctcccgagtagctgggatgacaggcacatgccaccacgcccacctaatttttgtatttttagtagagatggggtttcaccatgtgggccaggcttggtctcgaactcctgacctcgtgatccacctgcctcagcctcccgagtagctgggatgacgggcacgtgccaccacgcccacctaatttttgtatttttagtagagatggggtttcaccatgttggccaggcttggtctcgaactcctgacctcgtgatccacctgcctcagcctcccgagtagctgggatgatgggcacgcgccactacgcccacctaatttttgtatttttagtagagatggggtttcaccatgttggccaggcttggtcttgaactcctgacctcgtgatccacctgcatcagcctcccagaatgctgggattacaggtgtgaaccaccgcgcccagccaagaacaatactttttaaaacttattttaggccaagtgcagtggttcacgcctgtaatcccagcactctgggatgctgaggtaggcggatcacggggtcaggagatcgagaccatcctgactaacacggtgaaaccccatctctactaaaaatacaaaaaattagctggatgtggctgtggttgcctgtaggcccagctacttgggaggctgaggcaggagaatcgcttgaccctgggaggcggagattgcagtgagctgagattctaccactacgctctggcctgaccgacagagcaagattctgtctaaaaaagaaaaaaacaaaacaaagaaaacttattttaagtagagacagggtctcactcttttgcccaggctggtcttgaatttctgtcttcaagtgatccttctgccttggcctcccaaaaggctgagattataagcatgaaccttcaggcctggccgagagaacagtaatatttatttatttatttatggagtctcgctctgtcgccaccaggcctggccgagagaacagtattatttatttattgatggagtctcactctgtcgcccaggctcgagtgcagtggcacaatctcggctcactgcagcctctgcctcctgggttcaagtgattctcctgtctcagcctcccgagtagctgggattacaggcttgtgccaccacaccctgctaatttttttgtatttgtatttgtatttgttttgagaaggagtttcactctttgttacccaggctggagtgcagtggcacgatatcagctcaccacaacctctgcctcccaggttcaagcgattctcctgcctcagcctcccgagtagctgggattacaggcatgcaccactatgcctggctatttttgtattttttagtagaaatggggtttctccatgttggtaaggctggtctcgacctcccgacttcaggtgatccgcccaccccggcctccaaagtgctggaattgcaggcatgagttaccacgcccagctcaattttttgtattttttgtagagacggggtttaaccatgttagccaggttggtcttgatctcctgaccttgtgatccacccgcgtcagcctcccaaagtgctgggattacaggcgtgagccactgcacccggactgagaatagtaatttttaattattttatttttttgagtcggagtcttgctcttttgcccaggctggagtgcagtgcgcgatctcggctcactgcaatgtctgcctcccgggttcaagcgattcttctgcctcagcctcccaggtagctgggattacaggtgtgtgccaccatgcccggctaatttttgtatttttaatagagatggggtttcaccacgttggccaggctggtctcgatctcctgacctcgtgatccacctgcatcggcctcccaaagtgctgggattacagacatgagccaccgtgcctggcctagtaattttttaaatgtctcagaacatccaccaagtccaggctgtcctagaaggactggatcggagtcagtggaaggactgggctttctggttctgctgttcctgagggttctgatgcttgttgctgcctgtgtgcttctggacgttgggctggcagggcaggatcagaggctgcatagcacccttggtggggatggggccatggtggggagaacttgagggtcagggaccccagtctcccttctagtcatcaatagtagaatcatgcctccttgcaggtgagacctttctgtgctccgtgttggtaacaggagccttgttctttgtttctcagggcagttgggtgagaagcagcttccatcttcaacctcggatgatcgggtaaaagacgagttcagtgacctttctgaggggtgagagaagagtgggtttaaacagcctaaaatttctccttcaaaaaccatcagtgacctttctgaggggtgagagaagagtgggtttaaacagcctaaaatttctccttcaaaaaccaaacagccatcgtagggtcggctgcccatgcgctggtaccaaactaagccatcacaggggccggctgtccgtgccctggttgggacacgcctcctctcgaggtggcgggagaggaggggctggggagcttccgaggcttcttgtctctgattgatggtttcctgggtgccagagagcactcccagacctgaggcagctccagagggagcctgatagggtttctgacccagagcagcctagaaatgagtttgttgaaaccactctggctgggtcctttgcttctgctactgttttagggccatagttttgtgttcgctccagatgtttctggagtagagaaaccccgactttagcccttgactatgacactgttgtggcttgaagccgaggctctgcgaggaggtgttgcaggaggacgggcctcagaagggacctcatcagtgtctgcaaactccctgggccacccctgcctctgagccaagcgccattcagggcagctgtgccaggctggggtttgcaccgtttccaccctctcctgtaaaccttggctgcaacacagatgcacctcatccaaatgaggacaccccagtttgggggccaatcccagtgggatgtgcagtgatgaaatcgggcaggtgccaggaggcacctggggtggctaagactgtcctcaggaccaccaggacacaaaaccgcagctgaggttatagcataaaggccacaaatctttttttttttttttttttccttttgtgaacttttttttttagaccgagccttactctgttgcccaggctggagtgcagtggtgtgacctcagctcactgcaaactccacctcccgcgttcaagtgattctcccgcctcagcctcccgagtagctgggattacaggcgcccgccaccacacccagctaagttttgtatttatttattttttttttatttgagacggagtctcgctgtgttgcccaggctggagtgcagtggcacaatctcggctcactgcaagctctgcctcccgggttcacgccattctccggcctcagcctctgagtcgctgggactacaggcacccgccaccacgcccggctaattttttgtatttttagcagagacggggtttcactttgttagccgggatggtcttgatctcctgacctcgtgatccgcccgcctctgcctcccaaagtgctgggattacaggtgttagccaccgcacccggccaatttttgtatttttagtagagacggggtttcacggtattggccaggctggtcttgaactcctgacctcatgcgatccacctacgtcaccctcccaaagtgctgggattacaggagttagcctctgcacccagccacttttgtgaacttagaagtgactcatggcaaacccatcagttgcatagggttcgcagttatggggtgaggtggtcgatttctcaaagtctgcttagcaggaagctacctttgagcgcctccaccccttctgggccgctgtggaaagggctgtttccaagtccagtgtcctggtgcccagagcacatggcttgtggggattgctggcttgtgagcctggctggccctttgtgttcggaaacgggattggaaatttggggattttagatttaagacattttcagaagaactcaaatgtgggacatgggggtccatttggtatctttaggcaggaggtcgtgttgggtctgtcactgcccaggcccagggctttgctgaagattctctcttaattcctagagacgtcttgagtgaagatgaaaatgacaagaagcaaaatgcccagtcttcggacgagtcctttgagccttacccagaaaggaagtaagtgggcagcccggggtctgctggaggcatccgttgggcgacctagacacccgcctgtgctccagggcctctccccggtgcccactcagttcactctctcgtgtgcggatctcccgagcccagtgaaacgtggcttccctcagtgagcgggaggcgggggaggggcaggcgggcaggtgagaaggtgggtcctcctggtgctttggagctgggacctggtctcggcactgtgaggctgcctcagagtcccagcagtggatggcaggtgtctctgtcgacagaaccccgccttgcttgagaaggaggctcttacgtcccttctgccggtcctgccctgggttcacaccccagtgtacccccgaagcccccaacccgtcgcttctgctttgtgtgcgtccccagaggcccgaggacccagctctgtcatcctcccagttctgaccccatcactgatgtccatggccaggcagccacggtccacttccctgttgaatgacttctgtgagcttgttttgactttgtttttagggatttttattttctctcttcagttagaacacaggccctggtagtgagggctggttttcacttgtgctgttttctttgcagccctatacccagcagtacccagaacactcccaggtagttggtgactgacccagtccctgtccttgagcatttcacagcccagaacaaaggtccagagggcaggtggctctgagcaccaccgtcagccactagaaccctgctgtgcagactgagaggtcaacggccttttttcatggaagttctgatgctgttaagttctgaaaagagaaacgggagcagtggaggaggcccggagagagatgcgaagcagagggcaggactgagccagaggggctgcagcagcttcagcatgaacagaaaactggtcaggcccagaaaaggtgcccgggggtccctacccccaggcttgttcccaggagtcatggctgggagtgccgcctgaggctgctgtacggaagcccccactccgtgaccctccgggttgagtctgaatcccaggacacctgagaatgtgtctctggcttgctgcccagaaggtctggggctgctggtgtgaggagggctgggagctgggatgggaggagccaggcgagccttttccggatcgaggcagattcaggaggggagggtcctctctgctgagcccctgctgctgtgacagggacagcacactcagactgtgtcactagtccctctgggaccccaggagtgcagacaaagacgtgctttggaacagagacacgggagatacgttttcagaggtctctaataaaaggggtgacttcagtggaaaccgctgcgcaggaggcaggactgggtggtagcaagcatggcctcctgactgcggcgagtaccaggggcacttggttccccagctgccaccgtgagacccccctgggaacccagaagggcctctgcacagcccccggcccgtgtgctgcctcccagtcttgtcaaccctgaccttggagttctagcgggcgtgcccgcctgtgtcctcagctgggggcgcatgagaagagacttctgtgatgtgttaatgaggggtcagtggttcccgccagaggggaaggccagggcctgcacccccatggggaaagaactgacaggcagcagtgaggcctgagcccagcccacccggtccgcaaagattcccgtcccaaacacgagggcacagagactgcgggtgctctgaagcctcctgtgctgaggaggtgagtggtcattgtgggaacggcatggccagccactcacaaacaaggggccacccaatccaggcaggcagggcaggtgagggggacatgtggctaggtcatgaaaaccagttattagggacagggagagaaggcgcagcctgtgcgaagtcaacagttcttctcagtgcgtttttgtcttgtttctgagatggagtcttgctctgttgcccagactggagtgcagtggcacgatcttggctcactgcaacctccgcctcccgagttcaagtgattctcctgcctcagcctcctgagtagctgggattacaggcatgtgccaccatacctggctaatttttgtatttttagtagagatgggatttctcccacgttggccacactggtctcgaactcctgacctcatgatccgcccgcctcagcctgccaaagtgctgggattacaggcgtgagccaccgcgccggcctcaatgcactctttaaagagaagggcagttagcgacagggtctcatgttgttgcctaggctggggtgccctggcacgatcatggctgactgcagccctgtgcgctcaagtgagcctctcacctcagcctcccagggtgctgggactgccaacatgagccactggactcggcagtgtaaactacttttttcatgctattgcatatgtattgttcattgataatatatagaaacataactgggttttgtgtatggattttgtgccctgcaactttgctgaaataattaattagggttttttgtatgtggatctttagggttttctacgtagaaggtcgtgtcatttgtgaatagggagaatttgtctttgttttctttttcttgcccagttactctggctagggcctccagtgctgccctgagagcagtggtgagagaatccgtatcttgttcctgaccttggaggaagagctttcagtccttcacagttgagcgtggtgtctgctgtgggtttcatgtagaggttttatcgtggtgaagaagttcctttctgttcttgagatatttccttaactattcttacctggatccagaaaggaaccacaagtgcgtctctctctttaagtctccgatagacgcacactggaagctgctgcatttgctggtccctcagggacttgccagaccaactaaaatgcacgaccccagacttttggaggacaaggtctcctgcccaccatggtcccagccagcagctccaggaacacaggctgggctccctgcagtggaggcggggttgaggaatgctggggtggcagctactcaccgtgtgcttcccagggagcatcacctgttcctctgaagccctgcctgggtggcttgagcttggaatcaagctgacccattttgagagagtggattctgagctttttcctagcgtaaggtcgttttgataaaggagtggtcctttggacatccctgttctgccgtcctgatacctctagttgtgggttttatgtgtagcacagggtgaagctttagttctcagaacccacccctgctgtaccctgtgccctcgccctccgctgtgtttgccctgaccctcctgtaccctgcgtcctcgccctctgctgtgctcacccgaccctgctgtaccctgcgccctcgtcctctgccgtttgcccctgaccctgctgtaccatgccctcgccctctgctgtgttcaccctgaccctgctgtaccctgcgccctcaccctctgctgtgttcacctgaccctgctgtgtcctgcgcccttgccctctgctgtgctcgccctgaccctgctgtaccccgctgtaccctgcgccctcgccctctgctgtgttcaccccgaccctgctgtaccctgcgccctcatcctctgctgtgccctccccctctgctgtgttcgccctgaccctgctgtaccctgcgccctcgccctctgctgtgtttgccctgaccctgctgtaccctgcgccctcgccctctgctgtgttcacccctgaccctgctgtgtcctgcgcccttgccctctgctgtgctcgcccctgaggcctcctgtccagagttgctctggctttggtggcttcaggtagattctgagggtcagtcagcacagaagcaactcagggaagcttcagaaaagaccatttctcaggttggagagacaaaaaacattttgcaaatggagatcagaaaccattgaatttgggaacctctttttttcagagtctctggtaagaagagtgaaagcaaagaagccaagaagtctgaagaaccaagaattcggaagaagccgggacccaagcccggatggaagaagaagcttcgttgtgagaggtgatgcctgcaacgcgaggctcgccctgcctgtcggggccggggctccatgcatgctcttcattgcagggaggagcttcccaccatctacaagtgtccttaccagggctgcacggccgtgtaccgaggcgctgacggcatgaaggtgagcactggctgtgcctgacccaggcccggcagctgtcagtgtgaacctgggggaggtagcaggtgtttctgcagcctaactcagacttgcgcccaaggacactttgacctaggttaaccgagacctgaagcagtcctagccagtgccatccttgggggtagatgtgaggccagactttcacttgagacaccccccggggggtctagaagtttcttggagtgaagctgtgaaggagccagtggtgtcgctggaggaggagttggatctgccttccaggggcctcagctgtcacctactgagggctcgtgccatgtggcccgggtgcggctctgagggtctctcaccgagtctctccttcagaagcacatcaaggagcaccacgaggaggtccgggagcggccctgcccccaccctggctgcaacaaggttttcatgatcgaccgctacctgcagcgccacgtgaagctcatccacacaggtacgcctatcgccagtgtcgcccacgcgggtgacagccaggggcacgtgacctgctttccagtcttcctcatacccatccccgccccaagagttgggggtgcgtgaaggtggctcatggggtctttggtactcagtcacgttggtagatgaaggctagagtagggcgtcagtgtgaatctgcccttccctgtgatggaaggaattcctgacttccccaggatctaggcagtttgtcaaaactaatagccaagcaatcttggtgtccttttgcaaattggtcattttattttttaatttttttttgagacggagtcctgctctgttgcccaggctggagtgcagtggcaccatcttggctcaccacaacctctgcctcccaggttcaatcaattctcccgcctcagcctcccaagtagctgggattacaggcacccgcaaccatgcctggctaatttttgtaatttttggtagagacggggtttcaccatgttggccagggtgatctctaactcctgacctcaagtgatctcagccttccaaagtgcagagattacaggtgtgagcactgcacctggcccaaacaagtgtatcttaaaaggcaaggcagaaggcatgaaggcacaccagctctggggagctgcccacgtggacaggcgggaggcacgtgtggttctgccttttcacatgtgtgtaggtcgtgtcattaagaccggaggcggatgggggaattatgactgagggtgctgtctctgtgcccgtcttatttttcacaatttctataatgcacaagttacttttataatccaacaaggatatgttttcaaaatgacaaacttggccgggcgtggtggctcacacctgtaatcccagcactttgggaggctgaggtgggtggatcacctgaggtcagcagttcaagaccagcctggccaacatggtaaaacctggtctctactaaaaatacaaaaattatctgggtgtggtggcacacgcctgtaggcacagctacttgggaggcggaggtggaggttgcagtgagccgagatcacaccactgcactccagcctgggcaacagtgagacactgtctcaaaaaaaaaacttgtttgaaccacgtggacccacatatccatggtcagggactcgaatccctggtattcagagggctgccttttcctaagtgcaggttctgtagggtctttgcagggctaacttcgggacttcagtatgagcagattttggtaaggggtgggggggggcctggaaccagctgaggacaactgtatattgatccttacacacacagttttccttggttttgaacttattacagaataagaattatttattcttacttgaatttactgaagtattttttcattaggattgcttttcactgctgggtcatctcccgacatgcgggttgttattttttgggttctccgacatctctcctgatggcagcacttccttgggtttggtccttcagactctgcatctgtccggtcactgatggtcacaaccagcagttccttaaaaacctgaaattgggccgggtgcagtggctcatgcctgtaatcgcagcactttggaggctaaggcagtaggattgcttgaggccaggattttgacaccagcctgggcaacatagtgaggccgtctttaccaaaaactttttttttaatttattgatggaaacagtctcactcttatcaccatggctggagtgcagtggcgcgatcttggctcactgtaacctccacctccctagttcaagcaattctcctgtctcagcctcctgagtagctgggattacaggcatctgccaccacgccgggggtgtttttttttgtttgtttgtttgtttttttgactgagtcttgctcttgtcgcccaggctggggtgcagtggcacaatctcagctcactgcaagctcctcttcctggggtaaagccattctcctgcctcagcctcccaaatagctgggactacaggtgctggccaccacacccaactaatttttcgtattttcagtacagacggggtttcaccacgttagtgaggctggtctcaatctcctgaccttgtgatccacctgcctcggcctcccgaagtgctgggattataagcgtgagccatgacgcctgggtaatttttctatttttagtagagaggcaggttttgctatgttggccaggctggtctcgagttcctgacctcaggtgatttgcctgccttggcctcccaaagtgctgggattacaggcatgagccaccgtgcccagcccccaatttttttttttttttccgggacagtctgtgtcgcccagcctggagtgcagctgtgcaatctcagctcactgcaacctccacctcctgggttcatgcaattctgctgcctcagcctcccgagtagctgggactacaggtgtgtgccaccacacctggctaatttttgtatttttagtagagacagggttttaccatattgattgggctggggctggtcttgaactgacttcatgatccgcctgccttggccttccaaagtgctgggattgagcactttgtgtaagccactgcaccggccccccaaattttttaaattacctgggtgtggtggtgcacacctgtggtcccagctacttgagaggttgaggcaggaggatcacttaagcctgggagttccaggctatagtgagccatgattgtaccattgcacttcaacctgggcaacagagcaagaccctgtctccaaaaaaaaaaaaaaaaaaagaatcccttgaacctgggaggtggagtttccagtgagctgagattgggctgttgcactccagcctgggcaacagagcaagactcaagtctcaaaaaaaaagaacagcgtagagtaaaatgccaagatagggtttcccttcgaagagaaaagtctgtcttgtgaagcgtttcagggcttgacagatgtggaggcagcacagggtgagtgggtctgcatgtccacatgtggcatttgtggactagcaagtgagatctctttgttcaagggtgtgagaaagatttccagagccagtacagcaatgcatacccccagaccctgggtatggacccctctcatatggagatgaattctagagaacagccatagctgtgacaatcagtattctatacaaccttagtgatacggcttcctttaagaatttgtaggccaggcacggtggctcacacatgtaatcccagcactttgggagaccgaggcaggcagatcacaaggtcaggaattcaagaccagcctggccaatatggtgtaaaccctgtctctactaaaaatacaaaaatcagctgggcgtggtggggggcgcctgtaatcccagctacttggcaggctgaggcacaagaatcgcttgagcctgggaggcgcaggttgcagtgagctgagatcacgccaccgcactgcagcctgggtaacagagcgaaactccatctcaaaaaaaaaaaaagacaagaatctgtggttaaggaaatagctttctgaggtttctttaaaaaccatcctgaaatgcacacagctgatgaagccacgtgacagtgtataaagcagtttaaagatcttaataaacgaggccctcataggccccttgcttgggcccactgcatggtgaaccatgtgcagaaatgtcttcccagctgtgatggtttcacattgtcatcgtcgtccccccgggaggttggagcatcaggggcctggactcactggactctcccctctcagaggtgcggaactatatctgtgacgaatgtggacaaaccttcaagcagcggaagcaccttctcgtccaccaaatgcgacattcgggagccaagcctttgcagtaagtgtgagtcaggaccccctcccagggctgtggccctcgcaccttcttatctgcctctgtcccccaggtgtgaggtctgtgggttccagtgcaggcagcgggcatccctcaagtaccacatgaccaaacacaaggctgagactgagctggactttgcctgtgaccagtgtggccggcggtttgagaaggcccacaacctcaatgtacacatgtccatggtgcacccgctgacacagacccaggacaaggccctgcccctggaggcggaaccaccacctgggccaccgagcccctctgtgaccacagagggccaggcggtgaagcccgaacccacctgaggacggcagtgaggatgagcacctctagcagcctggactccgcagtggctgtgtcagcctcacccttcgtgtgcacccgcatgggagggtcggagggtgctgcccgcccttggtgctggaggcgggcttggtgtccggctcaagtagccttcctctgctctgggaccagtggtttattttcccgcaaacgctgagtgactcggggccggacagttcataaataattgattcctttccccactaaagcagtcgaggagatttgtaatccactttttagtgcaacaagagctccatgttatgcttgtaataaattatttacacgggagctgggctggtgtgcagtggcaggtcccgtcagaagagatgaggctcctgggacaggtcagcgtcaggggcagcctgctgtctgctctggagggcggcgctcacctctgggtcgcagtccccacgatcagccagcagctgtgagagaggagcaggtcctcagcccatgccgcccactaggcctcagaccacaggggaggggctctggcagaaatagtcgagttgtattgccagccaggcaggcacatggcccaggcagctgtcaattctcatgtcccccacatggcccaaggtgggcatcttgacgttacctctgccacgtgtgagaagctctttttcgggcaccgaggtattaactgcagcagaaaaagacgagcttttgttatcagttccacggggttgccctagagagaaaacaggcaaactcacaggttagaagacatacagaaacagggctggtgtgtcccccatagtctgcatgctgtgccggaacattctttggcagaaggagcctccggctggggggagctcccctggaggtgggactggcccttgcacctgcctgacccttgagctccaggctcctgccagctggaggtgaaactgtgcttgtatccccagccacgaagagctggaccagcttcaagtacatgtccacagcaacatgcaggaaggcctcttccctgatggccgcgtcttcatggaagtaggagagaagactagaggtaaagacatagtgacaaatggctacagactgctggaaaggtagcaggtgatgccaagggatactgctcatctgtggagcagaggcacagacaacccttcccatctggcgggacccagaggtgctgagatgggggtctgggaaacactgcccagccctgaccagccctgtgggtggaggtacctgtaaaaagcgaaaggcagcagcctggtgtgctgatccggggccacacggaggaggagccgccccagcctgaggtctgcaacaccaagaagtggctcaggcaactctggacatctctgcctattatcagtgctggggacacccctgggggtcgggacgtgtaccctgggaggcctggctgtggggatagtgtggggcgaacagcctgagctgaggatacccaggtacctgtcagcagctgggagaggatgggggggtcgacctcttgcaggagggtgggtgtggtgcagagagaggcagtccccatgataggcccattggtcctggggttgaccagtgagccagtaaattatcttattgctttaaacaagtttgtgcttaatctgtcccaactaaaatggagcttataaacttacttagcaaggaacctcaaggagggctcgttcttaaccatttgcaagatgcctctgaaaagagcggccctccgcatttgtgcctcagcagcgtgtttcttaccactctctgtcaactgaaagagtgccagccaggatatcttcctcttctctaaacactcgaggattgctgcacaaacgtggaaagcctttggcaggtctgtggtgctctgtaaaccgcaggagaccaaccctgagaatggccgacctggtgctcccatgggtaggagggtacagccctcagcacagaagagggcatttcctctttgcttattgtaagtcttaaaactggtgacagttttacctatagaaggtaatactgggcctctggacagaagaggctcaggtaggaggccagggacttcgagcacccacaccaaggctgctgcaccacgtcctcaaataagacattaaaagaaaggcccacaggccggatgcagtggctcatgcctgtaatcccaacactttgggaggccgaggtcggcggatcactgaggccagttcaagaccagcctggcaatatggtgaaaccccgtctctactaaaaatacaaaaattagccgggtgtgacagactcacgcctgtaatcccagctactcgggaggctgatgcaggagaattgcttgaacccaggaggctgaggttgcagtgagctgagatcacaccactgcactccagcctgggtgacagagtgagacccccatctcaaaaaaaaaaaaaaaaaacccacggcctgggagttctcactcacacttccgcaaacacaaggagctcctgagctagtctggaaaccctgacttggaagctggctgcctggtgcccctgcctggcccacagtgggagaggacaccttggctggtaaggtctgacttacatttgaggtcagatgtgacgacagcaggcccatcaaggagaagaagaaaaggaaaaccaatagctgtaaataaaaacgtgcacttattattacattaaaattacctgtgctgtcattctaaataaggctgacacattcctctttaattgaaattttttacatctaggccataaatcctttaagtggatcttagaaaactttccaatcacttctagagagacagcttaattgagaattaattactactggctgggtcatttcacacttgcctttaaacaaagctagaaacagtttgaaaaagtgacaagagccagaaagagaagactgctgcggtctccttggctgtgcgcagtcccaactcagcatcatctccctgcaaggcctcctgtcagaagtgtttgtaaaatccttgaagataagcccacaggctccagcctaaagtagggcctgactgggcagggtctctgtggacactcctcgctgcacactagggtcctaaggccctggagccactaaaatcccttctaacaaaactacacaagaaacctgaagacgtactcagaagaacccctgcagggtggttataatcaccaaaaccctgggcgctgctgtcgatccagctttgagctggtgtaagttgtgtgctgacatggcacctatgcgttgcggatctcgggctgggcacagagggctgctgcctccagctctcttgtgggatgcttgtttctgttcctgttctgcacacaccacccttggctccctgcacagagagctgtgtgggtgtcactggtcttgtgggggcagtcaggctttccagggtgcagcaaccaggtgggcagtgggtctgagtcgaacatggtccctggcctggaattcaagagcagcctctcccactcctttccctatgcctatggctgcagacggtcccatccttgctgcctcttgtccccagcaccccaggtctgagctgtctcactgcaagcttatctggggctgtccctcagcacatgaatcaaggctactgcagcatgaacacagaaggcaccacttgaaggctgacagcatttacgctgggctgtgatgaggataaaaataagctgaagaaacgcacttcaagcctgggcaacacagtgagacccccatctcttttaatttttactttaaacaaattttttttttttgagacaagtctcgctctgtcacccagactgcagggcagtggcgtgatcttggctcactgcagcctctgccccctgggttcaagtgatcctcctgcctcagcctcctgagtagctttacaggctatgggattgtaggtgcgcaccaccacacccgactaatttttgtgtttttagtagagacagggtttcaccatgttgcccaagctggtctcaaactcctgacaccaagtgatccgcctgcctcggcctccctaagtgttgggattacaggcatgagccaccatgcctggactacagacccccatctcagaaaaaattacaaaattagccgggcatggtggcacacacctgtagtctgagctactccagaggctgaggtaagaggatggcttgagcccagaagaggctgcagtgagctgactgcaccactgcactccagcctgggcgacagtgagaccctgtctcaactacatacaaccatttaaaaaactgaaattattatttttactagtaaacttgatagtcaaagtcttactccaagccagctgggcgtggtggctcacgcctgtaatcccagcactttgggaggccaaggcgggaggatcacggggtcaggagatcgagaccatcctggctaacacagtgaaaccccgtctctactaaaaatacaaaaaaaaaaaaaaaaaaaaaaagtcttgctccaagccacatatttgtctttagaaaaacagttcatcagacaagcccagagaaatagcactgattgaaacca

SEQ ID NO: 37 - DNA, 150481 bp, Homo sapiens
ctggccaacatggcaaaaccctgtctctactaaaaaaatagaaaaaaaaaaaattagccaggcatggtggtgcacgcctatagtcccagcttctcaggaggctgaggcaggagaatcgcttaagcctgggaggtggaggttgcagtgagccaagattgtgcactccagcctgggtgacagagcgagattccatctcaaaaaaaaaaaaaattggccaggcacggtggctcacacctgtaatcccagccctttgggaggctgaggcgggtggatcacaaggtcaggagttcgagaccagcctggccaacagggttaaaccccgcctctactaaaaatacaaaaattagccaggcatggtggcaggcacctgtaatcccagctactcaggaggctgaggcaggagaattgcttgaactcaggaggcagaggttgcagtgagccaagattgcaccactgcactccagcctgggcaacagagcaagactccgtctcaaaaaaaaaattaaaaataaacagaattagctgtgcatggtggcacgtgcctgtggtcacagctactcgagagggtgatatgggaagatctcttgagcctgggagatcaaggctgcgatgagccaagatcgcaccactgtactcagcctgggtgacagagtcagagcctgtttcaaaaaaaaaaaaaaaaaatcaccatggatggcaagtctgcgtctgagaggcactttctgttacagagtcccctgattttaggtgatgacactgagccccagagagggtaaaacactcaacactcagcttgagtcgctcagcacatctgtggagagtccacaccctaaggaggggactgcatgtcctgctttccccatgccactctagggaccttgggggcaggctctgtgtctttgtgtctctggaacagagctctgggacctctacatattggtgggggctactcccaccccataacaggttgctgctgggtggtgaaacatggcagcagtgtggtcatttagagcacaaactcaaaggacacaattccgtagctgtatgggcttaacctctgtgaaccccagttttctcatctgcaaaatggagctaatagtaccacggttgggcgcggtggctcacacccgtaatcccagcacattgggaggccaaggtgggcagatcatttgaggtcaggagttcgagaccagcctggccaacatagtgaaaccccgtctctactaaaaaatacaaaaattagccaggcatggtggcccacgcctgtagtcccagctactagggaggttgaggcatgagaatcacttgaacccagaaggtggaggttgcagtgagccaagattgcgccacggcattccagcttgggcaacagagtgagactctgtctcaaaaataaataaataaataaataaataaataaataaataaataaataaataatagtacctacctcatgttgtgtcctgaggattacatgagcaactaagcataatataacaaggcctggttccaaggaaatgccattacagtgcttgctatgataaccactcaggaggaaacctagtcagacagaccagagctactttgctcctccactggctgtgtgacctcaggcaagttaattaacctctctgagtcccatttcctcatctgctaaacaaatagtacttatctattgctatgaaagcaaaataatgcctgtaaaacacctgacacctgcttaagttccttgtgtgcagagaccacgtcttgcacatcgatccccctcagggctctcactccatggcctgggagaatgaatcccttccccagccacccttctctggctcgccatcctctttctggtgctagcagacagcagcatctagtggacaagctctggaactgcattctggccaagggtcactcgccaagctgctgtgcagtcatttaaatgaggctttttaaaaatgctttagacaagggtggaggggtcaggaggaacggaggtggggtgaaatgcattgggcaagtattcattaggtgcctgctgtgtgcaaggcactgatccaggaccttaaaaaatgaagcaagagatacaagatcactgtagaaggacacaagaaaaatcacaaataattataactttgtcatcaataccctaactttttatcttagagaaaatgtgaacacagcatagggggacttggcacactggacagtgtcttctcaggaagtgttttttgtttttgtttttgagacagggtctcgttttgtcacccaggctggagtgcagtggagtgatcacagctcactgcagccttgatctccctgaagtggctgagcaatcgtcccacttcagcctccagagtagttgggactacaggtgcacgccaccacacccagcttgttttttgtttttgtttgtttgtttgtttttggtagcatcaagttctccctatgttgtccaggctggctcaaactcctgggctcaagtgattctccccgccttggcctcccaaagtgctgggattacagacacaagctaccttgccagccttctcaggaagtttttacaattgcaggggcgatttttttttgaaatggttgttacatgtcaatgactctcagttaaggccaaggcaataaaatgaaagcttaggtcaggaaggttctgcctcgagtcccctgacccaggttctccatagacagaggggagcgggagtgtctggccccaaagccgcactcgccctccacactccacagtcccttcctaccagacacagaagagtgaagagggtctagaggtggcatgaagcacatctaactgggggaatcaaaaaatacttcatgggagagatgacattttgcattggagaatgaaggtaaagaaagcagggaggggcatgctgggggcgctggggaaggaagtgcattccagcctagtagaccaggtataccttcactggtataaagcgaagtaatgggaaccaagttggttgagggagctgggggttaaggccaaatcacagagggctccaaatgacaggccaaggaggctgcatttaatactatcaggggacccactcagtaagaaggtaaactgatctgagggcatcagagaaaaaccagacacccagaaactattaatagttaggtggctactgtcatagtccagcctagaggtaggggacactgcaccatgatggagtggagattagagacagaattgtgagatccttgggaggggagaagcagggggaggcttggaaatagatagctgtgggtcaaatgggaggacccagctgagaattcaaggtgctgagtccaggggaagtaatggggagaaaagcagagctgtaaccagaatgtggacttgaccagggggactgctgtgggcagggagctgtgggcagggaccaggagcttggtctttgacaggggcaaatgagttgccattgtccctgtggagatgcgggaccaaggctcaggaggggtgctggagggagaggaggcagggacagtcaagtgggagtcatttacccatataggtgcaagctgatgacctaggggaggaaaacagaatcctgcgggcagatagggtggagggcaggcgccaccggacttcatcggactttgtctttttaaagcttctgggggaggggggcaagagaaggaggagatggaagaagacagaggcgggacctttggggacagagacccttgtgagtgtccagcagtgtcacaggctatgcagaagtccaggagtggtggcagggaggcaactgttgaatttgaggttgggggctctcctggctgaccttggcaaaagcggtttcagggacagaagtcaggctgcagaggtctaagaggtgagaggcagaggagctggaggcggctgatgctcccgggaggagggaggagacggtaagcagggctgggataggggaaggtgagcgaggggttactctgggggtcctgccagaccctgaagaggagggtagagacccagaggcacatggagaggagaccctctgagaccctttgagacagaaggaaaacaggtgatgctgtaagagcttagagacccagacagaaataagactatgaccaccacatccctgacaaaccaacgtggtggccaccagccctagaggacatgggactggaggaagggaggggtagaagcaggggctgaagacacctgggagggagagcagacttcctcagaccctctcgggctccagcgtattggcgtgggagagggagtcccagattcccgggagctcagagcctagggaaagccaggggtccctttcccctttccccaggcggctcctgttcggagaaacttgtggccctcgcttggaagcacgcttttccctattccaaccccaaatactcagtacctgtttgcttcccccagaagtctgggcaagtttctttcttttctgggactcagtttctggggtgggctgaatgatggaacccaaaaagatgtgtccaggtcctaatccccagcccccactcccccagagcctgtgaatatgacttcatttggaaaaagggtctttgtaaatgtaacttaattaaagatgtcaagacgagatcatcctggattgtctggtgggccctaaagccaatgacaagtgtccttgtgacagacaggagaggggagggccataccatgggagaatgggaactctgcagccccaagtcaaggaacacctggggccacagaagctggaagaggcacggagggggcccttcccgagagccttcggagggagttcggccctgcaatgccttaggtttggacctctggtcccagtaaatggaagagaagaaatatcggggtttgttgttgttgtttgagatggagtctcactctgtcgccaggctggagtgcagtgtggtatgatctcggctcactgcaacctccgactcccgggttcaagcgattctcctgcctcagcctccagactagctggtattacaggcatgcgccaccaagtccagctagtttttgtatttttagtagagacagggtttcaccatgttggccaggatggtctcgatctcctgaccttgtgatccacccgcctcggcctcccaaaatgctgggattacaggcgtgagccaccttacccggccgcttaaatatctgtcttttaagccaccaagtttgttatgatttgtcatggcagccctggaaactaacgtagttccctattctgtaaaataactagaattaaatcttatttggccaaaaggtgtgttttttaactcgccaccccgcccccttccaggttgagttgtaaccctttcacttgcagggcgggggtgggggagtgagggtgggggcaggtgatgcagggaggaaagaacctaaattaacagcatctcctcctgccccgaagaggaggaaagtccaagaagagtatttcatgcccaccagcccttcctccttcacccagagctcacaccatcatcccgtgcccggctccaggcaggcgggtggggcagacgctgacccggagcgcgttactaaaaccaaggggtctttgaaaatcagggagtctgcctttccagacttctgacagcccccctcttcacagcgattctctccccaccccttgtgtcttcttcctcccgttctccattcttggggggcaaaataagatggagactcccgaagcacagggtggaaggcactcccccaccccttcttcctcctcctcccacaacacagctggagggggaggggaggtcagcagggttcacagaggccagatgttaaggaaaaagagagaagtgcccacccaccccacccccaccctcacccccaaggaaagaaaaatgaaaggagacagtttttaaaacaaacaaaacttttatggtccaaaacagtttttctcaagaatctgctctatgcaaacaataacaactttttacaaagcattttcacagaaaaggagacaagtccttccccagcgtgggaattgttcctctcgcacctcgttttcgggggaagagggggcgctattcactagtgcgggatggaaggcgcactgggtccctcagttgttcggcagctccaaaagccccagcttcccttcatacctcaacttgccatctccctaagacctaagctcccctgacctcacctgggtggaggagaaagcacttccaatcctctctgactcaagatcctcctagctggagggcatggcagagggcatgatccaggcctatctcacccctcccctggaaaacagaacctctgaccccaaacctaatcccctggccctgcccctttcggatccatcagatctctgacaactcccgcaatccctgaggctggggtgttgcggggggaagcttaaggtacctcagcccaggttccatccagactcaaactttgccccttcaaaccccaggggactcttgaagttaggccaagagtcctttcatttaccacctctgcaaagtgcagcttgttttgtttccactctttaagggggctgagtttgggtgtccaaagaatggacttgggcctgccttccacctccaccccctctcatccataaatcggtggaggccctcgaaaggcgacttgtttggtctgattttattgatttcttccaccttctattactttccctgggacagtgtctagccccttccccaggcaaagtaagcactttccaggagaggaggtccctcagccctacccgtcctaagggaagtaagttgggggagggggctgattaatcaaggttgggggaaatctttctcaccggccagaccttacactcggaaagcaaacaaggaaaaaacgggaactccaaaactggacaaaagggaaaggtcggcggctgaggctgaagatctcaccaattaagggtcacctgcacttgagggggcctagaaaggggacaggaagggggtgatcttcctcttacccaagttccctcacccattaaaggctccagcggtgcttggagcgttagggaaggcctgaggggagcaaagggttaaaggcctggacagtgggggtgggggatgcccccagggagctgccaatcatctccccacccccaccacagccccgcaccccaggctcgcccacagacacagtaacaaccggtttgtccatcaccgaggtctctctcttctccccttttttttgggtgggggggtgtctttgagcggtggcctcctttgctcccactggggtgcaggccctgcctccaacggtccgagatggaaggaggcagggattggaatctatgtcatcagccttctcccgactccagccctgggttcctctgcaaaggatgagggggagggactgtcaccccgaaaacttaggtgcttgaatgaagatcactgttatttaggtccctctgcccacagctcctaaaatgtaaaggaaggggacaaatgtgagaaacggggctccctcctcaagcccgcggtttggccatggtcccaacttttcccctttggcagaagtcccacggtcagctttcatccatgttgatcccccagaatttgaggccagggggctcagggacagcgggaccccccatctgccacctccacagcgggtgggcgggcgggggcttagagtctccctggaggcgaagcgaggatgccggctttaggtctccgtcttcccccaccaccagggccggggggcaggggaagcagttgaggaggctgaaggtgctcgtggtggggagcgtcggtgcagggcggcggggctgcgcggtgcgcggagggggcgccggcagccggcgtttcttggcggctccccgagccggccctttcgcaggcggccgctctggcccccggcgcaaactcggagtgtccaaggcgaagcccttcgcgtaacaccaaagtttcgaccggcggatcagacgatcgaaatgttcctggcggagatctccgggtgcggccggagccgggctggccgtcgaggggctggccgctggagcctcgggggcggccggcggggggtttccatcgacttcggcaggctggccgggcaggaacggccgcggcgccgtcccgggacccgcgggctcggtggagaggcccgcaggtggcgacggaggccgggaactgggttcctgaggcgggctggcggctgggccacgctgaggctcgagacccggggccgggcgaggcggggccgaggcgaagctggtcgtagattcccgagggtgcgggggcgcagggcagcggcccggaggtgcacaggagcgaacgccgaagtgcgggaaaccgcctccgccctcttcctcctctccgcggcgggggcacgctgcgacgtccgcatcctcgccggcggcggtgttaggaacgccgggccgcccggtcggtgcccagaggtgcttcaggccatccggggcccagccgccagggcgcaggggggcctgagggccccgcagcactggggaccgcgccgccagctccccaggccccgggcccagagaggacgcccggggcttggcaagggcgcagaaggcgagggcacgcaggcacagcggagagaattcctgggtcccccgacacggcttccggggcgtgggggagcagggcgaccctcgcggggacgccggcactgccaggcggggcgcagggcacagggtctccatggagcagcctgaggggtgcccactgagcgggtccaggtcccagcggcgggatgccctggctgcccgaagagcccacgggtgaggggaacatcgccccccgtcgacggggaggtctctgctcacgggcgcccccggcccgccacccggggccgcagagctcgggctccctcttcgctctcctcacgcggccctcccggcggccggactcctgggtccctgtgagtcccggcggggtcggccgcccttctgccgccgcgtccccttcgcaaccccggcgggagaccctctcgagtcgcccgaagcgcagaggcaggggaaacaaagcggccggcggccgcgggaggcgggaaggaccccgggcccggcacccggtgcccgggcccaggcggcggggagggcgccttccgcccgctcggtttctttcttccccgctggctcccggagaccgcgttatagagaactgccccctcgctgccccaataccagcgccggggccgcgagcccgccgctgattgggccgcaccgcccgtgacgttagcccggaccccacccctccggcggcaccgcccccgtccccattccgcacacagacacacacacgtggacccggcgcggcggcggctgggagggagcgcgggagggagcgtgcgcgggtgggatcgcgagcggccagatgcgccgccgcacgtggcccggtggcgtcctgggatttcgtcgtcgcaaagccactcgttttttcccgagcagtcacggttttgcatctgtaaaatgggacggttcatatctgccctcttgggactaaaagagctatgtgaatcaacgtagatgaatctcagaaataatgtttaggggaaagatgaaatgaggcaatggttgtttacaagctttgcacagcagggattctagcgggccgtgaatggcccctaaaacagtgcgtggcacacagtaggctcaaaaatgctgtaatgtataagtagttaataattcagtacttgtatgcaagatgaacaaaaaaaataaatttggaagggtgggagtgttattacatccatggaagccgataaataggctgtctcggtatctatttccatttctctgatgcagtatctaaatactccgcctcaactaaattccgagggctgactctgcaacccctgacccccaatcccaggatgcccccctctgaggtttgatctgccaaaccggttgaagaggccagaggagggcacgcgcagaccctcactctcatctgccccaaggaaaataaagaaaaagtgaattcccagtacaaattctgataatgcagcacacacccccaccctgttctatccccttaaccttctttagtttctgcatagcttattgttacataaaagtctgtaaatggatttattctttagtgtctgtctctcccattagtctggaaatgagttgacgagaactttgtcttgatcattggtgcatcccccactgcctagaacagtggccaagatataataggtgctcaatcaatatgtgtgaatgaatgaatgagcaagtgagcgagtgaatgaatccttgggatatttctctcttgataaaaatcaggttattggaatactgccgtttcctatctgtggaaatacagagattggtatgatgacttggggtaaaggtgtggaagaatgctgggggcggccccacagataaatatcttattctggagccaggacaagagagggtttcagaacggggacaaatgatgcagcttgcctccgggcccttctagcagtgacaacagaggtgtagtttccctatgtgtcatcaaataacatctgggaggacaggggtaaggaggatctgcctcccccacctgcaaagtccagaggtaaagtccctaggtggggcgagggtttgaggaaggaggaggtgtgatgttccattgcccaaaacactcaccctctaacatctgcagaagagctctccagggcagttgtcacaaggggggatcctggggtcctgccaagtcatgaagctgagctgggtctagactccagggctcataattgctcaaaaagcccacctctacacacacacacacacacacacacacacacacacacacacacacacggaaagttctggaaggatgatcttcatggctgtctcttctgcaggacagtgctgaggactcatcctcaacaacagtgcctacttgcactcctgtgcctaccacagtgtagacacaaggagagaatgcccaagaaaatgatcagtatgaataaatgagtgaatattacataacagtgcagatcaatggcctcttctttctctgcctccaaaagctcccagctcccccttccccatgtgagtttgggggctttattgaggggtcattacgattgtgagtgcttctctctgcctccactatccctacttccccttgctctcatcaggcaccccagaatatggactcagggatggaatcactacaaacagtaggagaatagtgtgagtgcctctccagctgaaaggagatcatcaaaccaccctttatggcctggatgggggcgggggtggcgctgtgcaaccctgggcaggtcacctagacactctaagtctcaatgtccttatcagtgaaaaggggacaacagtggcttcctcacattgttgggagggttgaaacatgatgtgagcagtcaccagaactcacgtgggcaggcccagctgctgcaattaccatttcctccggtagaggacactcgaccccatcctcagcctgctatgagggcggcaacacccttctcaggaacctctcctcctcataggagaaaaagagggacaaggctggatgccgggtcccatctaacacttccagagtgaaggctagaaagggcccctctggatccagaagccagcccttccctttccttggcccatctaggtctcacctggggcagtaaggactgtgttcaaggatttgggagcaggagacctgcccggttgccccttttggggaactgcaccccaggcgtccaaccccatagtaacttctgtagtacttactgcccagtctctgttctaagaactggatgtcacttaatccccataacagcctatgaaatagaccttttttttttgagacagggtctcactcggtcgcccaaactggagtgcagtggcgcgatctcagctcactgcaacctctgcctcccgggttcaagccattctcctgtctcagcctcctgagtagttgggactacaggcgcgcaccaccacgcccagctagtttttgtatttttagtagagacgaggtttcaccatgttggccaggatggtctcgagctcttgaccttgtgatccgcccgccttggcctcccaaagtggtgggattacaggcatgagccactgcgcctggccgacactatttttaaaagtgaacataccacacataacccattttaagtgtccaattcaatgatttttagtaaatttacagttatgcaaccatcatcatagtccagttttgggggtttttttgagacagtttcactttgtcttccaggctggagtgcagtggcacaatctcagctcactgcaggcttcaccccccgggttcaagcaattgtcctgcctcaacctcccaagtagctgagactataggttcccaccaccacgcccagctaaatttttttttttttttgagagtctcactctgttgcccaggctggagtgctcaatctcagctcattgcaacctccgcctctcagattcaagcaattcttgtgcctcagcctcccaagtagctgggattacaggcagatgctaccacgcccggctaatttttgtatttttagtagagacagggtttcaccctgttggccaggctggtctcgaactcctgacctcaggtgatccgcccacctcggcctcccaaagtgctggaattatgggcgtgagccaccgtgcccggccccataatccagttttagaacattgcttataagactcctcctccccacttgtagctctcccttcccatccccagccctgggtgactaatctttctgtctctatagagttcccttttttggatattttatataaatggaatcatgcaatatgtggtcttttgcatctggcttcacaaaagcataatgtttttgaggtttacctgtgttgtagcgtgtattggtaatctgttccttttttttttcttttgagatagagttttgctcttgttgcccaagctggagtacaatggcacaatctcagcttactgcaacctccgcctcctgggctcaagcgatacgcctgcctcagcctcccgagtacctgggattacaggcacccgccaccacgcctggcaaattttgtatttttagtagagacggggtttctccgtgttggtcaggctggtcttgaactcccgacctcaggtgatccgcctgcctcagcctcccaaagtgctgggattacagggatgagccactgcgcccggcctgttcctttttattgctgagtagtagtctgttgtagggatatgccacattttgtttatccaatcacatttgggtgtttttcactttttggctattatctataatgctgttatgaacatttgctatacacgtcttttgtgaatatatgtttttatttctcctaagtagacatttaagggtggaattgctgggtcatatgctacatttatgtttaaccttttttttctttttcttttttttttgagacagggtctcacagtctcattcaggctggagtgcagtggcacagtcagggctcactgcagccttgacctcctgggctcacgagatcctctgcctcagcctccagtgtggctgggaccacaagcctgagccaccatgcccagcgaatttctttttaaattttttttgtaagacagggtctcgctatattccccaggctggtctcaaactcctcggctcaagggattctcctgcctcagcctcacaaagggctgggattacaggcatgagctaccatgcccagctgtgtttaattcttttaaaaactgccaaggtcgggcatggtagctcacacctgtattcccagcactttgggaggccaaggcaggctgatggcttgaggccaggagtttgagaccagcctgggcaacatggtgaaactccatctctacaaaatacaaaaattagccgggagtggtggcatgtgcctgtagtctcagctactcagaaggctgagggtgaggaattacttgagtccagcaggtcaaggctgcagtgagccacattcatgccattctgtgcctgggcggcagagtgagaccctgtctcaaaacaaaacaaaactaaactaaaaactgcaaggctgttttccaaacgggctattccattttacattcctattaatatccatgatataggctgggcacggtggctcacgcctgtaatcccagcactttgggaggctgaggtgggcggatcacctgaggtcaggagttcgagactagcctggccatcatggcgaaaccccgtctctactaaaaaaatttaaaactaggccgggcgcagtggctaacacctgtaatctcagcactttggaaggccaaggcgagcagatcacaaggtcaaaagatcaagaccatttggccaacatggtgaaaccccatctctactaaaaatacaaaaattagctgtgcgtggtggcgggtgcctgcaatcccagctactagggaggctgaggtaggagaatcgcttgaacccaggaggtggaggttgcagtaagccgagattgcgccacatcaccccagtctggtgacagagcgagactctgtctgtaaataaataaataaataaataaataaataagccaggtgtggtggtgcacgcctgtaatcccagctgcccagattctcgggaggctgagacaagaatcgcttgaacccaggaggcggaggttgtggtgagccaagattgcaggactgtactccagcctgagtgacagaacaagactctgtctcaaaaaataaataaataaataatccatggtataaatgaggacattgagggagataagtgacttgcccaagttacactgctagcaagtggtagagccagaacccaaacccaggtagttgagtcctaagttagctctggtaaccacaaggctaccccacaacaatgaatccaagagggaagccatttctccaccctgccacacccagccaccatcatttaacctttcttggtcccagaattccctaagtcagcagggctgcatcaccccctagcataaacccacatgttcctctacctcctctgggaatttgcacccagggttaacagcttaagttctgggctcagatgggtcagttcacattccagacccatcattttactagctttgtgactttggggcaattacttaacctcaggaagctttagtttccttatttgtaaaacaagactagcatctttcctcatgcaattaaaaaggtattatatgatggaaaatttcaaacctacacaaaagtaaataaacataattaacctctgagtacccaatatccagcttcgacactcaccaactcatggtcagttttgtttcattcttacccacccacttcctcacttaaaaaaaaaaaaaatcaaattggccagtatgatggctcacacctgtaatgccagcattttgggaggccgaggctggcagattgttagagccaggagtttgagactagcctgggcaccatggcgaaaccccatctctaccaaaacaaacaaaaacaacaacatgtaaattagctagtcccagctactcaggtgactgaggtggaaggatcccttcagcctgggaggttcaggctgcagggacctgcaatcaccactgcactccagcccaggtgacagagcgagaccctgtctcaaaaaacaacaataacaacacaattttatttaggtatgatttatgtaataaaatgcacattttaagtgtacagttcaaatggttttgccaaaggaatatgcccatgttaccaccacaattaagatgtattatagccgggcgcggtggctcacgcttgtaatcccagcactttgggaggccgaggcgggtggatcatgaggtcaggagatcgaggccacggtgaaatcccgtctctactaaaaatacaaaaaattagccgggtgtggtggtgggcacctgtagtcccagctgctcggagaggctgaggcaggagaatggcgtgaacccgagaggcggagcttgcagtgagccgcgattgcgccactgcactccagcctgggcaacagagcgagactccgtctcaattaaaaaaaaaaaaaaagatatattatagaacaatggccaggcacggtggctcatgcctgtaatcaatcccagcactttgggaggccgaagcaggtggatcacttgaggtcaggagttcaagaccagcctggccaacacggtgaaaccccatgtctactaaaaatacaaaaaaattagctggatgtggtggctcgtgcctgtaattccagctacttgggaggctgaggtgggagaataacttgaacccagtaggcagagattgtaatgagctgagattgtgccactgcactccagcctgggtgacagaacaagactccatctaaaaaaaaaaaaagaaagaaagaaaaatataagatatagaacaaaccccaaaccccatattattttgttttgctttgtttgttttttagagacaggtcttgctctgttgcccagactggagtgcagtgatgcgacctcggctcactgcaacctctggggttcaagtgattttcataccttagccacctgagtagctgagactacaaacgtgtgccatcacgcacggctaatttttgtatttttttgtagatatagggtttcactatgttgcccaggctggtctcaaactcctgggctcaaacaatcctcctgccttggcctcccaaactgttgggattacaggtgcgagccactgtgcccaacctagaacaaaccccatgttatttttaggcaaatccaagacatcacataatttcattcctaaatatttcaatacatatttctataaggaccctttaaaagtaaacataaccccaacattattatcaaacctaaaaaaaattaacaattggccgggcacagtggcttatgcctgtaatcccagcactttgggaggccaaggcgggtggatcacccaaggtcaggagttcgagactagcctgatcaatatggtgaaaccctgtctctattaaaaatacaaaaaataatcagccgggcatggtggcatgcacctgtagtcccagaaactcaggagactgagacggaagaattgcttgaacctgggaggcacaggttgcaatgagctgaggtcacaccactgcactccagcctgggtgacagagtgggactccatgtcaaaaaaaaaaaaaaaaagaattaacaatcacactttaacttcatcaaatagccagtcagtgttcaaatttctaattatcttataatattttttctttacaatttttagtttatttgaattaggagccaaagaaggatttcaagtggttaatatgtctctctttttatctataaattccccctttatctctctctgtctctctttttttttttcctctttgcaatttagtcattggagatactacgattgtcttctagacttcccatagtctggaatttactggctgcattcccaccgtgagatttaatcaaacaatatttatggaacaatatttattaaggacctgctatgtatagtattgtcaaatttagcacagagctgggtgcactggctcacacctgtaatctcagcactttggaaggcgaaggcgggtgatcacttgaggccaggagtttgagtccagcctggcctacatgatgaaaccccatctctactaaaaatacaaaaattagccgggtgtggtggcgagtgcctgtaatcccagcttacaaaagaggaggctcttgtaagggaggctgagacaagagaatcacttaaaccctcgaggcggaagttgcagagagctgagatagtgccactgcactccagcctgggaaatagagcaaaactccgtctcaaaaaaaaaaaaaaaaaaaaaattagcacaaaatatacagaacatatttatttatactaaaaaacttacttattgtttatctataattcagatttgacagtgttttatctggcaactctatgtgccaggtgctattctagcactggggacacagcagcaagacagacaacccccacctcaaggagtttgtattctagtagattcgggaagccagctaatgcacaggcaaataatattccttctgaagatattgtgaggattaaagaagaaacctagcctaggcgaggtggctcatgcctgtaatcccagcactttgagagacaaaggaaagaggatcacttgagtccaacaagagttcaagaccagcctgagcagcaacatagcaagaccccatctctgcaaaaagtgtaaaaattagctgggcatggtggtgcatgcctgtgcccccagctacttgggaggctgggacaggaagatcccttaatcccaaaagtttgaggatgcagtgagctttggtcacaccactgcactctagcctgggtgacagagcaagaccctgtctcaaaaaaaaaaaataattattatccataggtaagaaaaaacatggccgggcgccgtggatcactcctgtaatctcagcactttgggaagccaaggtgagcagatcatttgaggtcaggagttcaagaccagcctggccaacatggtgaaacccatctctactaaaaatacaaaaattagccgggctcggtggcgggcacctgtaatcccagctactcgggaggctgaggcaggagaattgcttgaacccaggaggcggaggttacagtgagccgtgatcacgccattgcactccagcatgggtgacagagcaagactccgtctcgggaaaaaaataaaaaataaaaaatgagaaactcacgtattaatgcttggtgcatagaagttcatgatcaatgtaagtgcctttggcagtagcttaggctgccttttccctttcctcctttctttccttgtcccatccctctccgcattcacttaggaactattccagacttgcctcctcctgcagtacttcctccatatgaccatggttaattcattcatttatttacctcacagttactgagcacccaccatgtagcaagccccaggccaggccctggggactcagagatgctggagacgcagtctggtgggggagatggacattacaagctgatctaagaagtagcaatagagggatgatcatggtcctggaatcttagaggaggatgaccctagaggaagaggaaggaggtcttttcagagaacgtaatcttcctcctatgtctacaggctgaacaggagtatacaaaggaggcagggctgggcatggtggctcatgcctgtaatcccagcactttgggaggccaaggcagatggatcacctgaggtcacctcagatcacctgagaccagcctgtcaacatggtgaaacaccatctttactaaaaatacaaaaattagccatgtgtggtggtgcatgcctgtagtcccagctatgcaggaggctgaggcaggagaatcactttgaacctgggaggtgggagttgccgtgagccgagattgcaccactgcagtccagcctgggcgacagaatgagagactccatctcaacaaaaagaaaaagaaaaaaaaacaaaggaggcaggagagaagagagaagaattccacctgcagaggaatatgagcaaggaaccaaggcaagcaagtgcctgccccatgtgctgccaacttccagccatcagcgtaccacccctctgttaagtagcagggtgccctggccttggcctttctcatccaccttcctagagtcatctcatctcccttgcacagccaatcactctcgccatcaggaggtctctcccattaaaaagctaaatcttccttgaccccagaggctacagccctatccctttcttcccttcacagccaagctcccccgagagctgtctacgcacgtagccttccttttctcacttcccacttgctccccaacccgcttccatctgcttccaccctcgcccgccaccggaatagctcttgctgaagtctcggtggcctccatctcatcgaaactggcaggcacttgtcagcctccctgacctctccgggcagcccgcttggctggccacttcctcctccgagacatttccagtccccttctttctggacaccaagctcccttgctgtcctgcctctggggctgcttcctcttgcttttcagtgcaggctcactctccccttttcagcccaaaatgtcggggctcctcaaggctttgtccagaactctcttctctctccagacactcttccctgctcactttgcagtcagcattggagccccggggttcagcctggccctttcctctcaggtctggcccagacaccacactgcccactcagtccacctcggacatttcaaaagcccctcaaactcagccatcccaaaccatcagcacccactccaccccctcttcccaggaaacctatcctgaggtgtggctcccccatctattcacttccacagccagaaacccagtcctcatcccgacacctccagccctccaagtcaatgcctcagcaagactcatcataccccacagtcatctttccaaagccacaaatctgactgttacgcccgtattcaaaaccttttttcttttctttttgagacagggtctcactctgtcacccaggctggagtgcagtggcacagtcacagctcactgtagcctcaacttcctgggctcaactgatcctcccacctcagcctcccaagtagctgggactacaggtatgtgccaccacacccagctaatttttaaaattttttggggggccaggcccggtggctcacacctgtaatcccaacactctgggaggctgaggcgggcggatcacctgaagttgggagttcgagaccagcctgaccaacatggagaaaccccatctctactaaaaatacaaaattagccaggtgtggtggcaggtccctgtaatcccagctactcaggaggctgaggcaggagaatctcttgaacctgggaggcggagttgccaggagccaagatcgtgccattgcactccagcctgggcaacaagggcgaaactctgtctcaaaaaaaaaaagtttttgtagagtcggggtctcaccatgttgcccagtctggtcttgggccagctggtgagcaaatgtggtcccagctacttgagaggccaaggtgaaaggatcgcttgagcccaggagttcgagatccatctctacaaaaaaacaaaaatctgttaatggtttcctactgctttcaggagaaagaccagactttttttaattttctttttgagatggagtcacactctgctgcccaggctggagtgcagtggcacgatctcggctcactgcaacctccatttcccaggttcaagtgattctcctgcctcagcctcctgagtagctgggattacagttgtgcgccaccacacccagctaatttttgtctttttagtagagaagaggtttcaccatgttggccacgctggtctcaaactcctgacctcaagtaatctgcccaccttggcctcccaaactgctgggattacaggcgtgagccaccaagcccagcctaaaagactaaactcttaatttggctcacaggtagtgttacttaactctagcaatgccacacacaggtcttcttagggaaggggacagttcccttgcctcttccttcagccactcatgtcttctttaggcctaaagcaataagctccttcctctctttccctaagcacttgctgttccttcagactgtaaactttccccccacattgcttctcctggccaacgcctgctcctactcagagctccactgagtcatcccttcctctaagaaaacctctcttcgcccttccagatgatgcccaggtcagtttccacactatccccacttcaagagctgtgtatatttccttcaaagatttccactggccaggcgtggtggctcacgcctgtaaccccagcactttgggaggccaagacgggcagatcacctgaagtcaggagttcaagaccagcctggccaacacagtgaaacctgctctctactaaaaatacaaaaattagccgggtgtggtggcacgtgcctgtagtctcagctacttgggcggctgaggcaggagaatcgcttgaatccaagagacagaggttgcagtaagctgagagggcgccattgtactccaacccgggcaacagagcaagactccatctcaaaaaaaaaaaaaaaaaaaagatttccatctgctaatcactattcatctattagtgtatctgattatccacctctcctccctctcctccgccactctgtttcatggggacagggaccacattgaattttgcagtagcttagtaattggcacagagttggcaacccaatacactttttttttttttttgagacggagccttgctctgtcgcccaggctggagtgcagtggtgcaatctcagctcactgcaagctgtgccttccgggttcatgccattctcctgcctcagcttcctgagtagctgggactacaggcacccgccaccatgcctggctaatttttttttgtattttcagtagagacgaggtttcactgtgttagccaggatggtctggatctcctgacctcgtgatccacctaccttggcctcccaaagtgctgggattacaggtgtgagccaccacacctggccaccaaatacttttttatttttttttaagagacagggtctccatctgtcacctaggctagagtacagtggcatgatcatagctcactgcaatctcaaactctgggactcaagcaatcctccctcctcagcctcccaaagcactgagattacaggcatgagccactgctcacagccaacatttgctaaaagtgatttaaagttttcatggaagtttacccctaaatacttcaggaagttttcttactacaatatcatgatcataggctgcgtgcagtggccacactttaatccgagcactttggaaggccaaggtgggcgggtcacctaaggccaggagttcaagaatagcctggccaacatggtgaaaccctgtctctactaaaaatacaaaaactaaccaggcatagtggtgcgcctgaaatcccagctactcagaaggctgaggcaggagaattgcttgaacccgggaggcagaggctacagtgagccaagatctctccactgcactccagcctgggcaacacagcgagactcagtcaaaaaaaaaatacatatatatatatatatacccacacacacacacacacacatatgtatatatatgtttatatataaaatgatcatacctcagaaaattacccattccttaatatcatccaatatgtagcccatattcaaatttaccaacttgtcctccaaaatgctttttttgtatttgatttgttccaaccaagatctttatttacttatttattttttgggactgggtcttgctttgtcgcctaggcttctggcacaatcacagctcacagcaacctcaacctccaggcctcagcctcctgagtagctgggaccacagacgcgtgccaccatatccagctaatttatttatttatttatctatttattttattatactttaagttctagggtacatgtgcacaacgtgcaggtttgttacatatgtatacatgtgccatgtcggtgtgctgcacccattaactcgtcatttacattaggtatatcttatttatttatttatttatttattttggtagagataggctcttgctatgttgcctaggctggtcttgaactcctgggttcaagcaatcctcctccctgggcctccaaaagtgctgggattacaggcatgagccactgtgcctagctccaaccaaaatctaaatacggtctgcgcactgcatttcgctatgtcccttaagtctcatttaaatctagaataactttttccccctttgccattgacttggtgaactgctaaagtattttaagtaaattacagacatcatgtcccaccttctagatttctctgattgcttcctcatggtgttgtttatcccgtattttctgtaaactggaaattagatctccaggcttgattagcttcaggttgactatgctgacaaaaacactttgtgggtgaagcttcctccaacatattgcgttcccttggggtgtccctgatgcctgagtttcactgttagtgatataatattgatcagttgctccccttggcaacagccaatccttctatcaagaaattgcattttttggctgggcgaggtggctcatgcctgtaatcccagcactttgggaggccaaggccagtggatcacttgaggtcaggagtttgagaccaccctggccaacatggtgaaaccccatctctaccaaaaatccaaaaattagctgggtgtggtggcatgcacctgtagtcccagctactcgggaggctgaggcaggagaatctcttaaacctgggaggcagaggcttgcagtgagctgagatcgtgccactgcactccagcctgggcgacagagtgagactgtctctaaaaaaaattaatgaacagaagaaaagtcatattttacagatgaggaaaacagaggctctgcctcattcagtcactcgccccagaaagcagcaagagatggttaagacctaaaggaaggcagtggccacaggaacggacgggttttcaaaggagaatcagcagcatctgcaaacaactggctgtgttggggagggaaccagaagccctggcagaagcagagacttccctcacatctcgggtgggacatgaggagacagagcaacttggggggaaggtaatgagctcaggctccaggcttcccagatgtctccaagccgctctctagggaaatggtgtttataacatgacaatgtctataatttggcttccggcatgactcgataattagcttaagttatccctcattggcattttattcaaagcaaggacactcttccattcattctgatgaggcctgccttctgtgagtgttccagggtaagtgtgaactgagagctgtgcctctgtctcttttgactgaagtgggctggagactgaagttggtggggtggttgaagtgtctgctcactgggctcaagtctgtctctggggcttgaaggtgtgggctccccctcggacagggtgtggggggtgctgagacctgcacattcaatgcctagcaggagtttggcccagagattggtttccaagaggtgtgtgaaggaggcagtgaccaggaagatgggggatagatcccctgggaggcagtgtggaggactacaaccaagatgcttcaggctgaacagggctgtgctcaggggaaatgggaatgcttctgggttaggacgcattgaccaggttgattctgtgggactgagtggctgattcagagaaggagtgaagaagacagagttgagaaggcccccatgtctttgtctccagagaaagtggaggctagtagctgaggcaggacctggaagaggaagggtgggtctggggtggggagatgcggagcttagtttagatgcggagggagtggccagaggagacctggaaaaggaggcctgggactggagaggtgaggaccaggtcacaggcacacaggtcaaggttaaagccacagacatggataagctcttccaggggaagccaagcggatccagaagtgggcccctgtgggaggggcagggcaaaagggccctcgcaaaggtggctgggaaggaagagagtgagacttgagggcaagggaaagggagttttcagaggagggggatggtcatggggaccaaatgccatggacagggtaagcaggacagtgtttgaggagctactgaccttagtgattctgaagccttaggagactccagcttctcagcaaaaacagagaaacgagaggactcacttggtgtcagagccctgtgggccaagaagcagaaagtataatacaattgtctctcagcccggaaaaagcacaggaaacagcacccgctgggtgctaccagtgtagccactgagtgacccctgctagcctctggctacttgctcctcagaatagaccaggagggcatcagactggcacagcttgggccatatgtccacatcttggctgcctagggcttgaagacagaggctcagaattccttccttcagttctttctgtaaatatttactgagaacctagaatgcgccaggcaccgttctaggccctggaatacagcagcaaaatccacaaacatccctgtcttcatggcactcacacccgaggggaaagaatgacaacaacccacagacataaatgtggaaataatgtaaaagctgaaggacaaaaggaaagtataaggaagacggggagtatgggggcagcaggagaacagggtgcagtttttttgtttgtttgtttgttttgagacagagtttcactcttgctgcccaggctggagtgcaatgacatgatcttgactcactgaaacctctgcctcccaagttcaagagattctcctgccccagcctcccaagtagttgggattacaggcgccagctaatctcctcgtatttttagtagagatggggtttcaccatattggccaggctggtctcaaactcctgacttcaggtgatccacccacctcggcctcccaaagtgctgggattacagggatgagccaccgtgcctggcccagggtgcagttttaaatagggtggtcctgcaggacttggtggctcacacctgtaatcccagcactttgggaggctgaggtgggtggatcgtttgagcccaggagttcaagaccaactgggcaatatggcgaaaccctgtctccacaaaaaatgcaaaaattagcctggcatagtggcacatgcctgtagtcccaactactcaaagggctgagctgggaggatcacctgagcccagggaggtcaaggctgcagtgagccgagattgtgccactgcactcaagtgtgggtgacagagtaagaccctgtctcaaaaaaattaattcactaaaaattaataaataaataggatggtccagaaaagcctaatcgggaagggaggagcatgccaggaaacagcaaggaagctggtgaccagaggatgggggttggggtggaatggagaagaagctggagggattgggacagtaggttgcgtaggaccttgtaggcccctggaaggacttgggcttctctttggtttttttgtttgtttttttgacggagtctcgctctgtcacccaggttagagtgcagtggtgtgatcttgggtcactgcaacctccgcctccaaggttcaagggatcctcttacctcagcctcccaagtagctgggattacaggtgtgtgctaccatgcccggctaatttttgtatttttagtagagacagggtttcattgtgttgcccaggctggtctcaaactcctgacctcaagtgatctgcccgccttggcctcccaaagtgctgggattacaggcatgagccaccgtgcccggacctcaggcttccctttgaatgccatgagaacatctgggggactctgagcccagaggtgacctgattatcttacagcttaataggatcactctggccactgtgcagggaataaatggcagggccaaggatggaggcagggagaccagttaggaggtgaccacagtaatccaggggagaaaatgatgggggagatggtggcaagtcatcatattctgcacatattttgaaggtagagccaacaggatttgctgacagaatggatgtgggagaggagtcaggaatgattctaaggttttcagcctgaacaacaagaaagatgaaattgccatcagttgagaaggaagaggctgtggatgaagcggtgggtgtggggtgggaagggggaagcaagggtagatccagggttccagggcagatcacccaatggagcactcccctgacctaggaaaggggacactggacagccacaacttccggcaaatgcccaggacaggtggttcctggtgacctgcggcagagcaattccagcagggtgaggaggaaccacacagctaagtgtgctgcgcatgtggaggccgcgcttggtctcctgacttacgaagcagagcagagggatctgggagacacagagggtggtggcctgagcccatgtggaggctgccgggaagagccaggagagggagagagtgcagatcaggatagagtctccacatgagggaggagagatggatcccagccaaggcttggctgcaaaagcacagggtcaggctcaaggcactgagggcctggaccagcgtcagggagcagggggaaaggatccagagacatttgcgcagcagagatggccaggaagctgctggagagtgggaggagtcaggcgcaactccaagattttgaatcccaactcctgccagcgtcctgaaggcctctgtccccctctaagtccaggtttaccaaagcctgctgcaccctggagttctcagttctctgagcacggccccatacctgattctaaattcacaccactgcttcctctgcttttgttgcaagccacaatcagaggacactgttcacttgctgattccaatgccctttggcccctctatcccacagcccggtgatgtggctccttctcctgccctccaccagagcccccatctcagcaagggctttgctttctgtctcaaagagaaacacggtgctgagcgggggaagctgagcacaaaagagtacacataatacactcttaggaggttctagaagcagtgacacccacctactgtgacctacagtgatagaaatcagatcagtgctgtctggggccaagggactgattgcaatgggataggaagaaactttccaaagagatggaaatgttctatatctctaaggggtggtggttacacagctgtctacactggtcaaacgacatcacctgtacattgaaaacgtgtgcattttattatatgtaaattataccataataaagtttattttatttaattttaattcttttttgagacagagtttcactcttattgcccaggctggagtgcaatggcatgatctcagctcattgaaacctctgcctcccgggttcgaatgattctcctgcctcagcctcccgagtagctgggattacaggtgcacgccaccacacccagctaatttttgtatttttagtagacgtggggtttcatcatattggtcaggctggtcctgaactcctgacctcaggtgatccacccacctcagcctcccaaagtgctgggattacaggcatgagccaccgagcccagcctaataaagttgatttttaaaatagagaactaaatatttttttgagacagggtctcacccggtcacccaggctggagtgcagcactaggatcatgactcactgcagacttgacctcccaggttcaagagatccttccacctcagcctcccaagtagctgggactacaagtacccaccaccatgcccagctaatttttaaattttttgtagagacagggtctcattatgttgcccaggctgatctcaaactcctgggctcaagtaattcctcctgccctgtgctctcaaagtacctggcctaaaaaaaagaaaaaacaaaaatttttttttttagattgagtcttgttctgttgcctaggctggagtgcagtggcgcgatctcagctcactacaacttccgcctcccaagttcaagcaattctcgtgcctctgcctcccgagtagctgggattacagaggtgcaccaccatacccagctaatttttgtatttttagtacagacaaggtttcaccatgttggccaggctggtcgcgaactcttggcctcaagtgatccacctgcctcggcctccaaaagagctgagattacaggcatgaagcaccatgccgggccttaaaaaatttttttagggccgggcgtggtggatggctcatgcctgtaatcttagcgctttgggaggctgaggcaggcagatcacaaggtcagaagaccagcctggccaatatggtgaaaccccgtctcgactacaaatacaaaaattagccaggtatggtggcaggcgcctgtagtcccagctacttaggaggctgaggcaggagaatcgcttaaacctgggaggcagaggttgcagtgagctgagatctcgtcaccgcactccagcctgggcgacagagcaaaactccgtctaaaaaaaagagggtgggtctgagaggcccccttggaagaagtgagactagagcagggctgggaggtctgagaggctcccttggaagaagtgagataagggacagctgggaggcattccaggtggaagaggggctggttcactcacaggcccagaatctacagggccaccaaggaaccagcctgacagcagaggcaggtggggccactaagaaagttggggctgtgtggcccctctgtgaccacagttcttccttcccactccctttctgttctttgattcccctcctccaccagggcacacagttcccactgggcagcctgtgtaatgcgccccacatttgtgctttgaggctacagagcacttcccctacaccagggacctgaaacgtgtcctggctaagcatgttttttttttttttttttttttttttttttgagacagagtcttgctcttgtcacccaggctggaatgcaatggcaccatctcagctcactgcaagctccacctcccgggttcaagcgattctcctgcctcagcctcccaagtagctgggactacagacatgtgccaccacacccgactaatttttgtatttttagtagagacggggtttcaccatcttggccaggctggtctcgaactcctgacctcgtgatccacctgccttggcctcccaaagtgctgggattacatgtgtgagccaccgcaccccgcctaaaaaattgtttttaaagataaaataacagtctatcaagcagaaaaatcctacacacacacacacacacacacacacacacacacacacgctcatctcacacatacacacactcccatctgtccacatgctttgcttcctcccttctctctggcacggcagagcgcctcctcttgtccatgcaagctatcacgcctagactgttccccctaaaaaaaactcatgccacccttcctctgaccttgcatccatctcccctgctgtccttacagcccagcccctaggaaggatgggctatattccccttcagcatgctggatcagtcacccatctctgagacacctgccctgcagagacactccttctctcctttctgtcttctctcaggttcctaggaccccacttgcttgtatccagcgatggagggagagtttcaggctctccctccatgtctggatactccttctcatgctcccagcccagctcctctccctctgacacctcttcagtgccggcattccctgggcccctggacctggtcttctgctttccactctgcacctgcacagtctcccgtcatgatctcacctgctccagggcttcagttaccatctattgctgacaatgctcaaagatacctctgaatatttttttcagagtatcaaggatgtggcagaagaggtagacacaggatatatgacatatgcttcagaagctgtttacaatttttaatatgatatgtatactcaacccccttctgtcacagtccactggacctcaggctcagaaagccccaaactgaactcatcagccctttgccagccctgctcttcctcccttcctcaggattccagcttcaggcagaaacctgggagttaccctcttactccatgaccagcaattgtcaattatccccttctcttgatttcaccctctaaaactcccccttctccacccctacagacattcccagagaggttcaagcattcattcattcaataagtattagctgagcacctactctgtgccagacactgatcccgatgctcaaacacaacacataaaaatcagtgccctacagagcttcccttctagcacttgcagtaatttcaaaagcggctccatctttcattctaacccctctaactgcccactctgctgtggccacagcaaaagtcaccacatgtgcagctgctcagcatcttccatgggacttcatcctcctgggatcaagcctgggccatgtgtgaggtgtcctgatccccttcctcctgtcttctctcatcttcccttcctcccccaccaaacacttgtaccctctaaacatggtagactccctctgcaggtggtccatccccaaatataaggcatattgtactgcctgtccagcggccttcccttcaaccccaagcacctgcaggaccagaactgcttttatccttcctgcagtatcagtgcctggcccattatccggcacatagtcggggggtcaacaaatggtaactgattacatagatgacagtggattaacagtagtgtcacacagacagggagagtcttggggagcagggaaacatgagttctgaattagccccagaacacctccctgattgataatttagaccaaccccatggacacctagttaaaagggggggtgctagcggggcatggcagcttacacctgtaatcctagcactttgggaggctgaggcaggaagattgcctgacctgagtcaagatcagcccaggccaggcgcgatggtttatgcctgtaatcccagcactttgggaggccaaggtgggcagatcacgaggttaggagttcaagaccagcatggccaacatagtgaaaccccatctctactaaaaaaaaaaaaaaaaatacaaaaaaattagccagggcgggcgcggtggctcaagcctgtaatcccagcactttgggaggccgaggcgggcggatcacctgaggtcgggagtttgagaccagtctgaccaacatggagaaaccccgtctctactaaaaattcaaaattagccaggcgtggtggcgcatgcctgtaatcccagctactcaggaggttgaggcaggagaatcgcttgaaccgggaagtggaggttgcagtgagctgagatcacaccattgcgctccagcctgggcaacaagagtgaaacactgtctcaaaaaaaaaaaaaaaaagtgaggtgcaaatcctacttttgcacctactgctctttcctcgccctagaaatttccacaggagcacagtcatcaacctacagaatgttaacaccaaggggactttcaagatctggtcacctgaccaaataccagagagggtaaccgctttgcccaaggtcacactgctggctggggcagggctgggactagagtagctctggaaaatgggaacaagaatagaacctatctcaatcttgttgcagggagtatgttacatgcttagcacattgcttggcacataataaactctcatcgaataggagctgttgctgttatcgttgctattatcatcatcatcatcatcacaggtgtccatccttgcctccaagttccttgcctcctgatcctcccatcccccagtgctattctccactatttcctccctttcctcccaatccatgatttcctcccttctcccctcccaattcatgtttggcccactgcagtcagcgtccaccaccaccagtgcctggaaccttccaggctgaggtcaccagggacctcctccttgtagaacccttccttccctcgacctctcaatggcatgtgaccctagcactgcttcctccttaaatgtccttgacttctataacataaactctcctgctgctcaggacatccggctctccctctcaccctctctgctaatccagacacaaatagtcaactgcctactgccataggcacccaacgtcagcacatccaaagcagtttgttaccagctccatcaccctgccccgctcctgggttctactgttcagtgtacagatagccccgtccaccaaataccctaggctgcaccaggcaagacaggggaggactcccagaggtacagcctaggggatggatttggtggatggggttcatctgaacatccttcttaacatcccacctttttttttttttgagatggagtctcgctctgtcacccaggctagagtgcagtggtgtgatctcagctcactgcaacctccgcctcctgggttcaagcaattctcctgcctcaggagattctcgagtagctggaattacaggcatgcgccaccacgccctgctaatttttgtatttttttttcttgagacggagtttcactcttgtcatccagggagtgcagtggcgcgatcttgggtcactataatctttacctcccggtttcaagcaattctctgcctcagcctcccaagtagctgggattacaggcacctgccaccatgcccagctaatttttgtatttttagtagagacgggggtttcaccatcttggccaggctggtcttgaactcctgacctcgtgatccacccgcctcagcctcccaaagtgctgggattacaggcgtgagccaccatgcccggccgcctctgcgcctttgaacatgctgttccccctgcctggaatgctcttctgccccttaactgcctgcaaactctccctcacccacttggtcctagttcaggccctccctgatcccataaactcagttacttcctccctgcagtatcagcatcattcatagcactgtcatagcccttttcatcctgaagttaataattccctatgtctgtcacccctactagctatctgtgtacctaccatgtatctccatgtatctgttaatactttcctatgtctgtcatccccaggtgctatctgtgtatctcctatggccagcccatgatgattcagtgagtgtctgctgaaagaccgaataattaaactttttcaacttctgtcctgatggtaagtataagaggagggatgaagattaggctgtaaggccaggcgcagtggctcacacctgtaatcccagcactttgggagcctcaagcagggggatcacgaggtcaggagatcaagaccatcctggctaaccggtgaaaccccgcctctactaaaaataaaaaaaattagccgtgcgtggtggcacgcgcctgtggtcgcagctactcgggaggctgaggcaggagaatggcgtgaacccagaaggcggaggttgcagtgggccgagatcacatcactgcactccagcctgggtgacacagcaagactctgtctcaaaaaaaaaaaaaaaaaaaaaaaaaaaagattaggctgtaagaggaactggtaaagtggaacacagcagggcaaatgtgctagtcaactgtcattgcttaccctggaaatttccccaggagcggagtcatcaacttacagaatgttaccaccaaggggactttcaagatctggtcacctgaccaaataccagagacggtaactgctttgcccaaggtcacactgctggttaggggcagggctggggctagagtccacgtagctctggaaaaagtttgggcagatgctatctcatcccatgaacttcttcccttcctacccattctgtctccccaaaggaggtccctgatgccctaacatggtcagggaactacctgggctcactcacagctcttacagcatttgctgggaccttggccaggtggagttaccaaaatcctgtagactggaggcagggggatccaactatcaccatattagagattggcaaactgaggcagctagctaaccgcagagggcaagatttgatattgagtactgtgttcctcctgtagaaagacctgagaagcccaaactcccacatatgcagagtcactattcacaataatcatgactgctgacttcctaatgtcagggaaatcccctcactcccaccagttcctcctgaaacagagcctccctccatcttgcacagggtgtctgacttaggaaacaaactgtacacccaccctcctaagccacccaggcctactagatagatcacctccgagtcataccctttaatggggaaatcacccttctttgtgccaggcacttgacatcgtcactgctcacatcagccctaaggttagtactacagtctgcgatggggaaacggagggtcccagataagtcactactaatccatggtcaaagcaagaaagtggcagggctgggactcgaacttaggtttgcctgactccagcgggtccccgcccaggcgggaggccctcccagctgaagcctttcgctgactagattacctgggggaaaatgacttaacctcttcgaacccccagaaggtcagaagctttgcttttgggggagaaaatggtgtgcaaacgagacgcgaaggaaacgcaaaccctcgggcgtcggcgcagcctcttccccgagcctgggtctgtctaatggcccagagggagaggtcgcacccccgacccctggcacctgcgaaaccaagcgcccggtcggctggcagaaacgaaacctcaacaccctccagcctcccccgcttggttcccggaaccggcgagccaggcttcgcggaaacttgcccggcggcagccgcctagggccccgggatcgccctgaccgcagcccgcagctccgggccgggaggtgcgggccggcgcggtcgggcccgagcagcagcgcgacgcgcgcttccgccccgctcggctccggcggcggccgcggcggccccacaatccccttctggctccggggacgggcggggcggggcgagcgggcggaaataattttctgtttggtcgtctctgccccagtcccttcgccgcgggacgcgcgagacgggagaaggtgcgggaagcgggaagcaggagcgggagcgcgcggccctggcacgcatagggcggcggagagggcacgagcagggattgagcacctactgtgtgccttcacgctttacaaaaggattttcgttcgatgttcactacagcccctgcccgggggtactgatgccccatttacagagggacaagccggatttcggagaggtgaagtcactcgccgaaagtcgcaccgccagggtctgcgtgacaccctaaagcagtgttcagttaccccggggagagcgcgatgaacttgaaccacttgttggctggttcctgctcttgctcgttttttgcggatcgacacatagtgggcgctcaggaaaataaatgttggaagcttgagattgaacttgacagctcgaccctaggtacccgccacgaatccagcccagcccgcggggcaccgggtttctccagacctcgcagggaacatttgcggatgggctggtagaggaggctcggacatcccagttccgcacccgcactcgaccaacgcgtggtagcggaacccctgtcgtagcgaggcacagactgggttcaagtcccgactctgccgatttcagcctgagtgactttgagcgagtcactttttcccgtcgaaacctcagttgctccatccacaaaatgggaaatatgaacagccaccctaaaacggtgtggggaggattaaacgaaacaacgttcccaaaactctaaacttacaaatgttgtctcccgtccatcccataaacttaggcgacaaacctggcgcagggtgacctgagacaaaggcttcccggcccctgtctccaagtcgtccatccctggggcgtaggcacgttttagtgagccctgtccggcgaaacccgaaactgcggccaccttggcagcggtgggccccaaaaggaaatattcaaatattctgaaactcgtgcatgatttaggactgacatttttacgtttaattttcttgcagttttattcttgctagtaaaggtaattcgttagaaacccttaagtgcagtttctcctctgtgtcttgtttaacttttcgtgttagcgaaattcacaaatttgaccaaggaaccggagcgcggccgtcctcgccgggattccggtcatcgcaataatctggctctcggcccctactcccaggcacggaggtcgaagagacgggcttcccctacaccgccctgtgtagatgtagcctcttcgtcccggcagccctccgagattccctgtgtccaccggagcgaggagaggtgtggggctgcagcccagaactcagcttcctggacctccccaaactcccgcctctccgggattaagggagtaaatccctgacgccaaagaccaggtcaaggacaagttctcccccgccctactcccccctcctgggcggggattcatctcccttccggatgaaaggtactaaagagccgacggggggccgcggcgggccccaggcccttgatgttccggttgaacaggtgctggtgaaaaggaggcggacccggcggaagagtctgccagggggcagtgcgccgaaggggaggcggcctcctccacccccagtcccccggcccgtcttcccttctcctctctgtttgcccctcccccgcaggaagcgttcccggccgcgaggtctttgaagtgtcgttgaagcccccagggctgccttctcccctacgccacccgaactcccgctgtggggggcgggtgacctttagtccccacgagtcgtccccctttaggaagtttttgggggtcagatctcacccccccttgcccacacaggttgggaagaagactttgggccgacgcccctcacttctcccccagacccaattgcagggactttagtcctctggagtgctgcgtgtgagttaccttgtgtgtctgtgtgcgtgcctagaggtcaagtgtaactggtgttcgtgagcacctcgtggttgcgggtctctaactctcgtgggtctctaagcgcacccgcggggctggagcggaggttcgtgtctctgggagggtcagtggtgtgactgaagctgggagttagctcgtgtctgtgggtgcctcggtgtgtgtctctggggctctgagtccctgtgcgtgcgtgtgtgtctgtgaacccgacaggaagctccccgagggcaggaatatgttttgctctctactcgatcccagcgactggcaacgagcgtttaataaatatctgttgaatgaataaatgtctgcgtgtgagagcgtctaccctccagagtggcctcggaggaaagggcccgagggcggccatccaaaaagacccccagacacggggtggggcgggggcgaacggcccgcgtcgctcccattcctcctagcgccccttcccccggtctccactccaaagtttccctggggctgaagaatccacccagagacgaagacttggcggagggggctggagactcggggacccggggcccgagacgggagtgcgggcagagggagggctcgggagcgacgacccagagccgtgaaacgaaaaagaaagcaggcaaagcagcacggagcgaaagagcgaaaagctccctaccaagccaggctttgttccctgaacctaagactttacccggcggctggcggcgggcgggccgggagcgagcgagcggaggcgcgcggccatggctgccgcggccgggcaggggggccgggggggcggcgcgtgagcgggtggcgcggggcggcgcggggcgggcgggcgcccgcgatgtgccactcggcgcctcccccgccgggctcgggctacgcggcggcggggcggccctaggagccgggcgagcggcgcggagggggcgagcccggcgtgcgagtctcattgttgtggggggggcccgtcggggcatgagggcgagagcacggcggggggggcggccagacagagcgagcgaggaggaggaggaggaggacgcggaggaggaggaaggaggaggcaaagaaaagaagcggcggcggcggagggagaggaggagggggcgaggaggcgcgcggccccccgctccctccctcccccctgacccccgacccccgccggccggccccccgccccagccccggagggagctcatgggagtatgaaggagatggtaggaggctgctgcgtatgttcggacgagaggggctgggccgagaacccgctggtctactgcgatgggcacgcgtgcagcgtggtcgtccaccaaggtacgggggtggcccgcggggggcggcgggaccccgggggcggcgtgcgcggggcgcccccggccgcgccctccggagacctcctggggctcgcgcgcccctcccccaccccacctgaagggaagggaggcgtagggggagctccccccgcccggtcctggaagaccgggtcaggcattgttttcttgcctattgttccagttccgcgccccccaccctaagttgagggagtttggggagagtctagggagcaatgagtgaactccccacgccccacaccgcgggtgtcggggctgcctggggaatgtttacctgcgaggtgtcccctcccgcccggttattttggtcccggctcctggaggaagaggtcaaggggggggcgtcatcccccctcgcttccggataatgggaggagcggacttggaaagggaagagaagggtcccaggggagaagggactcctaaaatccgccggggaagagctaaggataggagagaggttgtgcagggggccggaatcgagaagagggaggcttggagtttcccccagcagcacatggttcgggagttaactccttgaggaatcttgccgagggcgcaggctggcatctcccgcctgcctggcacaggcagccgggcccccccttcctgggacatccctgaatgctgtggcccggggctcttcccgccacgctcctctcggttcccagcaccgcacctgccctcagccttgacttttaacctgattctggaatacttagaggtagaagatgaggtccctagaccccctacttctccgcctcgtccctcactggccctttaagaaatccccccgcccacaacaacaaaacgtgtttgacggtcgtgactgttgtcccctctggttttctctatttctgatgctgatggctggtccgaggaagaagctgggaaacaagtccagaaagggcgtggggggaggatcttctagaagtttaaggtcaaagactcagacttcccgccctgtttgaagtgcttaattgtgtggttgaaggctggtgttgggcggttgggcagtcctgctgtagagtgagtgacccgtagactggggagcagcccccactgctggaactggctctagtcctttggagtcaccgccttcccccagttaccctgggaaaaagccactggctgacagctttgctcagcgactgtcctccccaccctcagcttgctatggcatcgttcaggtgccaacgggaccctggttctgccggaaatgtgaatctcaggagcgagcagccagggtggtgagttccagactgcccctctccactcccctgcccctcccacacacctgagcgtctcaggttgagctaggggactctgaggccgaggctagggtgggatttagctctgtcacacagacttcctgtttcctgcacacctacctccaacctcatctctgcctcacgctcatccctccctctgccccacctcaggcatggggctttggtttttgtctgtttgaacttttttattatgggaagtttcctactcatatgaaagtaaagggaaaactataatgaatctcatgtccccttcctcattttcaacagttaccaactcatggccaatcctgtttccactgtagccccatccatccaccctagagcttagcatttcagcctgggaccccttgaacgtgttcagggagggtccagctcagcagatcccccaacccctgtgcactcttgcattggcagaggtgtgagctgtgcccacacaaagacggggcattgaagaggactgataatggaggtgaggcgggctcatctgctgaggtcagcagggccccctgagcagggtctgggaaggcaggaatggactgagttggggtggaggccgggtttcctttccctggctggcgctggaatctgatgggaaggctgtggaggagggaacagtctgcagcgtggggtcataaggggtggagtctccggcttgccatctgcagctgaggctacccccacactgccccaggctgggcacacgtggtgtgtgccctctacatccccgaggtgcaatttgccaacgtgctcaccatggagcccatcgtgctgcagtacgtgcctcatgatcgcttcaacaaggtcagcggccccccgccgtgtcccctaccagttccctcccatctatgggttcctccaacgctctcttcatccggtgtaatttgattctgtccaacgagcactgaaagggaacttgggaggtgggtaggtacctaccagtgaaccacccttctgttgacagacacactcatgctctggcactcaggtgaaatagtaggctcccctgcagtagttctgccagagggtagaccttcgcagttacttcattcattcattcgctggacacattttattaagtgcctactatgtgccagacctggtgcaaggtagctggcacacgctgttcggtgctgatcaagacaggtgtgctgcccgctcaatggaacgcaagttcttgcatgcgaagactataaatatcagtaaaaaggcaaagtaaatgcaatttgtgataaatgctgtgaagaaaataagacactaaaataaagacctggtgggggcttactttagaccagatggtaaaggaaggagacatttaggctgagacctggggcgtgagaaggagccagcttccaggagggtaagggcccccaggttccaggcagaagaaagcctgggcagaggcacagaggtgggcataagctccctagtgagcaagacagacaaaggccttggcctttcagagctaaccatccaaggactgtgctacccagcatagtagccatcggccacacgtggctacataaattaatcaaaattaaaagcaggctgggtgtggtggctcacacctgtaatcccagactttgggaggctgaggggggtggatcacctaaggtcaggagtttgagaccggcctggtcaacatgatgagaccccatctctagaaaaatacaaaaattagctgggcatggtggtgggcacctgcagtcccagctactcgggaggttgaggcaggagaatccctggaacccaggaggcggaggaggttgcagtgagccgagatcgtgccactgcactccaacctgggcgacagagggagactccgtctcaaataaataaataaaaataaacaacaattaaatacagtttagaatctagttcctcagtcacgctagccatagttcaagtgcttatagcccatgtgactggtggcatttgtcttggacggcgcagaccatagagcgttttcatcactgcagacagttctgtgggatagcactgatctaagactgtagagagcaaatggaatggagggggtggcctaaggaccatcagtagaacaggggctccctggaggaggggacgattgcgctgtgtcctgcagacctgttacatctgcgaggagcagggccgggagagcaaggcggcctcgggagcctgcatgacctgtaaccgccatggatgtcgacaagctttccacgtcacctggtgagacccctgtcccacccccctgccccccgggtttgtcctggatggccactgatcaggctcatcctagctgctgtccctttgatggtggtggcaatgctttggatggtcttggcttcgcctcagcagggggccaggagggtgagaggaaggtggctcatgtgatctgtggcctcagccgtctcaggctgccttctctggttagtgcccaaatggcaggcttgctgtgtgaggaagaagtgctggaggtggacaacgtcaagtactgcggctactgcaaataccacttcagcaagatggtgagtcctggcgaccagcgcatgagcgggtcagtcagctgtggtaagatggttagagggcatgggctctgggccaggccagtgcctggtgctaggaggacagagagggaaaaaacccagtccctgcccaagaggagctcttcattcgatgaggaataaagtacagcttcaggtgtgtggatcagagctagaccaagcagtctgtcccaaaagacaaagctcagaccctgcctgtcagagtctaggaggcttcaaggaagaggtagcatttaagctgagtggaggtggaaatcaaagtaagagccaacatttgtgtgggaggcagcatttactacgcctccgccttaggacaaagttcctgccatgtgttattttgtgtggtccccccaccaaccctaagaactaggtgtgctatattttccccattttacagatgagtaaactaaggctcactgaggtcatataacttatcttgcagctggtagatgggatttagaacgggcagcctaatttgaaaactcctcaggagcctgccaaacagagaaacgagtcccaggcagagggactagcgtggacaaagtcctgagaggaggaagggcatgggtgagcagcgggagaatggggtgtttggtggggaagaggcaggagatgaagtgagaaagcagagcccgagctgggcttgcctctgccccaggcttcaggggtccagggggaggctggaaagggtgctactctgtgtctgtgtttgtggagagacgtgtgtcccagaagctgtgaggtattctggagcagttggctgcagcttggatctacccccgagccacaggcttgtcaggcctgtaagcgggagagtaacatgatcagatttgttttttaggaagattaccctggcagccgctgtgaggctagatcagaagggctgaggctggtggccgggagacagctgcaagaagggggatggaggggtgaggctggatgctagaaccatttctagggagacttgcctaatcgtgggagtggctgagaagtaggagttgggggtgacatttaggatctaggctctagacactgggtaaatggagcttgaatacctggggggtgccatgaacaaggggtacagctggcttctgtagggggaacacatgtcctgatttgccccagacagtcccagtttatacctgttgccctggtgtaattattattagttcccctgtttcatttttgaaagtgtccaggtttggatcataagttacgtggtcaccgtggtttcagggtttgatgatagcttaggacaaggtagcgagcttggcttggtttgcaggagacaccatgtggagacatttagatttggtggatgtcagactcctgggcagggtgtagtggcagctccaggcttataaggctggggccgtaatcccaggttgtccacaaggatggatcaggcgggccacgaaagagggggccttgcagggtatggggctctgcaggtaggagctgtgtccaacactggggagctgcccactggtcagataaggcctgaaattagcccttgggtttggcagttgggaggtagctggtgaccttagagggagcagctataaccccggggagggtggagccatcaggctgggtctgtagtgaaggggatgggggaggcaggccctggctgggaggagacgcagcatgtgggttgtttgggttgtgttgatgtttaacttcccccctttcttcaagttaagggcagcatatcctttgggacaggagcaaccactgtgtttggtggaggggaggggccaggataaaggagaagagggtgatagctgagccaagtgtctggagggaggattggatatggagtgcaggggagcactggctccccacgagggtcccctgcacgccctctgctccagggaaggaggtagaaacgggccgtggctcagtcagccaagagggcaccatggagagaatgaaagacccgggccccagtctcacctccacctgggccttgctggggcccagacgcatccttgcctcttctgggcctcagtggttgactctgcacattgggcgagccagctggaacactctaggattttcaggctggggaacacccttctgctgagcagagcatcatagaggacatgaggtcctcttagtgacagacggggcacatggggctgacccccaggatcaggatcctctaaccttctggaagcgttccctaagcccgtgagaagagggtttgcaatttctctcaaatctctcccgcagaagacatcccggcacagcagcgggggaggcggaggaggcgctggaggaggaggtggcagcatggggggaggtggcagtggtttcatctctgggaggagaagccggtcagcctcaccatccacgcagcaggagaagcaccccacccaccacgagaggggccagaagaaggtagaagtcctcccccacctgccatcactcccacacggggacttggagactcacaaacatggctcaaaaagccatcatgaggtgcccttaaggtcttggccctgccttcttccttcctctgaggccactgagggcaggagggggctgaaatgaaacggtgggggggtgaggcgggagcttggcttccctgtggctgtgttagtggttcctctgggtcctccccatgacatcacagtgtcccccaggccccagacacatggctctgcacgttgcacacgtctccgcagtccagccatgtgccgcctagtaagtgctcatgcctgcattccctcgcgccacatagcacagcgtgcccagctcctgtccctctgtgcagctgtgtcccaggtggacacccttgcaggtgttatgttcacgcgcgtggtgctctatagcactggcgtgataatgggacaggctatttttagcaggcggggccgggggaagggctgttggctctcataggaacttgcctgaatcgctcctgcccagcccattatccagccctcctcagggagagatggtgcccacaaaaccccatccctaagggggtgtcagctccccatacccacatgtcatgtttgtcctcgcccagacagccccccagcacaatatctagtcacctctccctctccagagtcgaaaggacaaagaacgccttaagcagaagcacaagaagcggcctgagtcgccccccagcatcctcaccccgcccgtggtccccactgctgacaaggtactgctgcccaccttcaggagggatggtgtgtgggtctggggtggcagagggagggaggcgggggcgagaggttggtgagtcagggacctgggcaccctccccacagcttcaagttaatgccactcccctcctaccccataccctctactccttcttccagcctagaaggggccaccaatcaccgaccaaccatgggattgggagtttggggtgctgtctgccagatactcccatctgcctctgtccagagggcctcagccctgggctcttgtctgcagagagtgggggacggcactcaggcctgctctccaagttctagggcccctgtccccagagatcggtagaggacatcccctacgccccatcaggaggacacccaaagcttgtcacccaacccaaatcccactctgtgcaggttggaggggctgaaagttctgaccaaggtggcatggggggcaggcccctggacagtatcccgaaactcccactcatcccaccattcccagcagggcatggtatgtcaggcctgtctccagaaatgggcaacatctggctgagcgataggcaggccctaccctaggccagggaattgctaatccaagctggaacagccctccctgctccctacaacctgccctccccatgggaggagaacctggtagggtggggggagatggagaaactgctccctcctgtcaccattattgcccattcacctccaccccatctcagacggttggcagagttctgggcaccttagcaggaggttcaggtatcaggtttccagggtgatgttgctgtggcaactgccccagtaaacctctcccctgcttcccagggctcacctggagaccttgtcattcatgccctctgacctttccaggggcctgcaggcaggtggcaagaaatggccaggggtctgggagtttttccagtaactggatgtcccttggacatgccagagaactctgcccatcctcctccactcgccccagcacttcggctacccttccccccagcccctctcttcccttgctctcagaaccacatctggctcccttcagaactccagctgttgaaaagaacaaagaggaagacagagaccaggactccgcccgggaggggcagtgcagggtggctctcgtttctggtccagcctgcattcagcatttatctgttcagcacgattaactgaatacctggtcgctactaggaggaaaagggccttccctggcagcagcctgaagcacgaacgaactcacggcatgccaggctgtgttctagaaccaggagatggaggggcatatggagattagtccatttaatactcaaaataatccaattaggttggaaatttataaaccccatttaatatatgaagatgatggggcacagggaggttaagtaatttgcctaaaagcacacagctagtaaagtggtagacctgagattccaatgcagtctggcttgaaggcttgtgctcttcacctgcccacagcactgtctctgcagctgctgccactggacgtctcatcatttattgaccctataccatgtatctggcatcatgctgcttccaactcaccacatatgcatagtgctccctgtaaagacactgacacttatcgacgttgagactttgcacagtataacatggcagtgaggccaggcgtggtggctcacgcctgtagtcccagcactttgggagtccgaggcaggtggatcacctgaggtcaggggttcgagatcagcctggccaacatggtgaaaccctgcctctattaaaaatacacaaaattagccgggtgtggtggctggtgcctgtaatcccagctacttgggaggctgaggcaggagaatcacttgaacctgggaggtgattgaaggttgcagtgagccgagatcgcaccattgcactccagcctgtgcaacaagagtgaaactccatctcaaaaataaattaagaaaaaacaaaaacatggcggtgaagggcagaacccatcaggctcataccttgctctgcccgacttagagcccacgctccttcaaccaccaccctgccgctctctttggtttctggtgcctcagataggacagaacatttcagtgcagagtggcagctgttgacatgtggtcatgtgtgcacagttctctggaaataaggggacagaatgtcttgttccacctgaggtatttagggaggcttcagggaagagggacttccaagctggattttaaaggatgagagatttcccaggaagagtaaggataggctgtcctggcaaacgcttagtgtgtgcaatcaggttgtctaggaagagcatggggtggtcagagaatgggtggaaagccagggggccgaagtttggggtagtagctggagggctccaggatggcaccagagaagcccattctcctgtgggtcctcttctctgcctcgccacttccagcataggtcccgccttcttagacgccctaagtattcagtgaatgaatggaccaatgagtaaatctcttcagactctgggactgttttcatctccctcttggcttccatcttccctgcctaaggtgaaagacagacaccttcttgggttcagtgaattcccctctgccttacacccaggagtgccacagctgcctccccatatccctggtctaggagctcctggccactccctgcccggaagtccttcatgaaactagctgtgggctctcccagttgagctaggtcctgtgccctcctgcttcactcccacatcaggatcagcacaggcccaggcacctggtgttgaaccttcctctctcctctccttcaggtctcctcctcggcttcctcttcctcccaccacgaggccagcacgcaggagacctctgagagcagcagggagtcaaaggggaaaaagtcttccagccatagcctgagtcataaagggaagaaactgagcagtgggaaaggtgtgagcagttttacctccgcctcctcttcttcctcctcctcttcctcctcctctggggggcccttccagcctgcaggtgagtgtgggcatccgggaggaagctgggagcagggaaagccttttgtcctgagcttttctggcaagggactttgcatattggttttgcatctcatttacttctccattggttcaggataaagatggggaatcccctcctctccaaacctgcccccaaacccttccttcttgaaccagaactctcctctccccttcaggggccaccccaccaacctcataacagtattccttatcccctacatttgtgctgcaaggtacaatttttcaagaacccccattaacattttctcctataatcgctacagtcatctggtgaggccagtagggtgcgagttactctcccccattttattacaggtgggaaagctggaggggtcgggggtactcatcccaggacacagacagtggcagagctgagacaggaaaccaggcatccccattcgtggaccagagctctctcccgccagtacacgcgggagtgggagggagtgcggggatctggggtccagctgtaactgtttcccctctgtgcacagtctcgtccctgcagagctcccctgacttctctgcattccccaagctggagcagccagaggaggacaagtactccaagcccacagcccccgccccttcagcccctccttctccctcagctcccgagccccccaaggctgacctttttgagcagaaggtggtcttctctggctttgggcccatcatgcgcttctccaccaccacctccagctcaggccgggcccgggcgccctcccctggggactataagtctccccacgtcacggggtctggggcctcggcaggcacccacaaacggatgcccgcactgagtgccacccctgtgcctgctgatgagacccctgagacaggcctgaaggagaagaagcacaaagccagcaagaggagccgccatgggccaggccgtcccaagggcagccggaacaaggagggcactgggggcccagctgccccatccttgcccagtgcccagctggctggctttaccgccactgctgcctcacccttctctggaggttccctggtcagctccggcctgggaggtctgtcctcccgaacctttgggccttctgggagcttgcccagcttgagcctggagtcccccttactaggggcaggttagtgacccctggggacagagggcatttcagggcccagccagtctagtgaggaacagagcttacacatgcacttagaaggaaatgggatggataccactccaaaagatagagcacggaggagacagtcaccttcaggacatccccctctgcatgcgtggagtagaaaggattggggacagattgtcagaaggttttaccaagttttgggagggagattagaaaagctaggaattctgtagccctcggcagggcagtttaacaagcaggcgcagcaagcagatgtcacccaggcaggaagtgacatctttgcagcaagagggttagactggggcatgtagccagatcccggggagcactcgagctggggaggggctgtcagccacctggctgagcaggagtctggggtggagagtaaccacgtgcttccctctgtccttgtgcctgcaggcatctacaccagtaataaggaccccatctcccacagtggcgggatgctgcgggctgtctgcagcacccctctctcctccagcctcctggggcccccagggacctcggccctgccccgcctcagccgctccccgttcaccagcaccctcccctcctcttctgcttctatctccaccactcaggtgagacctgactcctgggctcctccttccctgggcaggttggggacagactgacagaggaccccagccttccatgggaattggagcaactgggctgagttgccatcagaccaccctccgggctctggacccctctgctccccagcacacccggccccctgcaccccggtacacacagttgtgctctagatccaagaataaccgccaggggattctacctccctcccttaggtgttttctctggctggctctacctttagcctcccttctacccacatctttggaacccccatgggtgccgttaatcccctcctctcccaagctgagagcagccacacaggtatgtgaatatctgatcccctctcccctttcttcccaaaggtcggacacccatcacctgcatgtgaccccagaaagaatgggagagctttctggctgccccctccctctggccattgccctccctgcaaaaacaaacaggccgggtgtggtggctcacgcctgtaatcccagcactttgggaggccgaggcgggtggatcacctgagatcaggagtttgagaccagcctggccaacatggtgaaaccccgtctctactaaaaatacaaaaagtagctgggcgtggtggtgggcgcctgtaatcccagctactcaggaggctgaggcaggagaattgcttgaacgtgggaggcggaggttgcagtgagccgagatcgctccattgcactccagcctgggcgataagagcaaaactccgtctcaaaacaaacaaaatcccagcgtagtggctcccgcctgtaatcccagctactcaggagactagcctgggcaacacagggagaacctgtctcttaaaaaaaaaaaaaatccacacacagcaaaccagggtacactttcaagttagaacccagcgagaaggcagggcagggaagttactgctccatctcacagaagaaaaaggcagagatggaagacttgctcaaggcaggaaatggcagacctaaagctcagattctgttctcctgactccaagcccagtgctttcaccggtgtagcgtgcttccccttggcttcgtagtgtgtcttgggatcagcgcttacggaggtctcaacctctccgggtatttacgagttaagggggcgggtcacaagcgccccgccctctccctggagagtcagcccagccccagaaagctaattggtgcagggagaccacctgtcaggctgggaggcggggcctacagccaggctgccgactcaggtaagccttaaaggggacaaatatgattccacgtttaagaacgacagagtagggtgatatatttgttaaaactcagatcaggattctgtggcccaaggaagagttttagttttgcctcctgataagggatctgatgaatgtaaaaagtcatacagagctaattatgataatagctgcagtcattaagggcttgctacatgctagctaaacccttcaggtaaacacttcacatttattaccttcttttaatcttaataacagtcacttcggagaggctggttaggagcccaaggtcacaaaagttgatgtcaggtttaagttcaatccaggtctgtcttgacctcaaatttctataactctgaagatcccaggaaaggaattgggcggtggatctgaaagaagccagacagtggagccttcagcccagaggaggaagagagcagatgcccggggtttgcctcccaggggcagggtttccaagccagggccctcagcgctggccttgaactgccagtgtggggttggggattcctggggaaagggatctgcggtgaggtcccaatcccatatccatctgggggcggggaccctgaggcagctaccactcctccacgctgatcccagccttcccttcttccaagagccagacctggaggactgcagcttccggtgtcgggggacctcccctcaggagagtctgtcttccatgtgagggaaggggcagcctggaggaggggctgggggcaggagggacacccgagggaggagggacggagagaccggcgtgggctggaacccctgggggatacgggagaagggccagaggagcctggagtggtcgggtcgactgaacccaggttccctctggccgcaggtcccccatcagcagcctccccgcactcttcgaccagacagcctctgcaccctgtgggggcggccagttagacccggcggccccagggacgactaacatggagcagcttctggagaagcagggcgacggggaggccggcgtcaacagtgaggaggggtggcgccggtcgggacgcctgccctagggccctaacagtcacctttctccccgaggtccccaagcttctttaaggttccgcccttaggccccgccccagccttgactctcggccaccccgggcctcacctcccatccctgccaggccacacgaccggccctggtccctcagcgccccacctttggccttcgtggcctccgggccccgaccttaccaaaccgcaacttccgcccttctctcctgacccgtgtggcctcgaccccagcctcaggctccgccccaggtcttcacacctgtggctccccaagtcccgcctctcttctcagagctcacctgtgtccctccttaggatggcgccgccttttcaagggctgagcactggctcccctccaggccccgcccccggtcccctggccccgcctccgccccctcgcccctccctcaggttcctcgctctctccgcagtcgtggagatgctgaaggcgctgcacgcgctgcagaaggagaaccagcggctgcaagagcagatcctgagcctgacggccaaaaaggagcggctgcagattctcaacgtgcagctctctgtgcccttccctgccctgcctgctgccctgcctgccgccaacggccctgtccctgggccctatggcctgcctccccaaggtgaggggatcctgcccagcccgggagagaggcccgtgccctgaagtccggactggccctgactgcagcctgtgacatccctcccacagccggcagcagcgactccttgagcaccagcaagagccctccgggaaagagcagcctcggcctggacaactcgctgtccacttcttctgaggtgggcgctacgaggagtggggcaggaaggagggggagactcaaggctctcctggtcccatctcttccccgcagctattggaggctgggcaatgaagtgactgactgagcaattgattgatccattcagtcctcccttaatcaagtaatatttatgaggtgcccacttagtgccagccattggctaagcaatcagtgagcaaaaccggcacagcgctgcttcttaagataggctaccccaagcaaagaaggagtaatcacaaactgggagatatgttagtgtggagagaaattgagggctgtgagagagagaacgggggagggctgcttctgtggatagaaagtggttagggaaggcctctttgagaagtatttgtgaagggtttattatagcgcctcacacaaaataattcctgtgtaactggtggcggttcgaatagcagttgctattgtgttgtggttattactggaatccaacaaactgggttcttgttctctctctgccatttattaactgtgtgacttgggcagtaataatcataataataaccagcattaattgcacacttgccctttgtcatgccctatgcaaaaattttttaaagcattcatttagtcttcatagtaagcctatggaataggtactactgttaccccccagcttacgagtgagtaaactaagacaggttgaacccaaggtcacccaagccattggattgtggacataggatttgaacctgagcctttcactttagctgtagtgcttttgcctgcagagttacttaacctgtgcaagaatcaatggcttcacccataaaatgagaatagcaagatagcacaggtcaagccctcagcccaggatctggttcaccagatggtcaccaccatcatcattgtccattattaaatgaggatgatgaggggcgctggactcccaggaaggggtcaggaaacatgattcgtgaagacaatttggattcttagccctcatccccggaccttgcttcttccagggtgcctgggggtgaagtgggggttgctgtgctctgtgagaatgctggtgggtgctgggccaggggccagaaaagtcatgctggccctctgacccctcccttccccctccctccccaggacccacactcaggctgcccgagccgcagcagctcgtcgctgtccttccacagcacgcccccaccgctgcccctcctccagcagagccctgccactctgcccctggccctgcctggggcccctgccccactcccgccccagccgcagaacgggttgggccgggcacccggggcagcggggctgggggccatgcccatggctgaggggctgttgggggggctggcaggcagtgggggcctgcccctcaatgggctccttggggggttgaatggggccgctgcccccaaccccgcaagcttgagccaggctggcggggcccccacgctgcagctgccaggctgtctcaacaggtgagggagagctcagccctgggaaggggaacagggtggggggctggctctgggaagggagggattttccccaaaacacccacaatccctaaaaggaaaaatggcctctggtctcacagggtatataatcctagtcacctcttggcctctaaggactccacagactgttagacatgtgtgtcctctggacggtagctccccagggacaaaagaattgttgacttcctgtcctgcactctaggatttccttctgggacagttcttctaaatcagacctgtatccctcttgctgcaccctatgagcacggtgctctaagatcgcacatccctgccttgcttcccctgggtctgagggagtctaggggcttgggattaggagcaggagtgtttccctggccctcccccatggtctgtgtgttgtcccccccccaccccccacccccacctcagccttacagagcagcagagacatctccttcagcagcaagagcagcagctccagcaactccagcagctcctggcctccccgcagctgaccccggtaatgcccctcccttccctgcctcaggtgccccttggtctgcctggaagggcacatctcagaggatcagggccagccaggagagggcaggagcaggcagagtgaggggaagctctaggctgggcctgtgggactggggctgggccctgtggagcatccatggcaggtaagggggataagatcatgcccaggatcccctgggcattgagaaagggctgctgtaatagccccaggtcgcatcctggtgaaagactctggagggcagcaagtcctcagttattcagcatttcagtcccagccccaaaggcattcaggggaaactccagggtctgagtggctgtgcaggtgacaccaccctcaaccacagcagcttctttgggtctgtctcctgttgggtcggctgaaactacctttggagaaaaggagttttactttttaaaaatgagggaagcagccgggtgtggtggctcatgtctgtaatccaagcacggaagactgaggcaggcagatcgcttgagctcaggagtttgagatcagcctgggcaacttggtgaaactgagtctctacaaaaaattagctgggcgtggtggtgcacgcctgtagtcccagctacttgggagcctgaggcaggagaatcgcttgaactggggaggtggaggctgcagtgagctgagatggcgccaatacactccagcctgggtgacagaatgagaccctgtctcaaaaacaaaacagggagttgaaaaaataagaaaaatcaacattttcatataaagaaatattagacaggaaaccaattcagctggctgcctgtagggaccagatgggagcaagaggagtaagttcttaaggtaaactttgatatattattttggtttctgggacattaagaatgctttgcctattcaaagcaaaataaatgaatcttaaatgatagaagcaaacaaaacaaaagagaaagggaattgaaaactttttttttttttttttgagacagagtttcactcttgttgcccaggctggagtgcaatggcatgatatcggctcactgcaacctccgcctcccgggttcaagggattctcttgcctcagcctcccaagtagctgggattacaggtgcatgccaccatgcccagctaatttttgtatctttagtagagatggggtttcaccatgttggccaggctggtctcaaactcctgacctcaagtgatccaccggcctcagcctcccaaagtgctgggattataggcgtgagccaccgtgtccggcgaattgaaaactattgacctagtcagtagttttggcgaaaccccgtctctactaaaaatacaaaaattagccggatgtggtggcaggcccctgtaatccagctacctgggaggctgaggcaggagaatcgcttgaacccaggaggtggaggttgcagtcagccaatatcgcaccactgtactccagcctgggtgacagagcaagactccgtctcacaaaaagaaaagaaaagaaaagaaaactattgacctagtttagtgtttttcaacttgggggcgtctgtggttgtcttaggagctgaggggtgattctgtgggcagggccagagatattaaataccctgctgttggccggcagtgctgcagctggcaaataccaatggcgtgcaaccattttcttgtctagatggggagacccaggctaagtgggaaatgcgagacagtaccttgactgtctcacaggcctcttgcctcctgattccagtgtgatggggtggggcctggccaggcagggcaggcaggcagcagggaagagacccccgggactgttggccaacaagcggtctggcccccttgcaggaacaccagactgttgtctaccagatgatccagcagatccagcagaaacgggagctgcagcgcctgcagatggctgggggctcccagctgcccatggccagcctgctggcaggaagctccaccccgctgctgtctgcgggtacccctggcctgctgcccacagcgtctgctccacccctgctgcccgctggagccctagtggctccctcgcttggcaacaacacaagtctcatggccgcagcagctgcagctgcagcagtagcagcagcaggcggacctccagtcctcactgcccagaccaaccccttcctcagcctgtcgggagcagagggcagtggcggtggccccaaaggaggggtgagtaaggggcccggggccttcctgcctcccctctgagggatgggtagagatggattgtcagaaggcttatcatcaggtacctcagcagggggaaggaagcaacccctaggtcagcaaagtaccctgcctcagaccccagggcctctgcttgcacatgggtgccctcctgcacggccaagaaagatccgatctgagcatgggctcagaggaaaaggaccaattagaaaacagccttcctccgggaggaccaattagaaaaagccattttgtttctcatccgaccaattagaaaaagatgaccctctgggtaggccaatgtcagaaaggccctctccctctcctgagggcacacggccttagcttgcacatgcccacgcagcccggtgctcttctgcagggtggtttcacacccctgcgcatcggccctggtgcacacccctcagagcccaggccagaggcttccattggccccgtttcagtaccccacagcagctttcttggcctaggaagctgttcttatctgggggttaggacctgacactttccacacccccggcctccctccctctctttccagaccgctgacaaaggagcctcagccaaccaggaaaaaggctaaatccacccttacccctcctgacccccccaagtggagggaacagatcctggcctgaggggtcctagcctggagcaggcgcctgcgcccagaccctggagagccttgacccagagcctgtgctgaggtccagggagtgtggagagctcctggtgtcgaggactgagactgagaggggagccccctccatctggcccccttccctttccgcactgtccgctttgtgaggctcagaggaaggacagtctgcaagcccgcctaggaggtccatccccagcaaatgttttggaggtccccccagagagcagagtgggccatggcagaagtagggggttggttggacctgtcacatgaaatggatcagcacttgaatggggagaagtggagggagaggccctgggcctgtccctgcggggaaatcttttatggaagaagggctggacccactttacctgcagtttcttcccagctcgggcagatggcagaagggaccccttggactttttctcgccatccctccccccagcgcaggggcacaagctgagcttgtaaaagcccacagatgttgggggctggagaaggggcaggagagcatcacactcagccccagcctcctcaacctcttggggccccgtgatggggaggagagggcaggtgcggggaggctctggccttccttggtgccccgccctttgtttgcactattggacttaggagtgccgagggtggggagatggagctgcccgtctcagtgtgtgagtgtgtgtgtgcgtgcatgtgtgtgtgtgtgtgtgtgtgtgtgtgtgtctgtctgcctgtctctctcctcctggacccagggcagccaagggcagggataggcgcagtggtcagatgaagcagcgccagagaggggacctcccagctcttatttgcaccctccccacctcaccaactttggtccctctctgggggcatgaatggttaacaaacaccagagcagtactccaatattggagagtcgctgggggcacagggctttgaatcagggtagtatcctgccttccctcccctgaccccacatggtctcagggcccccttagggccccctaccccactgatagcttcctccttctctggcacaaggggagccccagggcttgggggagggcgtaaggtggggggaaatgccactgcttttagcaaaagcctccctcccagaattagccagcttgcctcctgcaccccacccccaccaaccaggggagccactaagctgactaacaactgtcccctcacccaccagctatttccccagggtagagtgggcaattctcaccttcaaagagtccccgcctgcccaggcctttggcacagaggctgagtggacagtcaggagagaggcgagaggcaaggcgaagcctgtgtccctgtttcagttgcactggggttggagcccagggtaggggtttccagcttccccaggctccggccttgtcagtctctttgcatgtgtggatttttctgtgtgtgtttctgtttgggtttttgttgttgggttttttttttttttttaataaagaaaagaagatgtgtatatttttggcaacgacagaaacgtagtgcagatatatttttgcctgtgctgctcaactgttttttttttctgatactgaaaataatattaatattcctgttgataagactttgtaagatgttagggagctgataatggaggggggtgggaatccttcaaaggcaatttcttaggcacttgcaagggcttgggggagggggaggcagttgtgatgacctcagaaatactcactttttattaatgctaaatatgttagaaagaaatgatagcattcagcattttattcttcttaatctattaagctgtgtaactccctgccccaaaccactgaaaagaaaagtaaccttcaggccaggcgcggtggctcacgcctgtaatcccaacactttgggaggctgaggcgggcggatcacttaaggtcaggagttcaagaccagcctggccaacatggtgaaaccccgtctctatcaaaaattagccgggcatggtggcacgtgcctgtaatcccagctacttgggaggctgaggcacgagaattgcttgaacccaggaggctgaggctgcagtgagccaagattgtgccactgcactccagcctgtgtgagagagtgagactctgtctcaaaagagaaaaaaaaagaaaagtaaccttcagagattcttagaagagttgctcattcacacccacgcccttgcccaaggctggcccacttagagcgaaacttaacttttgtctggatgggaagagaagtaagtctaccccgaggttgccatgttgaagagtgagaggtccaagtgattctgtgcattgaaaccaagacaccccacccagaacacttcttccctccctcagcccaaaccaaaggctggggttctcatctccaagtggctgttctccaactttcccaagccgcttgcattccccagactggactactgtggcggttaggttagatttgaagacggggcccaggctgggtatgaacgggtgcagccctcttctcctcttcccccccacatctctcatgagagaggtagtggcatttccttctcagggagcttcaatgggaaaggtctcgaaagcttcaggaggagcagaataccaacgcagggggatggctgtaacgatctcaccgtctcctaacctcagtcccttttttgagagtgaatggtggagggtgggaagggacccagatttgtagatctctttgtctgggggaggggaaggatgtggtttgcagagcggaagcagagtttggaaacgcatgagagcagagcttcgtgtgttcccaccctcagtgaggaggtgtgagtgggtgagcatgtggagttgggtgttcccaccctcagtgaggaggtgtgagtgggggtgcatatagaggcagtgcctgctgtggggtcacaactggtgcatgccagcgccaaagggacctgtctttaggggtcatttcagccagctcctcccatcacagatgacagctccaagcctagaaggggctcagtgacagggccaggacaagccctcaggactgtggcctcctggcccttggttcccctgccccacaacatggtctccacatggctggctggctggctgtccctgtgtgtgtgtgacacacggtgtgagtgcagggctgtgcccggggtgggagggtgtctatgtggcactgactgtcttagctcagagctggtggatcctctccatggacaatgacactttaaggattgtcttggtttgtttttcctatttgtggggtattttccccctcaggctcctgggtctgctgctgcctcaaggtgtcctgaccttgaggctgatgaggggacccctgcctgtttcccccatactgagttctagggaggtgctcaccccagactcttaggaagggtctagagaaatgagaggagcccaagccaggggccagctccgagaaagggtaacctccacgcttctctctcccaaattggaaatgaagacaggttttcaaaggcacaggctccccctgccagcttctaggatcttccttggtgtgcaatgggccagttaggggtaggcagcttgcacccagttctcctttatctcaacttattttcctggggagaggtgcctagagggattgaggtaacttcaactgggaattccaaggaaggtgggcaagtagccttggctctctcccaccatgtccatcaggattgagagtgtgtctagctcccgaccactttgtcttgacctactgaaaagttgggaactgaggggtgccttcattcccctttgttcactttctccagctcaacttgggacttgggtggtgggactggagacctcacccctgctcccgtcccgccccctttctatcccaacctgtttccatgtagcagacccttcctagggagcagggaggggaagccacagattgcaaacccaggggctcctttttcattctttctaaaaccttgatatcctcagcccaaaggcgatgcccccctgccacctccaagcctggaattgtgcataacccggatcttgtatctttgtataacggatgttatttgtacgaagggcagttcgtaaacagcacttgttcttttaataaaagaatgttttgcaaaaaaaaaaaaaaaaatccgaagagcccctgcgtagtctcgctttatggaaggggacaggaggtgggtgccaactgcgggggtgtaggagggcgtgggctgcggcccttctgtccgcactcagcggcagagagcgcacagacgctcagcacacccgggcccaccacgcagggtgcatcagtccgtgggccccggccgtcgggaccctgacccgtcccgaggtgacgcgacgcccgcgcgcttgctcccagaagcgcggcctaggctcggccagcaacagcgactcctgggagggtcctgcgccctcgggggtgccccaggcgccgaggctgcgcgcggggcgttccaccgccaggcccgcccggcagggggcgccgggaccgaccgctcacgcccggcgtgctgaggaggccgctgggcgggcgccgtggtcgggcttccgtaccccgcccgcccctggcctccgccctcgcagaacgccgcggcgtcttccggggcctggcgggccggggaccgagggggcggggaggtgacccggcgggggcggagccagcgggcgggcgcggcgcgggaggcgaccatgcgcggcgcgggggcgatcctgcggccggcggcgcgtggtgcccgggtgagcacccccgccctgcaccagcccccgtcccgaaccccagccgggcccctgccagcccccactccagccccggcccggccgagcatcccggagctcccggcccgtcccgccggtgtctggcttgcctcagctcacaggcttttcccgagcgccagtccctgccaggacctccgcagccagcaccttctcttgcgacctttttcttaccctctcattcctccctcgccccttcagccctgtcacctcctccttcctagatggcctcccgtgtccttccctttccactgattttatttttccgtttccaaaccaccgtcttgtgatgcctgccatgcttgcgtaccttgcaggacctgaacccgcggcgggacatctcctcctggctggtgagtccccccatcctcccctcctcctcgcacaagacccccaggcacggagatctcaaaggcagaaacaggaaatggagctaggaagagtacaggcctattccctggagttagcccgtggctctcagggaggtggggcggaccagagggcactgggcagggcgccagtcttctgtactgaggacagcagcacctaatgaaccaagccccagtgtgggtggccctgccgtaggctggaaggatcccagcccgccttccctagcacgcaggtgggagccagcgtttgagggaaggcagctggaccctgaaacctgagtgcctgcatggctttgaaatctccctgtccaaagctcacggtcctatggtgtcctggggaacggtcttgttgggtggcatcagatcagcctcttgtagaggaaacctgccacacacacaggccagtgggaaactaggaagggtcgcaggccggacggtgcttccagggcttgagctaaccctgagcccctcatcttccctggccacaggcccagtggttccctagaaccccagccaggtccgtggtggccctgaagacccccatcaaggtggagctggtggcagggaaaacctacaggtggtgtgtgtgtggccgcagcaagaagcaggtgagacccctgtctgccttcctactgatacctctggctaggaacagcctggtgtctccagtgagttcccacccaggatgatcttattcttcccacacatacctgagggacaccaagggggcttgggaacaaaaggccagtgccaccagcaaccttaagctcactgcatctaccccttgcaatgaagccagagagacagaaactcagtcacgcagccagcctggtgtggccaggcttccagtgggctcttctggagctgtttgtttctcagaggtgcactgcatggcgaagctcacctggcccttccctgtctccttccaggaagcgcctgggccacagattcccaggccttgaaccccaaaagcctacagcacctggtatttcctggcggtcttccatccaagtactaaccaggcctgaccctgcttagcttccgagatcagatgagattgggcgcattcagggtggtatggccatagacacattgggaagagattctgctcaggctctcctgcctccaaagcctcccagccttcccctgtgcccctctctactcttcttccagaaaactcttccttctcagtttatgggacttcctggccgcttgccacagtttgctgtcttctcagcttcactgcctgccccacttgcttccccttctgcccaggagcctttcgtcccagcaggaacctgcccatattgtttgcctccctggcccctttccttcctgagcagagctctgactggtattccttcaagctatgtggcatggtgtcagcagcccagggtccttgagtcccacttaggtccatgcacctcaagccctctaagacaagttgctggtttctatttgcacgcttctctcatctcctttccatcccaccctaactccaatgtcaagaggccttggttcagccaggcgaggtggctcacctgtaatcccagcactttgcgaggccaaggcaggaggctcttttgagtccaggagttcaagaacagtctgggcaacaaagttgagaccccgcttctacaaatgcctctacccccaccaaagactagcatggaggcaggcctgtgttcccagccatactggaggctgaggaaggaggaccgcttgaccccaggaggttgaggctacagtgagccgtgtttgcatcactgcactccagcctgggcaacagagtgagaccctgtcaaaaaaaaaggccttggcaccagctctgccttcagctagcaaggcatgtcacctttctgggcctgtttccattacccagtctctgcttgagcggcttctgggatggggagtacacttctgtgccagccagccagtttgctatggggcatcccctcctccttgtaaccttcactccctgtcacgtgcccagttattccctggagccaaacaaaattgctaccacagtgtactctccagcccaaagaagttttaacccaggaacatgggaagtaaatgaatttcatgatccagtggagactcagagacacacacacacacacacacacacacacactcacactctattagtgtcctggccctctgggtgtcccagagactaatgctataaagactctgtaaatacttaccagacacttactataggcaaagtgcatcacgatcatattttatttcctcatacaactctactcttatcacccccacattacagataagagaggtcactcagtgagccttggcagtcttgctctggagcctgtaccctaaccactgtgctccactccccctgagctcctgcagcctgccctgccctgccccagcaggtggggtcaggtctttgactcctgtctttcccccaccagcccttctgtgacggctcccacttcttccaacgcactggcctatctccactcaagttcaaggcccaagagacccgcatggtggcactctgtacctgcaaggccactcagaggcccccgtactgcgatggcacccacaggagtgagcgcgtgcagaaggcagaagtgggctccccactctgagggggctgctgctgtccagccacaggtggccttggctccaggcctctgacaggcacccccttctgtgggaaaggaaacaggtgctgagcccaagagactctggtacccactgctggctcatgaaggaagaattattccttataacctaaaagtctccagtctggggcaggcgggagtgggccctggttcaatgtttgctgatggggaagatggcaaaaacaagcctgcccaaccagactggtagtcctgcagtcactgctatgaggcccacgtgctgcctcctgctccagattttaacctctctgtgggctgggggcacctgaccagccacaggagagggcagttcagattcattctgtatggggtccccaagccaggctaaacccagagatgagaggcacccttcccttcttccctccaccccaaagaactacaggctccagaaagtatgcagcatttattacaaagccaagagatacagatgtcccagggcaaaggagggtacagtcacaggacctcagacacaggacaaggtgcaaacacagacaagcccatcagggggctcccaaccccacacacctacgctatgatggaatctcgagtctcgactcccgactcctctcagatctatgcacacttgaggaaatctcggtgggcagcgacctgccagggtctgtccctaaggaggtggtccgctgacctctcaaggggtgggggtggggtcagagcttacaggtttctgtcttcttgtgcttttagatgcagttgctctgtcctgaccaggtgaccgggcctcagctgggggtggaggggcaattggaaggctgtttgcctctggcaaagtctgggatctgtgcttgtgtgaggttaacccacccccacttccactctaggccccaggtgagactccaccaccagtcctgctagtgagggttccccggtgagggtaaggttggtgggggtgcagcgcttcacaatgctaaagccttagccctcctccaagagctgagacctctcagggcctgaatcttcttttccacaagataaatgatgcaaaggccacacacacaggaaaaaaaaaaaaagaggcagaactatctattctttgcacaaagtttccactgcaagaggaggaggtgatgcaggtgccacctccaccctgcacttgctcctcagaaccagggataaactgcatttgtaaaaggcactgttcttagcaatttctggacattcaacaacgtggggggcggccactggtcagaggcaggacagcagccaagatggggagagaaacggggagagaaagaaacgattctaactgactcctatatgcagccagttggaatcatgcctaaagctttgggtctgaaggggcccccaacacaccacctgccttgggaaacagcgaggatggtgcagagctttattgagactccagtggcccatccagttcatctccaggcacccccaaaaacagcaaattacacaagaccccccccaaaaaaaatgaacaccattttccacacatacacacacacataaagtttgtttcctgtggcatttaaattaatctggttggtccatagaaaataagtatgtatatttggtttttcctatgtacatatatatatatatttatttataaaacccgccccccacccccaaggtgggaagagctggggaaagtagaagaggtggaaaaaagggcccagaaaaagtggaaggagtggagaggcttggctggaagaagggagagggtccctggcctcaagttaaggggggcacgggagcgccgttgacagtcatcttgcgccccctgctggtggaggatggtgtctgcaggcagttcaagctacccccgttggcagctgtggtggccccactggctgtcgaagggggagtgggggaggtagggtgggtggctggaggcccatgggaactgggagagccatgggatggggtggctgggctgggcagggaggaggaggtggctggcagggtggcagggctgggagccttgtcgctgactgactcacactcggacgccccgctggtgttggtgccctcggagggggtgggcaccgtggctagggtgagccgcttgcaggctggctggacacggtacttgagggggagaggcccgttctgcggggagagtggggaggagagacacagggaaggggaaggtatcaggagacagagtccaactaaagggccaccatctccaccccacagtgtccaaactcgaaaaaagggatgggatggggccttggagaggagagagacaaggatacagggtgcatgaagacccagagagggaaaaggtctaagagcagagactccgtcagagaggagacgggagagagggaggcaaacacacggcagctgccagcacctatttctgcccccaaatctggggacaccgtctgcccagggagccttgtctcctgagcggaaagtcatccgcaagagatggcccagaggctgacctgctgtagcaagccaccctggacatgcagctcatgggataagggacagactgtctctgattacagaagggtggcccatgtggccacagacctatgccagaccctgtgggagtctgctccctgcccgccccactcgctggctcacccgccgccaggggtagatgtaggcgatgtccatgagggtgtagtattccttcagtggctcgtcctcgtacagaacctccacctgggggagggaagcggaggacaccatgaccctggccagctcggggctccaggctgggaatgtgggggactgggaggcggggcaatgggaagggtggatttacagatggtcccttatttctctgggatttcactgtggatttgacttccctgtcagagttgttccaacataactcctgaccaccaggcaggaagggttccagagaagtttcccctattgttagcagcctctggtcccaccatgcacacagctgtctgggtctcctatctctggcaggtcgcccagaggagctgaaaaggctcagggggatctcctggaactctggctctcacccccagctgcaaaatggaatcacccagggagctttaaaaaacaccaatgtggccgggtgcggtggctcatgcctgtaatcccagcactttgggaggccaaggcgggcggatcacaaggtcaggagatcgagaccatcctggctaacgtggtgaaaccccgtctctactaaaaatacaaaaaattagctgggcgtggtggcgggtgtctgtagtcccagctactcgggaggctgaggcaggagaatggcgtgaacccgggaggcggagcttgcagtgagcggagatagtgcccctgaactccagcctgggcgacagagcgagactccgtctcaaaaaaaacaaaacaaaacaaaaaacaaacaccaatgcctaggccaagtgcggtggctcaagcctataatcccagagctttgggaggccgagaattcaagaccagccaaaccaacatggagaaaccccgtctctactaaaaaaacagaattagccgggtgtggtgccacatgcctgtatcccagctactcgggaggctaaggtgggagaatcgcttgagcccggggggtcagcagaggttgcggtgagccaagatcctgccattgcactccagcctgggcaacaagagcaagactctgtctcaaaaaacaaacaaacaaacaaaaaaccaaaaacccaccaatgcctggctaggtgcggtggctcacacctgtaatcccagagctttgggaggctgaagcgggtgggtcacttgaggccaggagttggagaccagcctggccaacatggtgaaaccctgtctatactgaaagtacaaaaattagccacgtgtggtggcatgtacctgtagtcccagctacttgggaggctgaggcacaagaatcactttaaaccaggaggtggagattgcagtgagccaagatgatgccactgcactccagcctgcgtgacaaaggggaaacaaaaaaagcaaaaacaaaaaatcaatgcctgcatcttacccccagaaattctgacttaactggtaagatgtgagttaactcatgagatttaacaggcaacagtttaggatccactgtcctagagtgtgatccatggaccttcagtacctaggagcttgttagaaatatggaatctggccgggtgccgtggctcatgcctgtaatcccagcactttgggaggccaaggtggggtggatcacgaggtcaggagtttaagaccagcctggccaacatggtgaaaccctgtctctactaaaactacaaaaattagccaggtgtggtggcaggcgcctgtaatcccagctactcgggaggctgaggcaggagaatcgcttgaatccggtaggcggaggttgcagtgagccgagatcgctccactgcactctagcctggtgacagagcaagactccatctcaaaaaaaaaaaaaaaaaaggaaatatggaatctactaaataaatcagaatctgcattttaacaagatctccaggggacacatatacattcaagcttgaaaagctatgtcctggagctccgttggaatttcagactagccttcccacagccaaccagcctgaggaggccctgcgttttttgcactcacctctgccacagttccgagtgtgcaacatgcacacatacacaccgtcttggtcccatgcaccactgcacactgacttcaacacccctagactgcccccaatcttggtttcaaccacccttctgttaacgcatgggctcagttaaccgcgcaagccctgggtgacacctagccagctctgaccaatggctgggctgcacagactgtctgacacacccatacacagacactcattttttgaaaggcccagggacccaccttgtacttgctgggcacatccatcttgttgcggagaaacttggcaagatgcatgacggtcatggctgctgggcatcgcaggaagcgcacccctgtctgctggggcacaggcacccatggtaggggatccaccccaggccactccctcccagcccacattccagtcctgggcaggccccagcactcactttctctttgtccccatccccattctccagggggcccttcttctcgtcccggtccctggggacggagaaagaatgaagctaggaagacccaggaagaaccaggagacccaggaggatgatccctcaatggacacatccagagagggtcctgggtgggagaaggggttacccagactaggaacccagaaggggccagcctgggccagacttgcctggcaccttcgtagaattcgatggagaggctgacaatctcatcatcactcagagcccccttctcctgctccaagacctcgccgcggtcctcattggagccgttggggactgcagaaggaaagagctctcgggttggcggaggatgtaggaagggagcccgccaaggacccagagatcatgaactcagccaggtgagcccagccaccttctggagaggtgtgcgcggaggaggtcagagggtgaggggtagcgctacacacctacatggtcccaggcaagactgtgcacacacaaacagacgcgagcacactcaccctccgtcagggggtacgctgcatagaaatcccgccgccgtttcatctcatctggaagaaggcagcaggatgaggacagggccatgggttgggaaatggggtcagtggaggaggaatggagtgcagatacctttaaaaagcccagggaccaatttgtagacaatgtcttgaagtgttttgtcagacctggggaaaaatggacagggcttatcagcaatgccttctccagagcgctccgacctcgccctgctctcccagccagggtacccctcttcccacccccttcctgagaccggtgcccaggcattaggatccctgtgggtctggtctttgcccctctagtatgcctcaccctgtgatgagccaaatgtaaccccaaggtcggggagtagcccaggtccacaccccatgcttctcctacacctgccgccttggctgaaggaagcacggagcgtgggagggatgggggaggctgacccagaggatcgcggggacaggaggtgccgtgccaagcccacctgatgctcagcagcggccgggttttatggacctgcacgtcacacatggggcagtatttgttggtctccaggtagcgcacgatgcaggttttgcagacttgggggtgtggagagagagaggagagtcagagccaacttccaactccaggaccagcctccccgccctctgctcagactcagatatccctcctcctccaccctgtccctgctccgaggcccaatgtggcgatgtgtgttctgcacgtgtggtacctgtccttgtgcactgttgagggaagctggatcttgtgtgagacaggccagtgtcatgtacaatgcagaaggtcagccctgagtcccaagctccccgatggagtgggggacaaaagccagcgtgttcaagatgcctctgagtcccacccccctgctgccaagcccacagtgcaaacaaggggtgtccgcgtcttcagggcataaaatttcagccatttcaagaaagaactgagatttcagatgtgagtccttgaaatgaacttctgggctgatgccccgcgcccagtcgcccctgcgaggtaggccctctgtgacctaaggattcccagcagacacgtgggcgcgttggctctttagggcaagggtttgcgtgctaccttcctcaggccgtgcccgccccaatctgggcacagaggctgcccaccctgagcagctcccctccccccaactcacaggaatgcaggcactccacgatagtggtggcgtcgatgaagtaccccccgcagagggcacacatgaggtgggggttcagctctgtgattttgatccgtgtagtccgatgcatgattccggggtcgggggtggggggactggggagcgttgccctgggaaacggaagtggaatcagaaacccagagttggccgggcgcggtggttcacgcctgtaatcccagcactttgggaggccaaggcgggcggatcacgaggtcaggagattgagaccatcttgactaacatggtgaaaccccatctctactaaaaatacggaaaatcagccaggcatggtggtgggcacctgtagtcccagctgcttgggaggctgaggcaggagaatgtcgtgaacccgggaggcggagcttgcagtgagccgagatcatgccactgcactccagcctgggcgacagagtgagagtctgtctcaaaaaagaaaagaaaaaagaaacccagagcctcggcagcccctcttacgcttcactccacacctccccccaccagcacatctctccctgagcccaagacccttctctgccttcagggtgggctgggggtgtacatgtggctggttctttctggccacctctgagagttcattgggtgcccaggctctggagagtcacacagccttgagcaacaaggttaggcttcctctgagaagcaggaggaaagactgaagttaggccacaggatgtactgcccaactccccagagaatgtgaggaggcaggaaaatggaaaagaagagggtttttaaaactctttccaatcccaagtcgggcacagtggctcatgtctgtaatcccagcattttgggaggctgtggcaggaggatcctcctgcctcacgtgatcccttgagtctgggtggtcgaggctacagtgagccgtgattatgccactgcactcaagcctgggcgacagagcgagactctgtctaaaaaagaaaaacaaaaacaaaactctccaatcccaatccgtattcactcacatggtccacatttaaagcatcctaggaactaggaggaaacttagataaagcagccactggcctgaaacttcaaggaatagaagaagggaaaaataagttatccttactccctcaacccctccacccaggtgcagggcctcagacttgatccttccactacgtcccagcctcctatctactccatccattcactcctcctccaggaagtcttccctggaaacaccatggacacaggctaccctaagttagaaggccgcagccatcacttgtgcttctggctctgcatccagcctaagctttggagcacctccctcctctaaagtctgccaaatataggctgctcccagaaaatccaccatacgctaatcatttggcttccaggcctgagactcaggcagggaacagagagggtccttacatgcctgaagttgggaacgtgcagctccagccctagccctggactcaaagagtttaggcaaaaaggctatacccctgccacaggaatccctgccagtgtccctgatggacagccgcctgcatgagtgctccctgtccacaagcacacagggtccaggaacccccctttcatacacaatgcaggaatcccccccacatggtcactgttactctcccactgtctcctgccctggtgacgcctctgccacctgttcacaggctgtccagtgacaaaccacaggctctcacagatgcctgccaaagctgggcagaaagtgctctgtccccagaccgcctgctcgacaccagccaggcccgggcagggtccagagaggtgaaaagtccggctctggattggccaccgtgcttccttcttggtaaagaaatcaaaccaaacctgcacctggaagggacagcagccctccctcctctttcccagagtaaaagcccaggggtggggcttgggagggtggccaagccccaacagctcctttacaacatactcacacccttctctcctttccagaaagatttctaaagccaccacactgagttttctaggacaagaaattcacagccgggatcagcagtttctatagagaccccaggatgagtctggccaggacccagacagccaacagaggctcagggaacctggccagagaccgaaagagatgcagagacacaaaggccacatgtgggagagacaccaggttacagggcagacagaggggcacaagccagtcctacagcaagcccagagacatggcggagaggtggcggccccggggatctgagaagggagaggggttcccaccccacgcagggtggcctcggccagccctccctgcatgggtcccccctttgcaattacgcagaaagctgctggatactccactgtttggtcgtttccatagtaaccctgtccctggcaagatgcccaaatattattacaaccatccagaggagagaacaatccaagtggctgtctctctgagcgtgtgtaatatccatcctgtgtacgtgccatctgggcctccaaaggtacttcctgtgactgcctgtcagtcatatgtgtgtccagatgcatctatgtgtgtgtgcagagccaccaacaaacatgctgatgctgagctctgataatgcctggggtctctgttgctggggtaaatcgcatgccctcatctatctcccgttcaccctcatatacacatgcacgcgtacacacacatacacatgtaggctccgcacacttcacatcgtgcccgagccacctcattcacacactcgctgtgttttcaaagcagacacttgctcttttttttttttttttgagatagtcttgctctgttgcccaggctgaagtacagtggtgcgatctcggctcactgcagcctccgcctaccgggttcaagtgattcttgtgcctcagccttctgagtagctggaatcacaggtgcatgccaccacactggctaattttttttttttttttttaaacagagatggggtttcaccatgtcagccagccttgaactcctggcctcaagtgatctgcccgcctccacctcccaaagtgttgggattacaggtgtgagccaccacacccggctgacacttgcttttaagaagaaccccacagccgagagccccacactgcgaatggctgtacccctcacccagtcacttccccgagcatttctgagaattcagccccagcctgttcctctggaccctttctagacacgaggcccaaggtggtgctgactgaatgaaacgctgctccttctccagtttaagaaaataagccccttgccacactccctgctcccctcattccatccccacaggttctgactgttacctctggggctgggggtggggagaagcactgattggctcctcacctgattgccatggttacctgcagggccctgccagcaggtgccaagagcaatgtaaacaggagctctgactccctagagcaccctctccccatctccccaccccaggaggccccaggccgcgaattcctgatacccagttcctcccccgctgcactggctggtgtgctgtgagaaggtgagggaaaaaggggtgatgggtgactggaaatccagctgtcattactttgaggaagaggctgggagatgggaagaactcgagggagaaagagtgggagacacagatcccaagaaacagaaaggggaggccaagcaccattggaagtggcctctgcagagctcaggtgctttaacaggtcagtcccaactgtgtgtccacccctccctggacttgagcactgcctccacctctaacaccacttttccccaagcagaagccaagcccttcagtgtcttctgccattgtctttgcaagggtgtgtgtgacccttaggcagcccacattctgggccctgaggccctgggtctggctattgctaatgtggcaggaagggagcttgctcagcacccagcatccaaccccgacccctctttgccattcaagcctggcacttgtctttcccaatccttaaagacccctgctaagaaaacaccaccatctctttctctctctctcttttttttttctttttgagacggagtctcactctgtctcctaggctggagtgcagtggcaagatatcggctcactgcaacctccgcctcctggattgaagcgattctcctgcctcaacctcccaagtagctgggaatacaggcgtgtgccaccacacctggctaatttttgtatttttagtagagacagggtttcaccatgttggccaggctggtttccaactcctggcctcaagtgatctgcccgcctcggcctcccaaactgctgggattacaggcatgagccaccacacccagacccatctctccattttaaccagtgtctttctggaagccaccctgcaatttaggcctctctcacttcttcatggtcccctgtggaaacagtgggtctcccagccccaaggcccctgtgcttctctgatgccatagctctctctgctctccctgcctccaaatgaaatcagccccactccctcactagaatgtctccaggtcttgggaaaagtcactcaaggtcacatccagatgtctagaactgcagaggtgaaagggcttttagaaagcaccttgttcagctgggcgtggtggctcacacctgtaatcccaacactttgggaggccaaggcggatggatcatgaggtcaggagttcaaaaccaggctggcaaagatggtgaaaccccatctctactaaaaatacatggtggctcacgtccgtaatcccagcacttcgggaggccaagacgggcggatcatgaggtcaggagatcgagaccatcctggctaacatggtgaaaccccgtctctactaaaaatacaaaacattagttgggtgtggtggcacgcgcctctagtcccagctactcgggaggctgaggcaggagaatcgcttgaatccaggaggcagaggttgcagtgagccgagattgcgccactgcactccagcctgggcaacagagcgagactctgtctcaaacaaacaaacaaaaatacaaaaattagcggagcatggtggcaggcgcctgtaatcccagctactcaggaggctgagccagagaattgcttgaacctgggaggcagaggttgcagtgagtggagatcgtgccactgcactccaagctgggccacagagtgaaagaaactccatctcaaaaaaagagaaaaagaaaaagaagcacctgttcaatcctttcattttacagatgagcacactcagatgtgacttgtctaaggtcacaaagcaaagcagtggcagtcctgtgacaagaaagtgcctgactcccaccccagtgcttttaacatcctggcacctggccaggctcctcactcatctaaagcagtaatgcccggcttcatcccagcaggtgggaggggaaaagagcagctccctggagtggcgggaaaaccactcagtgggccgccgtctgggagggagtcagtctggcccaaacatgaccatcagcatggactcctgccttgaggcaggaagaggaggcacatgttaattgccttaccccacttcctacacatagggaaacagaggctgcagggaagcacagccagccagagtacagcatcaagactcagaccaggggttttatgactctgttcctctcccagcttcgtgggtccaactgcgcaagccccttgtatttgtgtttggggccgtgagggtctgcctagggacactgtgaacctcccaactttccccaatccttgacaatggcacaaagatctgctcccctgtccccaccatgcattgaaaagggcctcctgaagctgggcttactcaaccctcccttcctccctctcccacctctcaactccctaagatcaaacaaaggcaaaaccccaaaatatacacattgccagatacacacacatacagcaagacacacccccctccacctctcacactcactacacacaaggccagatagacacgccacaaccctcccccaccctgcgccacacacacacacaatcacagccagaccagagccaggcccaccctcgctacatgcagaagccatccacatccaccccccacctagaagcacacagcctgacatccctgcctggaaacagaccctgcaaacacacactaaccttttgtacgaccctggtccacccagggtaaattataacataagtcttccagcaacaaaagcagttcagcttccaaagtccgctctggggaccagaggctggagggctgcagtgggcatgtgacctgcacaaagctgtaccctcttcctgttcgggctctctccattcccatgacaacagctccatcaaccaagatctctcaggcaaggccaggggcagcagagtcccccttcctgcccaacccccaagacttcaacttgaaccctacctagctacacatggtctggatcctggggttggtttcctgcttcattccaaagtcagttctaaagcctcaatcccccaacccccaaccaggggagcccgtgggaaaaccttcccaccaaaaagctgcaacagagctggctttatgctcccagtaataacaccttggaccagagtgaaggggggagggaggagagaaattaaagagtttcaggaacagaaactgccagaggtcccagaggaggaggcatcagaacagagcggggaggggacaaccaggagacagccctcccctcgagacagacctctggggagactgaggcagcatgggggacactgagggacaaagatctcgggaagcgctgggtaacacttccacaatattcactggcaaatccacccgcctccatgccgcctcctcccacctcaagccaaccggagcgattatgggcagacaggggcagtgggggagggcgaggggcagcccgggcccaccgtggagacaggcagggggtgtctgcttgcccgggggtcccacgccctcagagctagcagtaggagggcgtgcgcagggtggggtggctgggcgtcccaggggaaggggggccagtttagcagatccccctgcttccgctggcgatgggaaatattgcgataaatttccctccatccccattctacccccagcgcccgggcttccccaggagcccatgtccaaggatcagggaccccagttaccgggtggccgctcccaccttccctagagccaaactttctgcggggccccgggaggggtgttccggagggaggctctgctgaggtggttcggggagggggcggggcgccggcgccgggacggggagcggggaccggcggggggaggtgcccgagaggacccggaccccggcggggaagggcgccctcccccggcctcgcggccgccccaaagcacatccccttctgccggccccaagtccccgcgcgtccacggcgcccctgtgcccacgggagagcgacccccgcccagatggaaaagggggtagaccgggcagagcgagaggcggctttggctcgtggggagcggcgacccaacccagcgcgcatcccgcaagccctcccggctgccccggaccttccccctcgctacctcggaacagggtctgcccgggggctgctgcacaaagaggtggtggtcgagggagacgccaaatcgttaagacggggagcccgtttcggccatcttggaagagaggaaagggaaaaagggacagaaaaaagggagaaagaaaggcggacggggcaagctgggctagggactgacggggcgcggggggtgcgaaggcaggatcggctcagagcctccccctcccatcggggcttgcgaagaacggccggcccccatcccaatccccagagggttacaggccaggagagggaaaggcagggggagtccgctccgcttacctgggttcggggtccggtgggtctcggggagggggggatgggagggagggagggaagggaggggaggggggccgcagccgtgtcgctcgcccgggcggcgggaggggagaaacctacggtaagaaaggagtttgtgaaagcggcttggggtgggagggagaggggaggggaggggaccgaggggggaggggagggaccggagtgtgggggggagacaaaatggcttttttcctccagacaagagtaggtcccgcccaccactcacccacgtgacctcattccttcaggatgctggcagagacgggaagaggagggggaggctggcgcggccgctccccgccaccggctgccgggtccctagccaggacgagacccctcccttcccatgcggccgccccgaccccggaggatggattctcttatgttaccttccgcagttagcccccctcccttcaaaatatgggttccccccactgacactgtgatgcccatccctaactggggcgcctggaaaatggtgaaatggggactgggctgaaaggtggctcgtggtcctccacgccccggcctagaccaaagggcgcggggctccggcgggggacgcgacgccttcagccaggcgtccgagcgattttcattcactccaagtgacactcccttaaaattaataactgcatctgggagggcgagcgtgtcctccccactccccttgccccctcggcggcaggggcgctggccccgaaaagcggcgcaccaggatccagcctgggcgcctggcagggagcaatcgcgagaggggagtggaggtgcggggtgaggccgggtggggggcctcgccgcggggggatcgggtagctctggcggaggctgcgcccccggcgtgctcgggcagagaagaacggaggcccgctgaggatgggaactcaggctccgggtctgggacacaataatccggccgaaggcgagcggccacactggactaggaaacgaggcgccgggctgtaaggtgggcccgcgccttttctcctgcctggcgctgattcccgcatttttcgctcgcgccctgcgctgcgcgctgcctgtgcgcctccctgggcgcgcgggcgggagagtcgggcgagcgccaagacggctgggcccgactcccactggcgccccggctccacctggcgctggggctccggtccgcagtggctccggcaggagggagagaacgaggagggaggcttggaaacgccgggagtagcggtgaggccgacgccggggaagcgaatcgatactgcgttactggacgcccgtgggcctcatgaggatggtcgattccctcattcgttattcacgatttattagggatggcggccgcgtctgtccctccagagagctcgattatccatccggccagcagcgccattaagcgcactgacggtgggaggctcgagttagaaattaggataggaatcttcgcccagttttggagcgcctgcctcctcttccctcgttgctcgcagccaaggcagccgcgaagctgggggcctcgggtgaatgctttcgccctctggccggcgaccaggagacctgcgcacactggccgccgagtgaccccagctcgagcctgcagccacaccagcgggacgggggcggggaggaagaggaagggcggagagacttccttccagagggagtggtccgagaaccggcgggagaagggccaagggaagatccggtcacctgctccggagcctgcaggcggagaggcgagtagttcaccggccccggaggaaaggggaccctcccactgttcccaggcaaatgtgtcgccggcatcctgcactctgccggggaagacgcgcatccactcgctctgcagggaggggaacgcgggaaggactcccagtcagccgcccctctctggctacaagaccccgaacaagagaaacctgtaacaggggctctgcggagatctggatcccacccaccaaccacatgggcacctggggggctgcccctcggggcattatcagccagtgggaagggggttgacgttcctctgcggcccatgaatcctggagggctgcccgaggggccaccggggtccatccacttattcttcggttgttaagcgccagacaggagagaaccgctagagaggagtgtgctaagaccctattacccactaaaactccattttcatcttttgcgtcctggatgactagtctccacattcctggcctttctggtttctcaggagaaccttctgacccaactcttcccacatcgaaagagtttcctagtcttttgttctactactagccgacatagaaagcacctgtcatgtgccagtgtcaaatactgcgctaggaactgggaactcaaggcacaggagcctggcttttgcgcagggcgctcacaggccggtgggtgcaaaccctgaaggacacacagcctgtccctttagcgcccatcgcttctggtgtgagctcccgctaagggtgggtgagtactggggtgggcttccagaagaggcctcctttgagccgaatctgcagagaccaagtgtctatgagaactgctcaagagtgctttgcacattctcctccacaaaggtcgaggctcccactgcgcccaggaatgcgcctcgtcagacattaggcgccccttgattttgtgtttgcatctcacgcggtcctctagctgacaagtgcatcagaagagtcacagtggctgtcacaagccagagactcgcagaggacaggaacgcgggaaatctaggcaattacctccagcatataccaagagctattgcgaggatcagatccctttaaaaatggtgacgagacaggagagggcggctcctctagagctttccggaacgtctttacctctgtgtcctttataccttttatctcccccaaacaaggtccttagtcagtttctccttctatttccccatcttcctcccccacctccctgtgtagttctagggggaaaaaatgtgttgttttcctttttttctgatgcttctaatattaaatgcgtctattttcccactctccattgtcttgaggtcttcccctacccaccctgcctagttctgtcacgtcccttctttccctgtatcacaacaatgttctccctttctcacctttgtttctcttcatacttgtttctctctctgtgtctctctcattctcttcccttccaaatgtagtatttggagactgtaatatcgattgaggcagacaatagaaaactgtcgaacctccactgtaaattcattcttaatcctatgaaaaaatgcatcctgaaacgtgttgcatgcacagtgagacaaaaacctgtgtctttaggtttcctgcgatctagcttggaggcgggttgggggggtgtggagggaagtgctggagaaattatcccattattgactgagcagcaaagaattttcaagaacagtgattctcctagaaaaagtattgctgctgccatttcaatgcaaaatttggcttttgagtaaaaggcttaggtttttatcttccggggagaaaaaaaaaacccaaaagacaaaaaaaaaaaaaaaaaaggtcatagcgtccctgggtgggctcgaaccaccaacctttcggttaacagccgaacgcgctaaccgattgcgccacagagaccgagtcgactaccggcgtagtagtgagccgagtcaatgggagcgagcctggacggcgcagacgccgtaagagatgccgccatcgggcgaaataagtggaacccgggggagaaagggaaggatcctgatgggggagggaggcgaaagagcttgggaggagaggacgcgggacgtgcacgcccttcctccattggaacggcgagaggtcgactctggctatcctcaggttctacctcaaacgtggagaggcgcggaacgtccctttttagggtgacctgagattgaggatacgtgaagtcgggccgcaggaagtcccccaaatcagaacaagcttcggcttccaaactccctttcacagctgaacccctgcagccgcaaaatacccgcgacgcctacacgcgacgccttccccttcccacctgcatcattaaatttccatttaatgggcgcctcctatatactaggcactgttgtgggccagtgaatattccgagcctaggcaagtgcctggtacacagtaaacgcaggatttctggagtgaataaataagctagcacgactaatacgacgaactcatacatcacgttgataagcgtcacggtgccccttcagctggggccgcagcttcctaaacccagtttcaccagcccacgtgcgcgcaggctccgcccccagtccctgaggtcccgagtccaggtccgccgagatcccactatgcaccgtgtcgcaagtctcttccgcagccacagtgacttttcacttccgcttttcccgcctccgttttgactttgcaaccaaactacctgtactggtgaccgacagggacgtgtgaccaatagaaagcccagatgtccaggaagagtccgcctatcagccaatgaagagacagcagtgagagcggttgcgcagtgaaggctagacccggtttactggaattgctctggcgatcgagggatcctagtacaccgcaatcatggtgagatggggagttaaagcaaaggggcatggggaaggattgagaagcggagggggtcaggagaggcttggggacgaaaagggcctagggtcgatggaaggaagcggtttcagttcgaggggagcgggccccggtgaggaccaagagggtgagtgcggctcattgccgccacacagtgctcatcccagctggagaaccaggggttcagacgcctccggaatggagaacgggcgtacaggagcctccgcatcaggagctgggccgggggctgtggcagcgtttgaccccccgcgctgacccctccgctctgtctgtcctagtctattatgtcctataacggaggggccgtcatggccatgaaggggaagaactgtgtggccatcgctgcagacaggcgcttcgggatccaggcccagatggtgaccacggacttccagaagatctttcccatgggtgaccggctgtacatcggtctggccgggctcgccactgacgtccagacagtgtaagtttcaagggtccccgcccacacccaggcctcttcttggaccatccaaccccggcgtcttgaccggccaaggtgtcagtcatctaccacacaccaccagtgagtttgagactttgccgcctccaaaaaacatgtccttccctttcttttttttttttttagacagggacttgctctgtcacccaggctggagctcagtggcatgatctcagctcactgcaacctccacctcccaggctcaagcgattctcgtgcctcagcctcctaagtagctgggactacaggcgcgcaccaccatgcctggctaatttttgtatttttagtagagacagggtttcaccatgttggccaggctagtttcgaactcctgacctcaagtgatccacctgcctcagcctcccaaagtgctgggattacaggcatgagccaccacacctggcctgactttgattttgacaacaattttgagcagacaagacaagcccaatagaaacatcttgcaagcagttggggttttgttattacatctcagggttggggaagcattggcaatgtgccaaatctatgggagcagattctggagagacaaagtctgtagggagggaaataatgagcggcagtttgagagctgaacgttacatttagcagtgaggggcgaagagaagccagagaagaataagagaggaaaagaacggtgataggttttcaggagggaatacgtggtcacagggggcaggtcctgcagggtactggtgcctgaggagcagcaggtcctggatttgtttcctagaaggtggagagactagctcacaagcgtgggtggatgcctgtcagaaaatgttctcatttcggctgggcgcggtggctcacacctgtaatcccaacactttgggaggctgaggtgggcggatatcttgagatcaggagttccagaccagcctggccaacatggtgaaacgctgtctctactaaaaatacaaaaattagccaggctgggtggtgggcacctgtaatcccagctactcgggaggctgaggctggagaattgcttgaacctgacagacggacgttgcagtgagctgaaattgtgccactgcactctagcctgggcaacagagcgagactctgtctcaaacaaaataaaaaaagaaagaataaaagaaaatgttctcatttctcttaaaactccctgagtctcaagaacataacacttactgagatctcacccagcctgcccttttttcctgtctggtagagtcagagaatgacatcctggggttcctgtcagtgaagtctcccgtgagccttcccttctgcagtcactgctgttctcacaccatttccttttcttcagagggcttttctcactgcgtttgcttccttctgggcaatgactgctcatttcactaggcctcagtttccttacctggaagatgaagctcaagtcatttctaagtctctttgctctggtgtcctgagactcattgcttttcctccagcaggtgtggcattggtctgctctatgcaggggcctatcctggggctctgagatggaactggcaagctgtgaccttttttccttttttcaccagagctgccaaatggcctttttctaaggcatctttcaagtctgttagcacatagcacagcagttggtgctgcccccttttttttttttttgtcacccaggctggtgacataaacttaactcactgcaacctccgcctccaaggctcaagtgatcctcccacctcaccctcccaagtagctgggactacaggtgtgtgccaccatgcccagctaatttttgtagttattgtaagaggcaaggtttcgctatgttgcccacagctgaactcctgagctcaagcaatccttccgcctcagtctcccaaagtgctgggattacaggtgtgacccactgcgcccagcctaaacatttttaatatggaacgcttcacaaatttgcatgtcatccttctgctaatcttccctgtattattccagttttaatatatgtgctgctggccaggcgtagtggctcacgcctgtaatcccagcactttgggaggccaaggtgggcagatcacgaagtcaggagatcgagaccatcctggctaacaccgtgaaaccccatctctactaaaaatacaaaaagttagccgggagtggtggcgggcgcctgtagtcccagctacttgagaggctgaggcaggagaatagcgtgaacccgggtggcggagcttgcagtgagccgagactgactgcgccactgcactccagcctgggcgacgagtgagactccgtctaaaaaaaaaaaaaatatatatatatatatatatatatgtgtgtgtgtgtgtgtgtgtgtgtgtgtgtgtgctgccaaagcaagcaccagttgctacttcctaacacatgtaagactacagttttccctgggcagggactgagatgagatgtctccttatgtttccctgacctcaacagggtagacactcaggaatattcaataatgacttactaactcacttttctcctacctcagtgcccagcgcctcaagttccggctgaacctgtatgagttgaaggaaggtcggcagatcaaaccttataccctcatgagcatggtggccaacctcttgtatgagaaacggtgagtgcaagtgtagctagcactgagggaatgcagacatctttgaatgtagtatggagtaggtactgaggaagaggactctccttgtttttccatctcttatttgcaggataatatccttattttatgggtgtgttttctttgggcctgtctggcaaccagataggaaagaaaatacttatgttggaagaaggcaaggaatgcacatagcagataaatttgcatctaggcaaaagagttagtcccaccagagtgttctggggtctcccagcaggagccactcttgccctagagctattctgtcagcactggcttcttgggaatagcagggagcctaggaatggggtgttcattttcgtcagttctccttgagggctttatggtgagaaacaaggggcctaactgtagaatttagtgcagaaatctaggatggaattgaaaggaaaccctgtgggtgctttctacctctgggcaaacctgggtggccagaatataagttgagctctctttttcttttttttttgagacggagtcttgctctgtcacccaggctggagtgcagtggcgtgatctcggctcactgcaacctccacctcccaggttcaatcgattcttctgcctcagcctgccatgtagctgggaccacaggtccatatcaccacacccggctaatttttgtattttcagtagagacagagtttcaacatgtgggtcaggctggtctcgaactcctgacctcaggtgatccacctaccttggcctcccaaagtcctattataggcatgagccaccatgcctggcctgatctctttttttttcttttcttttaactttttattttgaagtaatttttgtaatttgtaaaaataccctttagctttcaaaaactttttctttttttttttttgagatggtgtcttgctctgtcgccctggtgtgcaatcacggctcactgcaatctccacctcccgggtccaagtgattttcctgcctcagcctcctgagtagctgggattacaggtgtgtgccatcacacctggctaatttttttttttttttttttttttttttagtagagacaaggtttcaccacgctggtcgggctggtcttgaactcctgacctcaactgatctactgcctccgcttctcaaagtgctgggattacaggcatgagccactgcgccctgcaaaaagtcttataaagttgtaacaattaactcatatttggatgtatattaaatggcttgctgggcgtggtggctcatgcctgtaatcccagtactttgggaggccaaggaaggtggatcacttgaggtcaggagttcgagaccagcctggtcaacatggtgaaacctcatctctactaaaaatacaaaaattagctgggtgtggtggtgcacgcctgtaatcccagccactcgggaagctgaagcatgagaattgttgaacttgggaggcagaggttgtagtgagccaagatcatgccactgtactccagccttggtgacagagtgagacttagtctcaaaagaaataaaaaataggtcgggcgtggtggctcatgcctgtaatcccagcactttgggaggccaaggtgggcggatcacgaggtcaggagatcaagaccatcctggtcaacatggtgaaaccccatctctaataaaaatgcaaaaattagctgggcgtggtggcacacaccggtaatcccagctacttgggaagctgaggcaggagaatcgcttgaacctgggtggtggaggttgctgtgagcaacttgcctcagcctcctgagtagctgggattataggcgcctgccactgcacctggctaattttttaatttttagtagagacaaggtttcatcatgttggccaggctggtctcaaactcatgacctcatgatccgcccacctcagcctcccaaagtgctgggattacaagcatgaaccactgcgcccagccaacgaaaaaaaaagttaataatatctgggattatctggataagaaccttaaaaccaaatactataacacagctcagggcctgtgtttgaacttcctattatgctgatgccgagttaccatctgaagtaacttttactgcagtgtttcagacagaggtgcgtagatggtatctctggggtccagattttaaaaagggtctggacattgctcaggtttgcagttcaatgcctcagcctgtcctgccagaaaaatcactgatttcagatgggctcatagaggaagctcccgtcaatagtagctaagaatccagaatttttcaggtcacctaatgtattttttttcttttcaataagagtaagacatttattttattatttttattttttattttattattattatttttttgagagtttcactctttcgcccaggctggagtgcagtggtgcgatcatggctcactgcaacctttgcctcctgggtgcaagcaatcctcctgcctcagcctcccaagtagctgggaccataggtgcatgccaccatgcctggctaatttttaaatttttttgtagagacaggggtctcactttgttgcccaggttggtcttgaatgcctaggctcaagcagtcctccagccttggcctcctccctaagtgctgagattacaaacgtcagccatcatgcctggcctaaaaaagttattttcatggtggctcatgcctgtaatcttgaactgtgcgtgtgtatgtgtgtgtgtttctatttagagctataactgaagatcatgcccttagaaatgactgtgatccaggcctggagcattggctcacgcctgtaatcccagcactttgggaggccgaggtgggtggatcacaaggtcaggagattgagaccatcctggctaacacggtgaaaccccgtctgtactaaaaatacaaaacattagctgggcatggtggcgggcacctgtagtcccagctactcaggaggctgaggcaggagaatggctcgaacccaggaggcagagcttgcagtgagccaagatcgcaccactgcactccagcctgggcgacagagcaagactgtctcaaaaaaagaaagaaagaaagaaatgactgtgatccaataagacatatggataacgtctcttttactgactctttctactgaggatattggccatttgttatttggtattttatagatattccttaccttataaactgttataagtttaaaatattgtaagttgaaatgggtattttgtagacataggatgcaaatacacaaaacactatatccaaaaattgctcacagcagaacagtgtaaagtatctgttgtttcctctggtgattgtgtggctgactgggagctgcggctcattgtcactgcccagcatcaggagtgggtttggtaccacaaattgctagcctgggaaaagatcaaatttcaaagcatagtttccactgaatgcctgttgcttttgcaccatcataaagttgaaaaattttaagttgaaccatcataagtcagggaccatcatctgtacataaagatccctaagactgatttttcttttttttttttcttttcttttctttttttctgagatggagtctcgctctgtcgctcaggctggagtgcagtggcgcgatctcggctcactgcaagctccgcctcccgggttcatgccattctcctgcctcagcctcctgagtagctgggactatagtcacccgccaccatgcccagctaatttttttttgtatatttagtagagagggggtttcaccgtgttagccaggaaggtctcgatctcctgacctggtgatccacccacctcggcctcccaaagtgctgagattacaggtgtgagccaccgcgcctggcccaagactgatttttcttaaagatcagtgtctagaacaagtttctgatgagctgccatttccttttgacaatgagagtaacccagccactgagtatccctctttgccttgcctgctagggggctcaaaacaaaactttgtgttcagtctgagttatcttgtattatgttttaatggtttagttttatttttcagtgtttttcatataaactgcctccaatcttttctctaaaggagtagaggtataaacatacacatagaggactgagtgatggtaggaccttgggtgaggagagggaggattagaagaaaacaattctgaaagaaagaaggagcacaagagggtcagaggtgagaaggatagaaaggtaagtgttgaagaaaagaaagtggaaaagtcttagaatatttctagctggcaggagaagggagagggagctggcctcagggaaaggtgatcttcctaaacaggtcctccatttccctttgggtctgggtctaggccggggccttgtctgaataggcttaaacatgaaagcgagcgttcttgagttctggtttctctctctgatgctggcccccacaggtttggcccttactacactgagccagtcattgccgggttggacccgaagacctttaagcccttcatttgctctctagacctcatcggctgccccatggtgactgatgactttgtggtcagtggcacctgcgccgaacaaatgtacggaatgtgtgagtccctctgggagcccaacatggtacgttggtggcatggagaggggctgggctctgagttacccacccttggtcattaggaaaaaagtgtgtttatgtggcaggtaatggggagaatggtgcaggtgggagagaaagccacagctgctgctccttggaagggtatccagaaattccatctgccaggctggctggctggctccagaggagagcatcttctgttaggagaccacagttagatatttgccacagcagtaagaattccttacattgggtttacagggttctcgcatccattcactgagcaaacatttaactcagtgtagggttagaggcagctcaacaggttgtctgggttggcaacctggatccacccaccaccttagttattgttcttggagaagccagtttccctctctgcctccactaccttgactgtaaaatgaggataaaaaagtctgccttagaagtggtgctgaggaagccgggcgcggtggctcacgcctgtaatcccagcactttgggaggctgaggcaagcagatcacctgaggtttggagctcaggaccagcctgaccaacatggagaaaccccgtctctactaaaaaaaaagttaaattagccgggcatggtggtgcatgcctgtaatcccagctactcgggaggctgaggagaatcgcttgagcctgggaggcggaggttgcggtgaacaaagatcgtgccattgcactccagcctgggcaacaagagctaaactccgtctcaaaaaaaaaaaaaaaaaagtggtgctgaggaaaacaaatgagtatatgtgctgccgaagcgagcacaaaaacaagtgagaagagatgagatagtgcttgacggcgagggtcggctgtcgttattaagtgccagctcttccggccactggggaaagcaggtacagtctgctttcaagggcccactgcagtccagtgaagcaagacacatccaaatacctgttgaactgcagtttgttgggaagaggaggaaagaaagggtctgggggcaaaggtacaggaaggggcaggtatgctcagtgactggagagctgagcctggctggagtgtgggttaaacatggggagaaatgatgctggagactgagatgagacctcaaagggccttgaatgccatgccaaggagtttgaactctgtcctctgccataggaacctagggaatcaggtgcctttaggtggacgtgacaggctgttaccgcctgcaggaggcgctgaggtcctgagcaaagacagtggcagtggggaggcaggaaggcagctgtcaaggggacttagtcacttaaaacagaagcgaaggatgtagagacagaggatggctgggttctccagctaggctagccaagacagaatgtagaaggaacaggtttgggggaagtgggtttgtggttggacaggttgggttttgaggtacctgttaagatatccaggatcagagcccatcagacagctgctaaagcacactggagctaaatagggattcttctccctattttacagagaaactgaggctcagtgaagagagacatactatttgcccaatgtcacactgctgattagtaaaagaaattcagggcttgaagtctctttcactttcctttacataattctgcttccttccaaggaaggagctgagaggggcttcccacatcctgggaatcatcccttacttcaggcatgtcttggggccagagctgggaatcttgagcctagaaaaaagagagttaagggaccagaccaaatcagagccagaggctgtggtttgaaggggttccactctgttggcaggatccggatcacctgtttgaaaccatctcccaagccatgctgaatgctgtggaccgggatgcagtgtcaggcatgggagtcattgtccacatcatgtgagtatgggctgggagaagtctagaagctctgcagacaccctgcctctctcccttctccacgagcatacaccccattttcccagccccctggtcaggtgtgagataagaaaggtgcttttggcagtcctgggtgagcaaaagtccatgcctccctatggctggtaactggcagcctacccagcttcctctggcctcttgtcaggtgaggttctgtgaccccgtgctcacaagagacatttcttccttaacaatgtctccgaagtctcagggatccgtgttggggtgagccacaacaaagctactgcagatggattgaaattctaggtggctcgcatcctctctccagcccagatctgtgtgatgttctgagctctagagaccaatttccaagcctcagccaactccctaagtgccatcctccttgtccttttacttgtttggggccatcaccaggaacctgattggatagagtaggaggtatccttccaaccactttcctacattgcaggataagcatttggacccttttgggggatagcctgcttaattaccgtgaaatagtatttggccaggcgcgttggctcacgcctgtaatcccagcactttgggaggctgaggtgggcagatcacttgaggtcaggagtctgagaccagcctaacatggcgaaaccccgtttctactaaagatacataaaattagccagacgtggtgtcacgtgcctgtaatcccagctactagggaggctgaggaaggagaattgcttgaacctgggaggcagaggttgcagttagtcaagatcacgccattgcactccagcctgggcaacacagtgagactctgtctcaaaaaaaacaaaaacaaaaacaaaaaacccaaaaaacagaatttaccaccgacggtttttttttatgttctttggggtgaaacacaccacaccttctccttcctaagtggcttgttctctaggcttggaggagcttcttcccccttttttttttttttttttttttgagatggagtctcattctgtcgcccaggctggagtgcaatggcactatctcagctcactgcaaacctctgcctcctgggttcaagtgattctcctgcctcagcctcctgagtagctgggattacaggcacgtgccaccatgcccagctaatttttgtatttttagtagagacggggtttcaccatgttggtcaggctggtcttgaactcctgacctcgtgatccgcctgcctcaggcctcccaaagtgctgggattgcaagcatgagccaccgcgcccggccaagctccttcccttcttttgagagctgtgaagtctggccctgaatcattttctgggaaagcctccctgaggtggttccacctgtggaaagtcggcccaggtctctgttcctatccctccttcctcaccacaggcggaggagatgagctagcaggaatgaactagagcaggatagttacacctagaggcagcgggcagctatttgttctgctcccttgccgcagggcttgagggcttggtgctgagggccaggagagctagtcacagtcacggtccagatgggtagagatgttttcttgtgattttctccctctgcagcgagaaggacaaaatcaccaccaggacactgaaggcccgaatggactaaccctgttcccagagcccacttttttttctttttttgaaataaaatagcctgtctttcactcctgcttttgtctttgatgctttcctgcagatctctgccctagctgggcagctacagccagccactcaagtgtgtgtggcctggccctcggcttgctttctggctcgtgctctactccatcagtgcgtgccagtggggacaatccacatgtcacttgctgcatgctccctgtgtgctaggccccacacaagtgctttacacgatctagaatttattcatcataatgactcaaggtagttgagattatccttgtttggagaagaaggacagttaaataacttacccaagtctactttaataagtgataaagccaggacataaactcatgttccattgatgccagagcttagaatccttttcactcaaactctacgggaaaacccttacatcttttattgcttcaggtagaaatttggtcaagtacccataagtagtctagattagtgtttcttaacctggccagctcattagtcacctgtggaattcctaaaacacataccttgatcccaccccttgagattccaattggccttttaggggcctgggtacctgtcttttccagaattccccaagtgattccagcttgcaatctgcagtacatagatggcctaataagcaagtagaaagtttgcatagcagagtggttcccaaacgttagcccccatcacaatcacctggagggctcattaaaagtttgattcagtagatctgggttggaacctgagaatttacatttctgactcccaggtgctaatgacactgctggtccaagaccacactttgagaactactgggttttaagctaaatgcccagatgcagtagatgaggtgcacagaggtgacatgttcaaagttatgtcaggtgagtggctcctagccagagttcgttctacacagctggaggcgggggggcggggggggggttgtccattcttccatgtgcatggtagtaacagctaacaggcagattggctctggtgctgtggtgttttgtttgttttttccttaagagtctcattgttgctagggctggagtgctgtggtgcaatcatggctaactgcagcctcaacctcccaagctcaagtgatcctcctgcctcagcctcctgagtagctgggactacagacatgtgccatcacatccagctaattcttgttttgtagagacggggtctcactatgttacccagaccggtactgaacttctgggctcaagtgatcctcctgccttggcctccccaagtactgggcgtgagccaccaaacccagccagtggtgctgtgcttttaaccactgtttattaattgcatctgaaagcgggatgtcattgaccatattctttctccaaactcaagccatacattgatttagccgaagctgcctctaaagctaggaccaaaactttttaattctgggaagaaaaaaaaaaggttcatttcccaaggactcacacataacagatgtacacaaagctttttgagttttatttttttcctcaggttggagattcatcgtaacatgcatgcattttcaaacagtaacagggtctcaaactttttaaagcagacgttagacaagcacaggggattgaaaattcccatttaaaaaatggaaactgcagtgggatatggagaagtcacacacttggtggggtggtggtttgtcctgcttccccaaaaggtggatatgaacttaattcacattttttaatttcaatgatctgacctgatgctgggatgtgccgagcagtactgccccctcccccaagggtgttggctcccaccgcctctcacagtggctctgcgcaagggcaagaggctcctgtggaaacttctgccctgggatactggcacaagctgccaagggacagctgagtctccttttccccatggggcactcttcataagtggcacattctagaggagggagagggccacggtcactgacccctgcagatggctggtagattggggaacagttgtctgaatgggttttccctttcaggacctcctgcccgcatgactgccaggaagagatgaggctcctagacttggggggccacaggtttaaggccagagctctgagtgttgtttaaacgcactgtcccttctagcccccaacacctgagtaactcacatgctggggtgctgcagttttctctcccaccctgaattggtaaaaagacaactggggggtaggactggctactgcaaaaagtcctgggtctttggtccacctccccaaggtatgccctggcagaccatgaagacaggaaaggcagggcaggagtgtagcctcacgccctgagcgctaccagcaggcctgtttgaggccaaaagcacaggcaagagaaagagtcaagtagggagaggggataaagagctgcctgtggtgggaacttaagagactgccactgagaacagccacaggggccactcgtggcgcctgccacagaccagcaacccctgagctaaagaaggagaggtggagcactgcttcagtctgcgcccctcagctgtggcttcccggcatgccctgtgaccccaagccgcagggtacaggaaagaagtttgtgctgggggactcaaagacccagaggttaattaacaggaaccagggccaggggccttcatctagaggtcagtggagtctccagggcactcatcactgtggctgggagactacagtgtctcggctgcggacttgtggaagaagagggggaaggatgggagaaggggtgactggatgccagccaggaatcctggccttagccctatcctggcctcgcctaatcagccatgtcgttattcttacacctttcttcttgggagacccaacattattctgagatgccatgagactgtttagcttttcttcatggccccagggagtgaggctgagggcagtcacttcccctccaatgccctcgactgcccagtaaaagaatggcgggacccaaggaggaaagagtgggggcagacaacgcttgggggatcagtccactttctctacattcaaactgcagaccaaatagaataccatgacaaaaagaagagaaaggaaacttgtataaaccaagataaatagcttttaaacatttgaatgccaaaaattgggggccaaactcaaggttttgaagatagcacagcgaatgacctttaaaaaaaaaaattgaaaatccaccaaaccacagctcaaaatgttatgacccagtcaacaatactgtcagaaaaacaaaaagcatttgaaacagaatgctacctctcaaaatgtaaacaatatacaaaacacacaaacatacacacacacacacaaactcaatgttaaacaagttagatacctggtagtcgtctttaaccagtaagaatgtgttacactttccatacacattatggcaacatgatcagcagaccaaatgcagagaagccggtaggaacccgaggccacggaggctgctggaagacagctttccaagcttcagagatgctgcgcctgacgaggagcagatccaaacttccattcttcattatgacgtggggaaatcaagtccaaacattattcctacataatccctttcccaagtcaaatttgttttctccatgagccagttggtttcaagttccctaagtcatgtagtggtcttgcggcagttgttcagacctacctatggccccttcctggggccaaggcagtggtttgacccccatctgcctcttccagaaggtttcccatccaatccagcagccccagtgaagtccaagaatgccgtctccattctttcctgacctatatgctgtgagtcaggcacagagacagtgctggttcctgcttcggaagctgggcttggccaggtttggagggagccacaggaaaccaatctattcattcaaaatggtttcacaagcgatcttcacatctttggggttatctacaagtctgaccatatctcatcccaaatccccagttcctggttgagggggtgagaagatgcaggaatgtacctcccccaatgcagaacaacagagctgtttctctcctggccagagcagcctgtggctcagttctgagggcctgggtggcaggctccgaaggcaggtggaacacctgcaggaagccactccttccaaaaaagcctgtgggctgcagatctgctaaaagtctagagcggggcaacaaggaaaaacagccccaaggctgaggccaggtcaaaacccacatcaagcctccaaactggatttcctggatcacatcctcatgtaactaggaagccacctcacgtttggacaccacactctaagatgggggcaccttgctggctgtaactctccaggcacagggagacagatctcctacaaggtcatcccggagcttaacgaggtgtctctgctaaaaagcactccaggcgcttggagatctgcccagagctaagagttcggctagaagtaagagtgcctgggaggaggtcagaaggaagaaggaaatagatcgagggcacagggcctcatttgatacatcagtttctgaagttttcccaaagggaaataaccatttaaacatgagggtcctgataaatccaaaggtactctagttcctcttgacctagtgggaggcaggctttacagagaggacttctgaactccaggggctaagacagcctggggcttgggtgatcatcacagggttctctgagaaccaggtgtccaagagcccagccgctttcctgcccctcaccatcccatgaggatgaacttattcccctctgagatctctgattctgatctgagatctctggtgttgacctggtgtattccagacaggatggaggaataatgcaacagttttcacttgaatccaagggaaaggtggaggaagttgtgcacaatactccataaattacaaagttaatccagacaagagcaaatgcagcagggcgaggtgtctgacctctccaatctggcatccatagcacttggttctggaaggacccttgtgctgggtctaccgggtatctctttaattgaagggaactgagagctcagcaaagatggggagggtgggtaggctgatgaaatatgattataaatagcaaacctggagcaatgaaatttcagaaacaaaacccaaataaacccacgaagtcatctctagccccaaggtatcttaaaaggttacaaggtaccaaaaagggaacccctttttaacctgggtgtcaaatggggagaaaaaatcaagggtaagcagaaggtggggttacatcctgtgagcaggtgcacacacagcacatccccctcctcttcagctaaagtctctttcggtgtcacaggctgcagtctcattgctaaagccctcccaaacccgactctgctcccaccctcccatctagcccaaatacacccttctccctaactcccgatccccgaccccatatccagctctctggctctggctgaaggtagaagagaactacgtcaggatgttggacataaactcgttgaagcgtttggagtactgctcagggttcacagtcgagatctcggcccctgcctgtaatacacaagaggctgattcaggttgagttcctgtgccccaatcaggaggctgcacatggggggagccagggtattcagaagcctcttactcagtatcagagctgaataccacccccaaccccaccaagactgagcagaccacctcaggaagtggcatacaagtcctgaactgtcctggccccactcctgtgatttataaccccaggcctgcaccgaagtagaagaaaggcagtggggaggtggcaacgcggctctggatctctgtgggggccactacatggagaacagggcttcaggcccacagggaaacaggcctgtggggagcagtatgggcatggaaacaaagctattactcgcccttcaacaagatgcacaacaggcccagcaggccctggggaaagacactggcaggcttggccccgagggctggagaactgggggataaacaaattgggcccagcctggcagggagcaggtgggtgaaggcagggaacatggcaaggcaggcaggctgctcttccagtctgctctcctgggaagaaggagacaggagtgtgttccttggagcaggaggcctgagactgccctccctggggtctgagggtaagcacagatgcaccgacccagctgggccctggatgaagatggagaggactcaccccgtgtttcaccgttttggcagcatgtgcagctttcttctttgtatcgtatggcgtgaggatatcaatgatggccatgaaatacacctccttcttgggggaacctggagggacaaggagagcagggaagaaggaagagggggcaggagaagggcagacagcagctgggcactgctacaacccccagacacaaggctcagctccatccttatcatgttggggctgagaaaaggaccagtggagtcctttccagctgtcatagctcttatcttattggatcttcacagtcactctgtggggctgacaggacagtatgaataaagtttggttcatctcatgaaccagagcagaaccactcttcagtcagccaggacaagcagggaagtataggaaagcctggcagaggaggagccccaggttcaggtggtgaccctggatgggaatctggaggcagaaagaggtcaaaggcagcaatgaatgaggtggaggtccagatgcccctagaaggatctaaacaatgagctgagggggtaggatgagggcagggctgtgcagagcaggcgcaggctctgacttactttcatggcttttcatggcatagacgtcaacagaggggtcgaattccccaggaccaaagaaccgaggaaagctgaggaggttgccagggctgtccggaggtgtgccataggagcagagtaggttgccacccaccccatcattctcacactcctcgtcctctgcccgctcctccacctccatctcctcctgctctgcccggtccacgtcgtggatgcccaccagcaggctgtagtccatgatcttcagctgtgccaagaactaggaagggcaaggatggaaagatggaaggaagaagaggttacacaggacatcccagtgacatccagaaaggggggaaaggcattcctttcaactcaattctacaaacagttttgaaattcaacagagagtaaggcatcagagcacccgccctcgcgagctctctctaatggggaagacagtcattcagcaggggaaaggcaggaggtcgaggctgcagtgagctgtgatcacaccactgcactctagctgggtaacagagggagatggtctcaaaaaaaaaaaaaaaaaaaaaaaaagcaaggagctgtgggagtttacagtgaggggtgagcaagaccctccctgaagaaaggagttgaggccaaggatgaagaggagtcagtgaggcaagtactgcaggttaaagatagaacgagcactgcaggaagagggaacagcccatgacggtttgggatcaagagaggccatggtggctgggcacggtggctcatgcctgtaatcccagaactttgggaggccaattaaggaggatcacttgaggccaggagtttgagaccagcctcagcaacgtgatgagaccccatctctacaaaaaaatttaaaaattggctgggcgtggcagtgcacacctgtagtcctacctacttgggaggctcaagtgggaggatcgcgtgagcccaggaatttgaggctgcagtaagctatgacggcactattgcactcaagcctggggaacagagtgagaccctgtctcttgttttaaaaaaagaggccatggccaagtttgaggaaagaaataatgaaatgatatactatggaagaggatggagcgatggatatgacacaacaatatatttcagatcaaaatttcaacccattatgagtcctaaacccaatgtagtgggctggaactaggatttctttaaattaaatgcagtagtccacccttatccacaatggtttcagttacctgtggtcaactacagtccaaaaatattaaatggaaaattccagaaataattcataagtttttaaatagtgtaccattccgagtagcatgataaaatcttgctatgtcccattcagtgctgcccaggatgcagattatccctttgtgcagtatatccacactgtatgcactaacgtcccattagtctttcagtagctgtccgtagctgtcttggttatcagttcactatagttgtatcacagtgcttgtattcaagtaacccatatttgacttcattatgactccacagagcaagagtagtgatgttggcaattcagatatgccaaagagaagccataaagtgctttctttttttgagacagagtcttgctctgtcaccaggctagagtgcactggtgcaatctcggctcactgcaacctccacctcccaggttcaagtgattctcctgtctcagcctcccaagtagctgggacttcaggcatgcaccaccacactcagctaatttttgtatttttagtagagacagtttcatcatgttggccaggctggtctcgagctcctgacctcaagtgatccacctgcctcagcctcccaaaagtgctgggattacaggtgtgagccactgcacctggccagctttaagtgaaaaggtgaaagctcttgacttacaaagaaaataaattgcatgctgaggttgctaagatctcctgtaagaacaaatcttctatccgtgaaattgtgaagaaggaaaaaaaattcacgcatagtatatacagggttcagtactatctgtggcttcaggcgtccactggggatcttggaacatgtcccctgctgataaggggggactactgtataataaaatagaatagaaaatatcagaatacatgacagaaaataagggtagacagtgtttcagttgtgtgtatccattgggttgcaaggtaaaatatacttctaactggcctcagagacaaagtctgaaaaaactatgtcatcgacttttcagcccaggtaaaaatagaaaaaaaaggaaaagggaacacaaaaccatacaagaatggcagccagaaccaaccaatattctcaacccattccctgaaggtcaaaagaggctgtgtggtgctgggggaaagtcctcccctagcatcatgtgactccccttgccaagccttagttttctcatctgtataatgggtgctgtgagcagggtggtggttcaagtcttttatctaggatttcaagacaaagtatggaatgatacaggatggaaatggccagctagcattccagtttagctaataatgaggcaagagtgcagtcaccatcatacagtggtcactaggagactgttagactgaccaccatgttaggtcctaacagagaactaggaggagaatcatcatggaagcagagcagctctatgcacgagcccagaacacaactaaggacaaggagccctaaagatgggagcccagcaggatctccttggaagaggaagggagggagggatgccactctgagcacttccagacaaagccttctcaaggcccagggagaaggggctagggtcccaggaaaaagaaggtccatgcaccatgccctccacccacctgagaacatttataaagcaacatgcattgaaaacaaatgcactgagtaaactgcattaaattcttctcagaaccacagtagggggagagggtagaaaagggagaaggacaaagactcaggacaaataatgtcagatgatgaaaggcagaataaggaaagaacatagttgggggtgactaaggaaacgcttcctagcaaaacgaagtttatgacacccatgttcacagtagcattattcccaacagctacaaggtggaagcaacctaagtgtgatggctaattgtatatgccagctggactgggcctgagtgcccagacacttggtcaagcattattctgggtgtgtctgtgagggtttctgggtgaaatgagcattgaactggtggactgagtaaagcagatggccctccccagtgtggatgggcatcatccaatcagcagaaggcctgaagagaagaaaaagggtgaccctccggtgaggaagagggaactccttctgcctggtggcctgatggcctgtagaataaaaccacaccaccagctctcctgggcctccggcttgctgactgcagatctcgttggtatccataatcccatgaaacaattccttaaaataaatctcttagggccgggcgtggtggctcacacctgtaatcccagcactttgggaggccgaggcaggcagatcatgaggtcaggagatcaagaccatcctggctaacatggtgaaaccccatctctactaaaaatacaaaaaaaactagctgggcatggtggtgggcgcctgtagtcccagctactcgggaggctgaggcaggagaatggcgtgaacccgggaggcggagcttgcagtgagccaagatcgcgccactgtactccagcctgggtgacagagcaagactctgtctcaaaaaaaataaataaataaaataaaaaataaatatcttggtataaagagatttacaaaacatcctataggttttgtttctctggagaaccccaactgatataacaagtgtccattaactgatgaataaacaaaatgtaatacatccatacaatggaatattaatcagtttttgtgtgtgtgtgtgtgtgtgtgtttttgagatgaggtctcgttctgtcgcccaggctggagtgcagtggcacgatctcggctccctgcaagctccgtctcccgggttcatgccattctcctgcctcagcctcccgagtagctgggactacaggcgcccaccaccacacctggctaattttgtttttgcatttttagtagagacggggtttcaccgtgttagccaggatggtctcgatctcctgacctcgtgatccgcctgccttggcctcccaaagtgctgggattacaagcgtgagccaccgcgcctagcttttgttttgttttttaaagagatggggtcttaccctctagttcaggctgatgcacagtggcatgatcatagctcaccacaaccgtgaactcctaggcacaagggatcctcccacccagcctcctgaatagctaggactacaggcacatgtcaccacacccagctagtttttaattttttgtagagacaggatctcagtaaattgcccaggtctccaacttctggcctcaagcagtccttctgcctcagcctcctgagctgctgggattacaggtgttagccaccatgctcagccttattcagctttaaaaagaaagaaattctggccaggtgtggtggctcacgcctgtaatcccagcactctgggaggccgaggcaggcagatcacgaggtcaggagatcgaaaccatcctggtcaacatggtgaaaccccgtctccactaaaaaaatacaaaaattagctgggcgtggcagcacgcgcctgtagtcccagctacttgggaggctgaagcaggagaatcgcttgaacccgggaggcggaggttgcagtgagccgagatcgcaccactgcactccagcctggcaacagagcgagactctgtctcaaaacaaataaataaataataaaaagaaaaaaattctgacacatgatacagtatggatgaaccctgaagacattatgctaagcaaaataacagagtcacaaaaggacaactgctgtttgcttcctttttttttttttattttttgagatggagtttcattcataacatgttgcccaagctggagggtcaccgcaacctccgcctcctgggttcaagcgattctcttgcctcagcctcccaagtagctgggattacaggcgtgcaccaccatgcccggctaattttgtattttcagtagagactgggtttctccatgttggtcaggctggtctcaaactcctgacctcagaagatccgcccacctcagcctcccaaagtgctgggattacaggcatgagccacctcgcttggctgtttgcttcctcttatgtgaagttcctagagtagtcaacttcataggggcagaaaattgaacactgattgccaggggttagggagggggaattgggaattagtatttaatgggtatagagtttcagctgggaaagataaaagttcagagatgaatggtagtgctggttgcataacaatgtgaatatacttaatgccactcaactatatatcaaaatggttaaggtgcgtgcctatagtcccagctacttgggaggctgaggtaggagaatcacttgaacccaggaggcggaggttgcagtgagccgagatcgtgccactgcactgcactccagcctggggacagaacgagaatctcctaaaaaaaaacaaaacaaacaaacaaacaaaaaaaacacctattattatatgtattttaccacaattaaaaaaaattttttttcccaagtttgtttgtaggatttggttttaacgagcagcctctcaatttattaaaagagaaggagacgctgagttatcaagtggtccagataacattttcactatttagcacctgtcctccccagattacaaacagaagtttgctaggtaagtggagaatcagagccagagccagagaagaacctgattagtggatttttgttttttgagacagggtcttgctctgtcacccaggctggagcacagtggcatgatcacagctcatgttgccttgatctgccaggctccagtgatcctcctgcctcacccttccaaggtgctgggattacaagagtaagccaccatgcttagccaactttttcggtttttgttttgagacaatgtcttgctctgttgcccaggctggagtgtagtggtgagaccacagctcactgcagcctcatctcccgggctcaaacaatcctttcgcctcagcctcccaagtagctgggactacaggtgtgtgcccctacgcctggctaaattttttaatttttagtagagatgaggtcttgctatgttgcctaggctggtattgaactgctgagctcaagcgatcctcccacctcagcctcccaaaatgttggggttacaggaccttaatagctgggttcctacagctctgatggccagatgccctctccattgtagggacaacagcagaagggagtttgaaaaaggtgttggaatgaattagtgaaaagggaaaagcattctaaactaaattacaaaggtcctactggcgccaactatgctccgtcaggtggaatgatcatttgcacttgctttaggtgcccataagtgcccacgctgctcaaatcaccacccttttgtccatactcctggaaagtactgaattccattcttcttaaggtttaagaggcgcctactctaggtacagaaggagccttgcaggtgaaaatgaaggttagtaagtacctcaacgtcccgcttcagtttctccaggaagttctttttactctcctctcccacatgcagcttctgcccttcattgaggaagtcattgtctttgaatgttggcaagtccttggcctaggagagcaacagcagttaggctgggtaagcctgattaattcaccccagggacacccaactgttctgccgggagcaactatacagaaaggggaaggaggggttgtcagtgtaccgaccctcaacctgctaaatcagcagtgcaggagcctctagtcccaggctttgggtgggcagggagggcaaacacatgaaagatgaggaatgactaaaggattctttcctgttgagcctggaccagctcagggctcaggcagccactgactgactcaggctggactatgagatagaaatgtctgccatcccagcaggactatgaagaacgtagtgagggcagaggtaaaagaccagagaccaaggtctaggcctagcacaaggacagacaggtgattcatgacacacggcatttcatgttgacagacggcatgtctgggagctgggctaggggctggggtgggcgagggacaggatggccgacaggagttgtttctgactccaagcgacccttccattcctgctcagcaccagcataccttctccttgtcgctcgcttctctggcaaccgtagaaccctgaaaggataagagccatcaggggaagtcaagctgaggcaaagtcgactgcatgagcaaacatgggagagccagcaggtgaactcaagtaggcttgttagagtcctagaggggccaggaggcagcaccttgttcatttactgtgtcaagcccacttatagagctctatgtgcaagacactttttaggtgctcagcaaacaggactgcactggagaagctcagtccctgcccttgagctactttccttctaacaggggagacagatattcagcagtggttccacaagtcattagttcattcactaccacggtgctcagtggtacagggaggagcaggacactctgaaagcacataccacacgggcccggcctggggagggacagtggccagggcctacctacttcctggaagtagtatttgggctgagctcagaagggtaaggaggaagcaattaggtgggggaaggagtgggtggagagagagaaggagactattccagacagcagatgtgaaatcctgggaagaggagcacaggcactgcaggaacacagaggaaaccagcccagttgcagcacagagggaagggatggcggcataaggtgacagaagtcagaagccaggttcaagaacacggagcaccctagttcacagccacaagtgtgtccttctcagagtctagagatgcacttgtgctggcagtccatgggggcctgatggatgctaaagtgcatgcgtcagcacggcctccctcactgtgcacattccacagacaggaacatcaactgctgcataaatatggcacatttagggcttaaataatctcctgttactgtcacctggacttcaaactgcctttggtccacaagaatcaggcatatccactccagagttccctgtccatgccaacacataggctccagcttcccaattacatggaagttggagtagtggccccttcggggctcagatagaggggaggcacagctccggcaaacacagagccctttaccttgaggtcatacttgcgatgcacagtgagccgatggctgaacacgttcctggtaaccaccatgtaggtttccacaccatccacggtcaggcggtacatgcccaggaactgtggcaaaagcgtgttgccatgacactccactataaactagaatggaaaggaagaagagagaggactaaggaacaggcagtgccagggatggatggggctcaccccagactaaaatgctccctggctccctgggattctaacctctagaccagtagttctccagctgggttctatgaagtaataggggtttctcaggcttaaaatgggcaacagccacctccagcctcctgttggcatggcagagggagaggcaagctgagcaggtggctcagagcccctgtgggttcatattattagtatctcacctaagattttgtttaaagtaggattctaccacaggaaaatccctgatccacaccttgcatctcttctgccagcctgatatgggaatgccgcagggaagagacaggatgcagaggcaggccagggatccagccatctgggagaagagaacagctccatatccaaagctcttatccatgccatgccccagggtttctgccataactcctgaaagaccagaagctcccttcggcccttctcaggtgccccagaaatgaagacccaagtaggctgaggacagacacacagatggtgccacggggctccctgccttcctcatggacaggttccagatgagtggagagatgggacgggaaaagaaacaagcctgccgagctgagggggcctctttcagaagaaacggggcggatgccagtgcgtgaacactttccaactgggagtcagtcagcgatgagccttcatggctccttttttcttttttaaagtaggcatttcagctcacagaaatacggttgcaggagagtcccactgcttggtgatcagaagcagctgccattaccagagaggaccaacccctccctaagaagctcccccagggctctcttctccctcttccaacccatcctctgcagcccaggcttgggactcaccatacctggtggtatttctttaagatgttgtgcatctccgccacgtcctcgctggacacagtcttgatgacaaagcgccggtcgtaggtggtgaggaaacgcgtgccacaccgaccctggctgtcactgttgatgggggcgctgcgcgtcactgaattctgataatcgagacaaaagaaggctgggcttggcaggggaacagaattctgactttcgctgagtcttccctcaggggctggactgcttgaaagccaacaacactgagatagagggactcccagatgggagtttaccctccccttttctcacagggtgttcacatccctccctaagtcttcctccaaagtgacaagaattgttccttaccacctgctcttcatcccagtctaggatgggaagaggactgactgtgaaagtttccatcctgatcccagatagctatcctaccaactaaaattctgcctctgatggagggggctgagtctaatctggactctcacacgcactatgaccttgggtgagccatttaacttctctacccctgcatttcctcatcaggaacacaaagatgcagactgagctgattctcccagtctcttgggggtagcaaagatgaagcttagaaaatactgtcttcaaggggtctagcacaaagaagcaatgcccattcgtctcttgtccctggatctaccctaatgctgaaaaaccttccccaaagcaggaagctgatcctcatctctgagcctgacacctttccccttgcctcaacctcctgcttgtctatgcaaggctgggaggcagttttggggagctttcctggctgtatccctgctcctcctcaaggtcctactcccattaggatcagagagcagtagaagccttaagagggagggtgtgggaaggcgtgagtcaaccaaagggatatgttcaccaagcagatgccaagggacctctgggaagcaacggtgaggggagatcccaagtgtccctgttcccaagaaaacatacatggggatcatgtcacagaaatgtctcctctccaagatgtttccccatctcttaatgaggatcctgttattatttttgtagagacagggtctcactctgtcacccaagctggagtacagtggtgagatctcagctcactgcagcctctacctcctgggctcaagtgatcctcccgcctcagcctaccaagtagctgggactacaggtgtgcaccaacatgcccggcttatttttgtagcttttgtagagatgtagtttcgccatgtttcccaggctggtctagaactcctgagatcaagcaatcctcctgcctcagcctcccaaagtgctaggattacaggtgtgagctactgtgcccagcctttttttttttttttaaagatggtgttttgctgtcacccaaactggagtatagtggtgcgatcatagctcactgcagccttgaactcctgggctcaagggatcctctcgcctcggcctcctgagcagctgggactataggcatgcaccaccatgcccggctgatcaggatcctactctttactttcccctaatacctcctcagaaaaccctggtggagaagtgaggaccaccttcatggggaaaactaaagtcagaggtggtaagcagctctgggagttcctcagcaaaggtgctaaagtagcaccccaaaaaacaggctgttcccgttacagaaaggttgagtagactctgtgactgagcgcctcttcctcccagcctggcctctctaccataagacttacaggctgcaagcctagttgggaggtagaggcagcatcccctgactctctaagtggctggtagtccaagaatatagggtcccctccctgagcaccatcctccctgccctcatttcagtcttgagcacgggcatgcgcccacaaggctactaggggcaaaatgcagacactgagaggatgtggttagacagcccaggggagggaaaggaacccctcacttgcaacccctcaccaaggaacaatggagggaatctgtctgagcaacttggggttgcaatagtggcaagaagtttccagaaaacctccagccccagtcaagtcatgattgagttcagggttcaatcctaacagcaggctggaggaacctcccagtacctcttaggtgtaggcactcctgggcattcaagcccaaggcatctcctcctcctctcacaaaccctcaccctcttcttcgagatacttttctttgcatgcaagccctccagagaggaggagagaggggaggagactctaacccaaggccccttctgctgctgtgaactactctatcaaaggggtggggtgggaggaactacagtgttagaaaagatttgggcatccattctaggtttcactgtgctatacactaggtttcactgtgctatggggaaaagttttctccacagatgaatgaaagtcagctatatttcaggccaggtgcggtggctcacgcctgtaatcccagcactttgggaggccgaggcaggcagatcacaaggtcaggagatcgaaaccatcctggtcaacatggtgaaaccccgtctctactaaaaaaaaagaaatgcaaaaaattagccgggtgtggtggtgggcgcctgtaatcccagctactcgggaggctgaggcaggagaatcacttgaacctgggaggcagaggttgcagtgagccgagatcgcgccattgcactccagcctggatgacaggagtgaaactccatctcaaaaaaaaaaaaaaaaaaaaaaagtcagctatatttcttacagctgtaaaggtgaagtggaaaattcgcccaccttcaccacaaggctgtctgccaaggaagaagatccaaggagatgtgctaagaggagaagtgacagaaaccatggactgagtcagattctaatgtccctgacactgggattgattcctcccaacaggccaatggcctctacaacactgtcacgccctgaagggggcagttgccctggcagaccaactccccactcccaccaccaggatagggcacaagtttaggaggtgacactcatacctggcaagaggttacactacccttgaagtcttccttttctaatctatttcatctgctttaagaggcctcatctctcgctaacaacaattctctctctcttttttttttttgagactgagtttcactcttgtcgcccaggctggagtgcaatggcgtgatctcagctcgctgcaacctccgcctcccaggttcaagcgattctcctgcctcagcctccagagtaggtgggactataggcgcacatcaccatgcccatctaattttgtattttttagtagagacagggtttcaccatgttggccaggctggtctcaaactcctgacctcaggtgacctacctgccttggcctcccaaagtgctgggattacaggcataagccaccatgccccacccagttctctttgaagtcaaactacgaatgagaagggttcttcagcctagactgggaatgtcagactaaaataaaggtgcttccgcagacccctctccctcctgctgccctccctctgagggagaggaacctgagtgtgtgcagcatcctcagaagcatttctaaggccctcgccctgcaaggggcccccagtgctgggggagagaccgcctgggctggagcaaggcatgacagggagacacagcacaaaaacagccaacacgttttgattctctacctgtcctgtggcttcctgaccccattccattccctaatccactgatgttgccaggagcctccatacctggtaatcctgatcatcaattccaaacctctcccgaaggtttcggaacaccatggggcaatactccttaaacttaaagcggctgggcaggttctccctagggaaaagcagagatatgtctttgtgaactgccccttgctcatcttaattctattattattattattttttgtaatagagacagagtcttgctatgttgcccagactggtcttgaactcctggcttcaagcgatcctcccacctcagcctcccaaagtgctgggattacgggcatgagccaccacacccagcctcatctatattctgacttcagaactcttcaaagtgtggtccacagattgcctggatctgaacatctgccatacttaacatgtaggtttctaggctcttaggaattctggagttgagtcgaaaaacaaacactccaggtgattctgagcatgtaaaagtttaaaaactttacatcttgtattcactttgtaaaagtaatccagcagtataactggtatttgtgcgattttctatgtgtgtgctgcccttcaataaaacatacattaaagaaaaaaactctcacccgctgggccataagcctgagtgcaggctccacctcacaagcactgtgcttactacagtgggaacctgcatgtgaacatctgctgtgaggtgaaatcagcctgaatgctacaaggaaaaacctctctcatcagagggcccctctcctctggccatattcctgtggaagcatcctgaagatggtcacttacaggaagccctgccctgggcttccactgggacgtaggaaaagagtgcctgagttaaagaggtcttcagtcaactgagtgggaccacagagccctgtctgctggctgctggcaccaatctccaccctcccactccctcatcaatacagactcccaggaggaaagagaatcaccttgaaatgatgactcttaccaatcctccatctttacaacagctatcctgtttagggaccccctttcagaaatatgtcccagtgactactccaggatgacaggctttaaggaaatcaaaaggaatgtcttcttggaaaggaagtggcctatctgccttatctaccccgtcttctagtaaacagtgctagaatctaataaatagcacatacagggctgggcaaggtggctcctgcctgtaatcccagtactttgggaggccgaggcaggtggatcaccctgactgaggtcaggagttcgagaccagcctggccaacatggtgaaaccccatctctactaaaaatacaaaaaaattagccgggcgtggtggtgggtgcctgtaatcccagctactcaggagcctgaggcagcagaatcacttgaacccgggaggcagaggttgcagtgagccaagatcgtgccactgcactacagcctgggcaacaagagtgaaactgtctcaaaacaacaccaataacaacaacaaaaacacatacacagttgttggaaggacaaaaggaataaagatagaagaaaataagagattgggttctctgctttaggccaagatatcaaggaggtagcacctcaccagaggccatggaccctgaagggggtagtggtgcaatgcccacttcgagaacccggacctctgagtcagaacaaccttctttcttctgggtcagaacaaccttctttctggtctctgagttgagggctgcctctccctccttaggtggccacttaacaggtggcagctatggagacagacggcttctagaacaagatggtattacttactatggcagagggaggtcactaagggatgttctcaagtcaatcttctcctctggactaacagtctgggaatggtggggtgacagaacccagctagtgaggtggtggggactgtgagacaatgaagaatagaaccaggattcacatgcagaaaggagaaagtgtaagcagcaaatagtcctggggtggtccacagagggatggaaaatccaggccccaaagggcttaaagcaggcccaaaattgtgccaggtgtggcggccgctagtgtttccaacaatatctgagacaaccttcagacactggtgctaatccaagaagcgacagcagacaaaaatgggaagtgctactctggatagtgccctcgagccccatgctctgcctgttgctcatacaccagccagacagaaaagagcctggcggcatcccagaccaagaacatgcctggcaacctcctgcctcagactaagaccaagatggggccactgctacagcctcacactgaatacctcagctccagagcagctcactgccacctgagctggctctagatgaatcaccctgggcccagccacatgccccaagggccaccggaggtaggctgataatagagtgagacgacaatactaggatgagaggcacataacgaatgcattttcctagccagtttgtccgctctgagatccaggtgctgctgtcacaccctgccaggtgctgccttggctcccaccatgcatgaggcttcagaagcctctgacttgagggaaaggactgcccacaaaacctgagtccactcagtagacaacttacttattgaagagatgattgtccaccttgatcttgctgtaggctttgaagtcatctggcattagcatgacaggaacaggaacattgctcagctcattgatctgaaaagcaaggagaacgtaaggctctcagccaggaggccacctgcctcagagacactaagctacaatgtggatgccacaatcttgctaaaagcatgtccaagtttccctctctgtctttttttgtttttttgagacagggtctcattctgtcacccaggctgaagtgcagtggcatgacaatggctcattgcagccttcacctcctggactcaagcaatctgcccacaccagccccccaagtagctgggactacaggtgcacatcaccacgcccagctaatttttttgtattgtgtagagacaagttctcactgtcctgagctcaagcaatcctccagacttggcctcccaaattattgggattacaggtgtcagccaccacacctggcccctccctgcctttatttctgttcttctcttcaagtaagttcccaaccttgtcctattttacctattgaaactctccacctgataagggccagctcaaaaggcacctcctccatgaagttttccaagattctctagaccatcaataccctttcccatcttggaattcctgaagttttctttgtatctgtcttctggccatctcacagtctctcatattgtagttaatgcctataaacctcacctgctagagttaagctaggcaatactatattatttatctttctttttctttttctttgagacggagttttgctgttgttgcccaggctggagtgcaatggcacgatctcagctcactgcaatctccacctcctggcctcaagtgattctcctgcctcagcctcccaagtagctgggattacaggcatgcaccaccatgtccagctaatttttttttgtatttttagtagagacagggtttcatcatgttggtcaggctggtcttgaactcttgacctcaggtgatccacctgccctggcctcccaaagtgttgggattacaggcgtgagccaccacgctcggctttaattatatttctaagcaaagagcatcctactaatctttggggcaccacagtgcttggcaccattactagcatatatggcagatactcaataaatatttgtcatatgcaataataaatgatcaatagataaatgtctcccaacctaagtgggtattaattaaggcctttgaatatcttcatacaaattgtgggtcactcaagaaattagctcaaggaagaaaaaaagctggatgggtttgtgtggacttgtaactcatatccccaaggtaatagattaaatttatttatttatttatttatttatttatttatttatttatagacagagtctcactgtgtcgcccagactggagtacagtggtgcgatctcagctcactgcaagctccgcctcctgggttcacaccattctcctgcctcagcctccagagtagctgggactacaggtgcccgacaccacacctggctaattttttgtatttttagtagagacagggtttcaccatgttagcctggatagtctcgatctcctgagctcgtgatccacccacctcggcctcccaaagtgctgggattacaggcatgagccactgcgcccggctgtaatagattaaagtgagcagtagtaaatgtctggccactgccccacttggaccctcctgataaaagcagggccaggcctggcacagtggctcatgcctgtaatcccagtactttggaaggccaaggcaggaggatcacttgaggccaggagttctataccaccctgggcaacacagcaagaccctatctctaaaaaaaataattaaatgtgaagctgaggcaggcagatcacctgaggtaaggagttcaagaccagcctggccaatatggtgaaaccctatctctactaaaaatacaaaaaaattagctgggtgtggtggaagccacctgtaattccagctactcgggaggctgaggcaggagaatcgtttgaacccaggaggcataaggtatagtgggccgagatcgcgccactgcctgggcaacaagagtgagactctgtctcaaaaaaaaaaaaaaattaaacacattagccaggcatagtcgtgtacacctatcatcctagctactcaggaggctgaggtgggaggattgcttgaggccaggagtttgaggttacagtgagctgactgcaccactgcactgcactctagcctgggcaagagtgagatcttgtctcaaaaaagaaaataaaataaagcagggccagttcctgatgtcaagtcctgccatacactaaactaagggagatggggcaggatgccttgcctctactgcaaacaaaccttctgactttcatcccttcagggagctggatcctagacagagagctagctttccattggtgcagagatgagggcagatcctgcccttccccacctcgagtttagccagttagtggtctaattaaccacagatgtcctctcccatcacagcagagtatttgacatttgaccctcaacccagttgccactaatgcattcaggatttacagaggaaaccttagtcctgacttaatggactggggggagggggcacagccttgtgtctcccactttccttgcaaatcctgttatctcaatgaggccccaggtggcagtgaggggataacctagagtcattagaactcctccaggagcataaatgggggaaatggcatttaatttgctgctccttttatgttacaaaccttttttatttagaaatgtcagagaatggaggaagttcaagttaatgcagtaactgggctggggaaccatatcttcctagagttgggaaaaaacccaatttactcatggagaaatgaaggaagccataggaatgcacgtgctttgagagggatgctgggggcagggtagtttataagttggcagtggagcagacactaggtaaactgctggcaaaaactggcatagacacaagagtgtatcctgtataattccatttatatgaaattctacagcaggcatctataatgagagaaatgagatgagttgcctggccagggggcggggggtgctgagtgtaaagggacatgagaagtgtgattctacggtgacagaaatgttttatatgttgcttggggtgatggttacatgagcaaatacatttgctgaaattcatcaaattgtatacttaaaatacgcacacttaatatacataaattattcctcaataaagttgatttttaaattcccagcatcaagctctgtgatacccttcattggctaaaccctcccaatagccaaaaaaaaccccagaagagtcatgccagttcctattccagggggtgctcacaagagaatgtgactgtcaaatctgtgcctacagaggaaaccattccacttctttgtttttctgccaacagaaacaattcgtggtggctgtcccatttcctttttcctggcatatcaagcctggctccgagacttaaagggaaaacagagacaaagagttcagggctcggctgggcgcagtggctcacgcctataatcccaacactttgggaggcctaaggggacggatcacgaggtcagaagatcgagtcttgctctgttgcccaggctggagtgcagtggcagaatctccgctcactgcaacctctgcctcctgggttcaagcgattctcctgcctcagtctcctgagtagctgggattacaggcgcatgtcaccatgccctgctaatttttgtatttttagtaaagatggggtttcaccatgttggtcaggctggtctcgaattcctgacctcgtgatctgcctgcctcagcctcccaaaatgctgggattacagatgtgagctactgcacctggcccagcctaggaaatttttaactcagctaacattggtgaacaatccatatctcaactaggggagacttacccctcatttctactaggccacatgtagatgattcactgtagggattagccctattattattatttttttagttgtgtgaaattttatatcccagagagttctattccatttcaattgaactgttcctattgaaatatctgctacgtgcttcattctgttaggtaggtgtgtgggaggaggagaacacaaggggagaaagtgttgtacatgcaaaagaaacaggaggcttataatctcatcagggagatgaaaaaaaaccctgacaccctcaaagtcaaagcagtatgcaattaagtgagaatccagggatacagacatcaagaacagcagaggctcagagaaggatgaggctagcatggccagagggtcaggctcccagtcctcatacatcaggccagaaacaaggcacctaatgcctctcctggtattgcaccaagagcacttgacattaggagaatctacaagatcatgctacactcctgcttagaaatcttccatggctgctcctctcaacctcagggtaaagttttaactgcttagcctggcattcaaggcctttcctaatctggctcagactgccaatttttttttttttttttttttttttttgagatagagctttgctctggtttcccaggctggagtgcaatggcgtgctcaccgcaacttccgcctcccgggttcaagcaattctcctgcctcagcctcctgagtagctcggattataggcatgcaccaccatgcccggctaattttgtatttttagtagagatggggtttctccatgttggccaggctggtctcgaactcccgaccttaggagatccacctgcctcggcctcccaaagtgctaggattacaggcgtgagccaccgcgcccagccagactgccaaatttctattcaatttacttctactcagtgtattaagggccttactatatgctaggagctggggatacaaaaccaaaaagacatctgcagagctgggcgtagtggctcacgcctgtaattccagcactttgggaggccgaggcgggcggatcatgaggtcaggagatcaagaccatcctggctaacacagtgaaaccccgtctctactaaaaaaaaatacaaaaaaaaattaacggagcatgatggcgggcacctgtagtcccagctactcgggaggctgaggcaggagaatggcgtgaacccacaaggcggagcttgcagtgagccgagttcatgccactgtgctccagcctgggtgacagaaccagactccgtctcaaaaaaaaaaaagcaatgagttcactctatgctgatctactggagatgaaaattccttgattgattgattgagacagggtctcacttccataggccaggctagagtgcagtggtatgatctcagctcactgcagcctcaacttcctgagctcaggtgattctcccatctcagcctccctagtagatgggactacaggtgtgccatcatgcccagctaattttatttctagtagagacaagttttcgccatgttgcccaggctggtttcaaagccctgggctcaagcaatccatccacctcagtctctcaaagtgagaggtatgattctgttgtacatatacaacagaatactattcagcctttaaaaaaaagaagaaaattctgcaatatgcaacatggagatgaaaattcagcagctagttctagtctggtgaacttgtgtgtccagaagcctccacttccctgtgcgaccttcataggaattgttacctaggatgcctggactaggcatgcaggtttcctgacatgttccagtcctctgctgtcggttcagcagtgggctggccaccaccagcaatcacttgttacctgccaccatcagaaaacatgacatgctagaaatacactcacaggaccgaggaggtccaaagcaagaactgcaactccagagaggaagagagggccacaggagccaataaatctaccggtgtttactcctcctttccatatcttgctttctccttctcctgctgtttgagtcccactgctccctgtgaggtgggaaggcctgctaaaagaaacttcattcaaaggcctgagtaggaatgttctctaaagatttttttttttttgaaacggagtctcactctgtcgcccaggctggagtgcaatggcgcgatctctgctcactgcaacctccgcctcccggattcaagccattctcctgcctcagcctcttgggtagatgggattacaggcgcatgccaccacacccggcaaatttttgtatttttagtagagacagggtttcgccatgttggccaggctggtgtcaaactcctgacctcaagtgatccgcctgcctcggcctcccaaagtgctgggatcacaggcgtaagccactgctcccagccatctctgaagattttttcttttttttttttttttgagacggagttttgctcgtcacccaggctggagtgcaatgccgccatcttggctcaatgcaaccgccgtctcccaggttcaagtgattctcctgcctcagcctcccgagtagctgggattacaggcatgcgccaccatgcccgactaatttttgtatttttagtagagacggggtttcaccatgttggccaggctggtcttgaactcctgacctcaggtgatccgcccaccttggcctccctaactgctgggattacaggcgtgagccaccatgccaggcccctctgaagatttttaaagcagtagggcaagataaaaagacaggtaaaggaggtcagtggctcacgcctgtaatcctagcactttggaagaccgaggtgggcaaatcgcttgagcccaggatttcgagaccagcctgggcaacatggcaaaaccccgactcttcaaaaaatacaagtgttagtcgggtgtggtggcatgtgcctgtagtcccagctactcgggtggctaaggcaggagaatcacctgagcatggggaggtaggggcttcattgagccgtgattgtgccactgcacttcagcctgtgcaagagcgcgagaccctgcctcaaaaaaacaaacaaaaaaaaaaacaagaaagaaagaaaatgtatggacagaacagaactggggtggaatgtaggagagaaattgagcagactaaagaataaatctgtccctcacaccatacccaaaagtgaattcaaaatggattacagacttaaatgtaagaactaaaactatacatactccagcactattcacaagagctaaggtgtgaaaacaaatccatcaacagatgataaagaaaatgtggtatacatatacaacagaatactattcagccttaataaaagaaggaaattctgctatgtgcaacatggatgaaccttgagcaccttacgctgagatcagctagtcgcagaaaaacatatattgcatgattctccttatataaggtttcaaaacagtccaattcatagaaacaaagagtagaatggtggttgccaggggctgggggcgggggaaatggggagttaattggtaggcataaagtttcattcaagcgagatgaatacgctctacagagctgcactatgacactgttcccatggtcatcaataacataatcgtacacttaaaattttgtcatgagagtacatcttatgttaaatgttctgaccacaatacaattaaaaaaaaaaaaagaagaagaagaaagaaagagctaaaactctagttgggaggattgcttcaggccagaagtttgagaacatcctgggcaatacagagaaaccccaattcattaaaaaaaaaaaaaaaaaaaaaaagagctagaactataaaacttttagaagaaaacaaaggagtaaatcttcatgaccttgggttaggcaatgtcttcttagatataacaccaaaagcacacacaacaacaacaaaaaagataaactggactttattaaagttaaaaacttgaacttcaaaagataccataagaaaaatgaaaaaggcaggccaggtgcagtggctcacgcctgtaatcccaccactttgggaggccgaggcggggggattgcttgaggccaggagttcgagaccagtctggccaacatggcaaaaccctgtctctactaaaaatacaaaaattagcctggtgtggtggcgggcacctgtaatcccagttactcaggaggctgaggcaggagaatcgcttgaacccgggaggcagaggttgcagtgagccaagatcacaccgttgcactccagccagggcgacagagcaaaactccatctcaaaaaaaaaaaaaaaaaaaaaaaaagaaaaatgaaaaagacaactcaatgaataggataaaatatttgcaaatcatatatctgataagggacctgtatctagaatataaaaagaattcttgtaactcaataataagaagataacccaatttaataatgggcaaaaagatctttgtaaatgggcaaaaaatttaatagacattctccaaagaaaagataccaatgaaggctggggatgtggctcatgcctgcaatcccagtcctttgggaggccaaggcgggaggaccacttgaggccaggagttcaggaccagcctcggcaacaaagcgagaccctgtctctacaacaacaacaaaaagaaaatgtacaggccaggcacagtggctcacacctgtaatcccagcactctgggaagccaaggcaggtggatcacctgaggttaggagtttgagatcagcctggacaacatggtaaaactccatatctactaagaatacaaaagttagctgggtgtggtggcaggcacctgtaatccgaggtacttgggaggctgaggcaggagaatcgcttgaaccaaggaggcggaggttacagtgaactgagattgtggcactaaactccagcctgggcgacagagcaagactctgtctcaagaaaaaaaaaaaaagaaaagaatatgtacaaatggccagtaagtacatgaaaaaatgctcaacatcattagttatcacagaaatgccaatcaaagtcacaatgaggccgggtgcgatggctcatgcctgtaatcccagcactttgggaggccgaggcaggtggatcacctgaggtcaggagtttgagacaagcctggccgacatggtgaaaccttgtctctactaaaataaaaaaattagccacgtgtggtggcaggcatctgtaatcccagctactgaggaggctgaagcaggagaattgcttgaacccgggaggtggaggttgcggtgagccgagattgcaccactgcactccagcctgggtgacggagtgagactccatcacaaaaacaaacaaacaaacaaaatcacaatgagatacgaattcacacccaacagaatggctttaataactttaaaaagacaataacaagtgttgacaaggatgcagatactggaactcttatacactgctggtagacatgtaaaatggtacagccactttagagaacagtttggcagtttctcaaatggttaaatacagagtcaccatcaactgctcctgctcctctgatccctgtggtaaggcttcacacatacctggttcttaaaatggccaacaagtatcaagtcaggtctacctcccatggtctccatgctcctctctgaggccatctcttccctaattccaaaccctcggaactgtatttcatccactaaaacactggtttttgctcttcactagttcttccctgacaggtgcaaagtcttctgatttttctccttgtttcctacacattcttcctccacaaaatccatgggctcttgtccatgagagcagctcctgtgacaacaccaagttcaaagtcctctctttttccacctagaagtaaactaatcacctcatgaaagggtaactaacttctgctgtagataaagacatatccatccttcctatctgaaacaccattagccacagaccagcatgcctaaatgcctaaacaggtgagaaactaaagaaaaggtggtatctgaaatctcagatgacaaaatgttacaaagtaggctttttttgaagggaggaaatctccaaaaaagtgcagcagtccaccgagggcaatgtggtcctgatcccttagacgagtgcaagattacactcttcttctaggcagatgtctcagttcccaaatggggacactgaagtatcagaccttactgcagaccaggatgaagcaataaaacttacgactaactggcctctgaagcttagcctgtccagggcagtggtgggaagttcccatgagatgcctgttcattatgtccagaggcacggatcttgcttaaagtcaatgcctttccaactagcccctcaaacaaactttcaacttaaagttagcaaagaaaaaagatgaccactttgtccaacagagtaggactcacaggactcctgactcgtgatacctaaccatcagctattgagaaacttcataaccacatatggacagactcatgcctgcctatcggaacaccatgcatcacacacactcccaggacctgacatgcataggcgtataacccagagcatatattcaccttctctaaccggactatacttcgcatctatcctgagacttggctgagggagaggaaaagaaacaggaggcaaagaaaacaagaccagccactcaggcaccacccttggccgatacagtcccatggtgctagacaataagcgacatctcttgctgtaaccacaggcaagctaatcctccacctgaggcctccttttcttcatgtgtaaaataagggacccaaggttcattgcagctagctgtaatactcctgactctcaggcctctaccagttctctacagacaggttgctttctgtgagaaacagaaccagcagagagaggcctggtagagtgagaagcaggatgcagaacaaaatcaaggattgacttccagaaagggacatggggttcatattctgatcacccagtttccctagaaatgttgtcagatgacccctgggacagcaggaagaccgagtaacaaactgggctggattgttggcccgaagcagctcctagaggtctgggcattataccactggtactcgctatcctggcaggaccctcactaacaccagtgatgacagtgaaaacagtaacctgcccaagaccaagaaaccacagagacctcaatttacacatgcactttcctaaatgacaggtcaagatctaaaaccctagctcagattacggttcatcgatctccacccaaaggcaccttcagctcctctgccaaagcaatgcaaagtcttgctggccctctttgtcatcgcttggtcttgtgagcaatttcaagcactcacaagtgaacctaaagaactgaaatccacaggaaacccaagcttgatcctccttattccaaaattctagttagtgaagttggtgtttcgggtccttttacttcctctgctcattcctagtgtggggattcataaagaaatggtcagaaggcaaagagcaagtggttggaagagggagaataaagaccctgaacaaacaccacataaacagtcttccagcttaaactgtcaggatccaacttcctggcaggggctgttgaacaatctcaaagcaccctaaggacccaggggacctatctctcctatctaggaccataatcactatgcatcatcacaacattgcagccacacaacagataagtcaacatctttaaaatgatcaccttcaaaaactatgggaagacatattatttctactatgaatagtccctccttataaccaggcatcctcttctctcaaatggttaatagccattctttcttctccctaacccagagagacccaggtgaagtgtctggttcaaggaagcctgtgcttctccagttgatacatcttgttcaagagggaaaaaaaaggaaacccagggtggagttctacattcaaaggtaaggaggcctggaggatggaagaatttgagcagccacaacaaccaaacgatcagaaagagaggactatttgggcagaccactgctacttgacagagctggcagccggctgtaaggaacaagggggaatatacaccctcacaaacaggatgaggggggaggaggagaagcagggatgaaagcgactccactgcactgaggccttgcctttgcgctccatgggctgccccaagcgagcacgccacacgcaggaagccagaagggctggagggaaggggaggtggcgacggcagaccacagagacaccaggcctcgcgtggcgtgcggggagtgcacacggggccgaaaggcgtgcaagggtggggtgggcgtgcaagtggcttggcgaggggtggcaggcgtcaccggcagggcctgcggggcaagggcccagggctgcagggggcgtgggagcgcgcggggccgcgctcagaggggcgcgcaggagctggttaccgtgtggttcaccccccacatcaggacgctgaggatcggctcgctggcccggaatagcttcactttctggcacacgaaatgcttcttcttggtcttggtcttgctggcgctgagcggcgccaccgccaccgccgtggtgctggtgcagttggacgacatgcccggggcggcggcggcggcggcgaaagaggggggcggcggagacagcgcacaagccagcggcctcaggcctcccccggaccgatccccacccccgctccctcaccgcgccatggtcgcgcccgtcccgttacctcccaccccgccccggtggttccgtccgccccacgccccgccctcccgccccgccccggggagcccgccggcccgctccgcaccccgcccccgggcggtgcagccgccctgcagtcccctggccccgtcctccccgtccgcgtggtacggcccgtcccggggaggcagcggccgccccgcccgcccctcctccccgggcctgacagaaacccgcctggcctccgaacgcctcggggccccgtgccggagccggaaggggaggagggctgggcaggcgtcgctgtggaccgcgggaggggctccccgcccgggccccccaacgccagggtttggctctttcccgcaacccgaatgccaagatggcggcgatgccaccgctccggaagggaaggagggacgggaatgcgaggagggcgggacgtaccatgcccaccccgggggagaggagggacgcagcaaggggaagagaaagtccagcctagaaagccaaggaacgccccctcgctccacctaagcgtggatctgcccactctgctgggccccgggcgcgctccacccgcggggcacgccccttgcccccagggccaatgagagaagcaggccaggaacactggtttttatgaatgggccccgcgcccacccacctgctgcctgttctccccgcaaagggtcagagctcagaggccgccagcaccttcagacacctatcccactaatcgtcttactctggctcatttcgtaaaatctttgagtaaactgccccacgctttgttacataattctcagatgagggatctccatatattcgacacaaattacaggtcaacgttgttctttctgcatggaaattcgtaaacacggtactccacaggtggtcgctctttaaacagttacaaaaataaatgtggcctttattaccaattataaaataaacataattaaccccggcataatgaagtgattaaatgaataaaaacgtatgttacattctctagggaaagatcgggtttcaagcattacagtgcctggcatcataagtgttcaaaaacagaaatccaaatacattttaagcagaattaggaattagcagaacaaggaaatcgcccagctaatgtgcgggtcaagagggcctaggagttcactggtcaaatgagggcttctggtgaaagaatagagaagggaaaaggagtaaagacaggagagtggcccctcgagggttttgttttgttgctgttgttttttgagacggaatctcgctctgtcacccaggctggagtgcggtggcacaatctcggctcactgcaagctccgcctcctgggttcacgccattctcctgcctcagcctcccgagtagctgggactacaggcgcccgccaccacgcccggctaattttttgtatttttttagtagagacggggtttcaccgtgttcgccaggatggtctcgatctcctgacctcgtgatccgcccacctcagcctcccaaagtgctgagattacaggtgtgagccaccgcgcccagcctgttttttgttttttttttagtacctgactgaaagagactagcaaacaactcctgaaaatctgtaattgtagtaaggttactacacggtaagaagtgaagccgcaaaataaaaacttccattttattttcctttaggagccatggagcatattggcaatttggttctgactcctaaaatcattttactatacctttacactgcctacattggagactgcaagcagtggaaaagaatagatactccagatctcgtcgataaacccaggctcctcctaaaccagccagattcagagagaaaaacgagctggcctgccttattgtattacttgccatcaaggttcaatgtggttctattacccagtaaagtcattgaccaaacaaggtattttcacaaagctaaccttttttaaaagcatgtaaaaattgtacatttgtacatatacgcattacaattttacatccaaagatcaaatagttaacagttcatttagggctttttgtattgtttgattttccagattctgtcactcccttggctttgacctaacctgacatcattctgtcacattatcttctaaatcaagtaaacgttcatttgtctcagtaagcacaatctatctgggtgacaccagagaggtttctgaagggtctggtgtacgctgaggcagtgaaataggtctgttggcacaggtaagaaggaagtggcatgataaacatcacaaccccagggaacagccttccagagtggcacaagcactcccaccgagatggtccagtgcccacccgttaaagagtcaaaacccaaagttactgagtgtcccacaaagcaagtcacactagctctcaaaggaagtgagctgtttcaggactcaatgaagcagggtcactttgaacactggtggtttgacatctgtgaaagaagtcatttgaactcttataaagagaattaaggggtcagcagcttccctggaaaatgcaggaaaaccaataagagaggggacagttttcatcttttcataaagttcttctccagagctaccgaagttctctgtaaagagtagatattccgcttcacccgatcctccagggaggaagtagatgcactctccagcttcatgcggctaggaagagaagacaggcaaatgcaagtcaaaaacattttcaatcagtcaactattctggcagcttcagaagaaatgggttgttagccatagagcagctgtaaaaacacaacctcttttaagctcccatagataactttcgagtgactccacctggaaccaaatgtttttaaaccagtgtccataagggaaaatgtatctgttttggaaaataagtcaaagcctcattggaaaaaggcttcctgggccatgaattcttattaaaaaggaaggtcaaggaatttcaatgatttagaaaataccaaattcacttctcctcccctcaaatgaaaaacatcccactgtgtggtcagaaaggaagagtagtagccaaggtggtctgaaggctgggctccatgtgcaaacacagaaacactggaacgggaaccagctgccagcctgcctcttaagaccttccccatgaaagaccctggcaggaagaagatgcactcactggatgaacttcccatcccgggagtccagcttctctagcctctgctcccgttcctcatccttagcatgcctcttgaggatgttcagtctctcctcctccctccatttggcgttttccatcatctcttgccgttttcgctctaattcctctgcagagagttttctgttgagcacagaaaccatacgatcaggtctcttccagcaaaaaaaccagaagcagcacaagaagcacagaagccaggtgggaccccaagctctccagttcactgctctctccaagtgcaaggccagcctgagttcccttctaacgtcctggtcaggaggtttcatccaaatttcaaaggcttttagtaaagtattccataatctcactcagtaatctctagagtgattattctgaaatatgaaatatgaaataaattgggaactcatcaggaacctaaacttgtagcaattatatcccaatggtttgctcaacaattgacagaagaacagaagactaggttatccatgtaactgttaacatctaccatctaactacccattggagactagaaattcatgacacagcccatgagtacactactttaggactaagctagaagccagaagctgaaggaataacttagcctcagaaaataataaatagggccaggcatggtggctcacgcctgtaatcccagcactttgggaggccaaggcgggcagatcacctgacgtcaggagttcgagaccagcctggccaacatggggaaaccctgtctctactaaaattacaaaaataagctgggtgtggtggtgtgtgcctgtaatcccagctacttgggaggctgaggcaggagaatcgcttgaaccgaggaggcggaggttgcagtgagccaagatcgcaccactgcactccagcctgggtgacagagtgagtctctgtctcaaaaaaaaataaaaacctccaaacgaaaaacaatttactattaaaaatctgcttcagataataaatgaaagatattagagcattcaaatgagagtaggaggcttaaaaaaaaaaaacaaaaacgattgccaggcacagtggctctagcccgtaatcccagcactttgggaggcttaggcaggaggattgcttgagtccaagagttcaagaccagcctaggcaacaaagtgagacctcccatctctgcaaaaaaaaaatttttttttaattagttgggcatggtggcacccgtgtagccccaactatttggaaggctgaggtaggaggatcagttgaacctgggagtgtgaggctgcagtaagccatgatcgccccactgcactccaacctaggcaacagagtgagaccttgtagggagaagaaagaagttatcaaagaaataatacaagaaaatttcctagaactcaaagacatggtttagattgcaggaagcaaatactgacactaggaaaaaatatacaaatcatacaagaaaggaaatgtaacctccatattctgcttggcttaggaatgaaaagtatcagtaaacaatatttatatatcatacaagtatgaatccacatactcactgaaccaaaaattctgatgtaaccatattggaaagatagggatagaagaaacatgggactaggagtgtatgagagctcatttacactaacagattatttactataacagtaagaaaatatctaagatctggccgggcacggtggctcacacctgtaatcctaacactttgggaggccaaggcaggtggattgcctgagctcaggagttccagaccagcctggacaacacattgaaaccccatctatattaaaaatacaaaaattagggccaggtgctgtggctcatgcctgtaatccgaacactttgggaggctgaggcgggcagatcacctgacctcaggagttcaagaccagcctgaccaatatggtgaaaccccatctctactaaaatatacaaaaattagctgggcatggtggcatgcgcctgtagtcccagctactcgggaggctgaggcaggagaatcgctggaacccgggaggcagaggttgcagtgagccgagatcgtgccactgcgctgcagcctgggcgacagagcgagacaaaaaaaaaaaaaaaaaaaaaggaagcccgggcgtggtggctcacgcctgtaatcccagcactctgggaggccgaggcaggcagatcacctgaggttgggagttcgagaccagcctgaccaacatggagaaagcctgtctctactaaaaatacaaaaattagctgggtgtggtggcacatgcctgtaatcccagctacctaggaggctgaggcaggagaatcacttgggcccaggaggcggaagttgtggtgagccgagattgggccattgcactccagcctgggcaacaagaatgaaactccatctcagaaaaaaaaaaaaaaaattagctgggcgtgacaacatgtgcctgtagtcccagctactcgggaggctgggacaggagaatcacttgaaccccggaggcagaggttgtagtgagccaagattgtggcactgcactccagcctgggagatacaacaagatgctgtctccaaaaaaaacaaagaaagaaaaaagaaaatatctaatatctaaaattaatggatgaagaggcagcaacatatttgtatttttaggaatatgtagctatgaaaagaaactactgaaaaagctgaaagtagttgcctttgggtagcatgactaaaagtgggatcaggcagggcaaagaactactagcttttgtttttttaaatgtttttaaaataattttttgtagagatagtgtcttattatgttgctcagactggtctggaactcctggcctcaagcgatcctcctgccttggactctcaaactgctgggattacaggtatgagccaccacacccagagagaataattgaggggttttttaaagagggtttaatttaagagagggtctcgctctgtcgcccaagcaagaatgcagtggcttgatcgtagctcactgcaaccttaatcccttgaccttaagtgatcctccctgccttagcctcccaaagcgctgagattacaagcatggactgctgtgtctggcttggtttttgttaagagacttttttttttttttgagacaaagtcttgcactgtcgcctgggctgctgtgcagtggtgagatctcagctcactgtaacctccaacccctgggttcaagcagttctcctgtctcagcctcccaaataactgggattacaggcatgtgccaccatgaccaactaattttatatttttagtagagatggggtttcaccgtgttggttaggatggtctcgacctcctgacctcaggtgatccacccacctcagcctcccaaactgctgtgattacaggcgtgagccaccacgcccagccttacctcgtcctttcaatgtcctcacatggctggaggcaggggacgcagacccttacaggttggcaagataaataaaagttggttcgtcgaaaaggtaatgatggattatccatttgccatggtttgagccccttctagattcaggcctgcaaaatgtggttaatcaactgggctcctgactcacctggtgtatccgggagcatgtcgcctttggtagacctcttttttaggtgatgggctcctagtttggcctgtctctctcctgttcaccttagagttgtgcctgtagcagacacagaaggcaaagaggaaaaagcctttttggtccaggggcttacactgaatccctcaaacaatgcaagatgagctaatggtcttagaggtataatctaagtgtgagaaaaacaaaggtatagggtttgatgttagactcaccccagagctcccaaagcacagaatacacctacagatatgtggctttggatgcctgagctttacattgaggtggaaaaaaaaaatgatgtaaaggaaataccaaagcaaagacatttgggaaagtcaatggacggacatcaccaaaagcaaaaacaaatgcctgctgggaccaggcccccacagtcacaggttatttcccagtgaatcccacactcacagtttgctgggtcttggggaccgtgaccttctgcccagggatcgagacctcctgtcccgggaccctgcttccctggtgctcttcttgctggcatgtcttgggggtgagtgggaggagcttctggatctggaatggttcttcatcccatgccctctcttttgctctgctgtcagaggaccctgaagaccctggttacggtcagagttccggacctacatcattaaggaaaagagaagttattcacatggaaaatccagctattcaggagaaaacgcggccgggctcagtggctcacgcctgtaatcccagcactttgggaggccgaggcgggggggatcacctgaggtcaggagttcgagaccagcctggccaacatggtgaaaccctgtctctactgaaaattaaaaaattagctgggcgtggtggtgggcacctgtaatcccagctactcagaaggctgaggcaggagaattgcttgaactcaggaggtggaggttgcagtgagctgagatcgcaccactgcactccagcctggatgacagagcgagactccgtctcaaaaaaaaaaaaaaaaaaaagaaaaggcagtgaaacaggaaatgttacataaggagctcactgagcacaccaatatcatcacatagaattatcacagagaactgtataaacttagttatctgcagaatcccctaaaagaatctccttcggtcagccaggtgcagtcgctcacaccttgaatcccaacactttgggagacggaggcaggaggactgcctgagatcaagagtttgataccacccagagcaactagtgagaccttgtctctacaaaatatttaaaaattagctcggtgtggcagcacacgcctgtagtcccagctactcaggaggttgaggcagaaggatcccttgagcctaagaggtcaagacagcagtgagccaggatcacaccactgcactccagcttggatgagagagaaagaccctgtctcaaaaaaaaaaaaaaaaaagatggctgggtgctgtggctcatgcctgtaatcccagcactttgggaggctgaggcaggcagatcacgaggccaggagatcaagaccatcctagctaacatggtgaaacactgtctctactaaaaatacaaaataattagctgggcatggtgggcacctgtagtcccagctacttgggaagctgaggcaggagaatggcatgaacccaggaggcagagcttgcagtgagccgagatggcgccactgcattccagcctaggcgacagagtgagactccatctcaaaaaaaaaaaaaaaaagaaaagaaaagaaaagaatatacctggcttggctgggtgcagtggctcacgcctgtaatcccagcactttgggaggccaagacgggcagatcacaaggtcgggagttcgagaccagcctggccaatatggtcaaacccctctctactaaaaatacaaaaattagccgggtgtggtggtgggtgcccgtagtcccagctgctcaagaggctgagacaggagaatcacttgaatgcaggaggcagaggttgcagtgagccgagatcgcaccattgcactccagcctgggcgacagagcgagactccctctcaaaaaaaaaaaagaaagaaaagaatacacctggcttagctcttcactataggttaaggaagagcgagatgcagaagcatggaggacaggacccaaggttaaaaatacagaaatatgaggccaggcatggtggctcacgcctataatcccagcactttgggaggccgagacaggcggatagcttgaggccaggagtttgagaccagcctgacgaacatggagaaaccctgtctctattaaaaatacaaaaattagccaggtgtgatggcaggtgcctgtaatcccagctactcaggaggctgaggcaggagaatcgcttgaacccaggaggcagaggttgcagtgagctgagattgcaccattgcactccagcctggttgacatggagaaaccctgtctctactaaaaatacaaaattagccgggcatggtggtgcatgcctgtaatcccagctactcgggaggctgaggcaggagaattgcttgaacccaggaggtcgaggttgtggtgagctgagatcgcgccattgcactctaacctgggcaacaagagcaaaactccacctcaaaaaaaaaaaaaaaaaatacagaaatacagaagtcaagccaggtgccttgaacttgtacttccagctactcagaagattgcttaagctcaggagttcgagaccagcctaggcaaaataatgatgcactgctactcaaaaaaaaaaaaaaagaacccagcagatttatgtttgtcaaaaatcatcaacctacacacttaggccaggcacggtggctcacacctgtaatcccagcactttgggaggccgaggcggagggatcacctgaggtcaggagttcaagaccatcctggccaacatgacgaaaccctgtctctactaaaaatacaaaaattagtcgggcgtggtggtgggcgcctgtaatcccagctactcgggaggctaaagcaggagaatagcttgaacccggaaggcagaggttgcagtgagccgagatcgcgccactgcactccagcctgggtgacaagcgagactccgtctcaaaaaaaaaaaaaaacaaaaaaacctatacacttaaaatgtgtgcatttcatgtaaattatttgtagagggatgggtagaatgtctcaatgccccattggtggtttagtctctctgctcagagggtcatcagccacaagaaggtgctcagcgataagaatgggcctgtttcccagcagcccaggcttcactgcccacctccctgctatccacattgtccaagtggcacatcccacagtcccacagtcactcctttcaagaagcccacatccctacctgtaagccatatccagggactttggacaaaacaggggaggaatttgccatcttcttctgtgatctaagagatcaaaatacacacactcattgaaaaagaaaatatatataggtccaatttaaatatcttatgctgaactatgcttcttgcctccaatgtgacctttccgcctcccagcagttacctggcagtacgtttctctatttggactgtctatgccgaaaaatgcatcagcacaatcaaattttcctgtgaaaaactgtgggcctcgcttctaagccccaacgcctgaacaccttctcctctcacttcatgctgctattccagggacaaatagtgactcagcagcggcggagctgactgcttccacaggaagacatgcaaaatgggcccacatcagccatcagtccattaaaaaaagcctatataaagcccacttcagtcttgaaggaatcctaagctgagatgaaacagagtcacccccaggatgtctgacctacctaagacctactaggctaaagtcagcattattaagggtctctctccagcagcatggccaagatacccactcacatttagcatctccaaggaactctagcattagatggcaagctctgtgggcactgggcccatgttcaagtgttcatcactgaatgcccagtacctggcagcttccagcacagggcaggtgttcatgtctgtggaatgaatgagtgaatgagcaagtgaatcaacgagaagggaggccagtcgccacatgctcacctccctgcactgtgctcatcctcgctgctggaacgatcactactcgagcttctgtgcttatgtttcttgtgcttctttttcttctccttctttttcttcttctcctttttttccagactcatttgcaactggaaaatgccgagaacacaagcacacaagattactgagaccagccagcgcagtggctcatgcctgtaatcccagcactttgggaggctgagtggagcagatcatcacttgaggtccggagttcgagaccagcctggccaacatggcaaaaccccatctctactaaaaatacaaaaatcagctgggtgtggtggtgggcacctgtaataccagctacttgagaggtgaggtacaagaatcacctgaaccaggaggcagaggttgcagtgggccgagattgtgccactgcacttcagcctgggtgacagagtgaaactgtgtctcaaaaaaaaaaaaaaaaaaaaagattactggctgggcatggtggctcacgcctgtaatctctcagcactttgagaggctgaggtgggaggatcacaaggtcaggagttcgagaccaccctggccaatatggtgaaagaccatctctactaaaaatacaaaaattagctgggtgtggtggtgtgtacctgtagttctagctactcgggaggctgaggcagaagaatcacttgaacccaggaggcagaggttgcagtgagctgagatcacgccactgcactccagcagcctgggcgacagagtgagactccatctcattaaaaaaaaacaaaaagcccaggcggggtggctcatacctgtaatcccagcactttgggaggccaaggcgggtggatcacaaggtcaggagaaggagaccatcctggctaacacggtgaaacaccatcactactaaaaatacaaaaaattagctgggcatggtagcaggcgcctgtagtcccagctactcaggaggctgaggcaggagaatggcatgaacctgggaggcggagtttgcagtgagctaagatcgtgtcactgcaccactgcactccaccttgggcaacagagcgagactccgtctcaaaaaaaaaaaaaaaaaaaaagattactgagacccctatcagtctcctttgaggggcgtggctcatgcacaaactgcctgactccatgcctctgggtctacagaagtccaggacattataggggttccctgtcaacacaccaggggaagggtcttaaccctggccgtgcactaacacccccaactactgaactggtatctggtaggtgagactaagaatttgtgtttttaaacagtcaccaaaaccactgcctaggagtttccattctgtgtcacaggaactccaattccactgaaagcagtcaggaactataaggtcaatctttaactttccttaccaactgatccaagacacaattacataatatgtcatgtgaatggtaagtgggccctagaagccttatttttttttttttgagacagagtttcgctcttgttgcccaggctggagtgcaatggcgcaatcttggctcacagcaaactccatctcccgggttcaagcaagtctcctgcctcatcctcccaagtagctgggattacaggcatgaaccaccaccccggctaattttgaatttttagtagagacagggtttctccgtgttggtcaggctggtctcaaactcccaacctcaggtgatccacccgcctcggcctcccaaaatgctggaattacaggcatgagccaccgcgcccagcccctagaagctttataccacgaccaagggcatactccaacctcctgaacacactgcatggtaatgctttccacaggcttagcccacactcttcttctggaaaaacgacatcacatggtgcattctcccacccaaaagactttcaaccaaaatcaagcttaattaagcttaataaactaagattacataaaataaccaacctgaccaatatgaataaaccccgtctctactaaaaatacaaaattagccgggcgtggtggcacatccctgtaatcccagctactagggaggctgaggcaggagaataacttgaacctgggaggcggaggttgcggtgagctgagatcatgccattgcactccagcctgggcaacaagattgaaactccgtctcaaaaacaaaaaaatgattacataaaatagccacaacatggtctctaaaagacaaaagttttagaggccattctgtttttcccctggtaagctgagagtaaatggagagacgttctcacgttatatggctaaaagatgctcttggtgcttatctggtatactacttaccaattctttgattttcttcattttcactggattatttaatacctctcgttttttctcctcctccttcttcctaaagagagataattacaaaattcatgactatttcttttctccaaattctatggagtaaccttttctccaaacatatacagacaaactggcccatgttaaaatctacatgattagctgggtgtggtggtgtgcacctgtaatcccagctacttgggaggaggagaatcgctcccagctacttgagggaggagaatcgcttgaacctgggaggcggagattgcagtgagctgagatcgtgccactgcactccagcctgggtgacacagcaagactctgtctccaaaaaaaaaaaatctacatgatgatggggctgggtgcagtggctcatctcacacctgtaatcccagcactttgggaggctggggcaggcggatcacttgaggtcagaagttcaagaccagcctggccaacatggtgaaacctcgtctctaccaaaaaaaacaaaacaaaaaaattagccgggcatggtagcagcacgcacctgcagtcctagctactcgggaggctgacgtgggagaataacttaaacccaggaggcggaggttgcagtgagctgagattgtgccactgcactccagtctgggtgacggagtgagaccctgtctcaaaaaaaataaataaataaaaaacgacatgatggtgtcaaagccaaaaatctctcacaaatataagagattgtctcaaaaaaaaaaaaaaaaaaagagtcatgctcagtcgtccaggctgcagtgcagtggcatgatcatggctcactgcagccttgaccacctgggctcaagtgatactcccacatcagcttcccaagtggctgggactataggcccccaccaccatgcctagctaatttttatatttcttatagagatggggtttcaccatgttgctcaggctggtctcaatttcctgggctcaagcaatccatccatctctgcctcccaaagtgctgggattacaggtgtgatccaccgtacccggctgtcagttgttttttttgttgttgttgttgttttttcgagacggagtctcgctctttcgtccaggctagagtgcagtggcgcgatctcaggtcactgcaaactcctcctcccgggttcatgccattctcctgcctcagcctcctgagtagctgggactataggcgcctgccaccatgcctggctaattttttgtatttttagtagagacggggtttcaccgtgttagccaggatggtctcgatctcctgacctcgtgatccgcccgcctcggcctcctgaagtgctgggattacaggcgtgagccactgcttccagccgtgagttgttttttgatggttatagagtttcaattcagaatggtgaaagagttctggagacaggctgtggtgatggttgcacaacactttgactgtatttatttatttatttatttttattttttatttttatttttttttgagacggagtctcgctctgtcgcccaggctggaatgcagtggcgtgatctcggctcactgcaagcaccacctcagttcacgccattctcctgcctcagcctcccaaatagctgggactacaggcacccagggtctcattaatattatcaagaaaataggctgggcgtggtggctcacgcctgtaatcccagcactttgggaggccgaggcgggcggatcacaaggtggtcaggagatcgagaccatcctggctaacatagtgaaaccctgtctctgctaaaaaatacaacaaaaattagccaggcgtggtggtgggtgcctgtaatcccagctactcgggaggctgaggcaggaggatggcgtgaacccggcagacagagcttgtagtgagcagagatcgcgccactgcacttcagcctgggcgacagagcgagactccgtctcaaaaaaaaaaaaaaaaaaaaaagcgaagagaaaactgtaaagcaagagaatcaatggccttagcagggtctcaaagcatctgtaacaaacccccttcctagccccccattagtacctgatgatgaagagtgggtcctcccggatcttgctggccatgtcaagaagggaattggcacctgatggggcaaagatagagcctgggagaagtcctgtttcagaagagcagcctgcctccttctcctccatcttctcaaaaacatatttgtcaatggggcgccccagcaggtactcgtcacggttcaccatcccaccaggaccctggtacatccagtccaacttttcttcttttttcctggttcaagggaagaaaaagaaatacaatttctttaaaaagcagacttctgcaaacctacacctaaaacctggacacaagggagagagaaccacagctaatcagagttcattctactggcacctaccatgcaataaacacggcaccccatgtggccggcataaagaaatagtgcgggttgcgtgcagtggctcatgcctgtaatcccaccattttgggagtccgaagcgggtggatcacttgaggtcaggagttcgagaccagcctggccaacatgatgaaaccccatctctactaaaaatacaaaacattagccaggcgtggtggcggacgcctgtaatcccacctactcagaagggtgaggcaggaaaatcacttgaacctgggaggcagaggttgcagtaagatcacgccactgcactccagcctgggtgacggagccagaccttgtctcaaataaataaataaataaatggtgcttgtcctcatgaggcttacgagtgaatggagagagaatattcactcacataaagcaatttataaggaaaaccagtgttcctcaacatggggtgtggatcttggctcagagcttctcgagtctcctttacagagtctttatattatgctttcatttccaagatgacctaaaacaatgaataagcacattctacatcaccatcttaccatcaagaacaatttcagtgaccacatacgcagttgcattgattgtgcatcttggtgcttgtgggcacacagacaccagcggtaacactacacatttgaggggatgatgggaaaaaatcagaggtaactgaataagtgacgctttcaagccaaaagagccaaacactgaatacgtgaatcattaggtaactatctgggtttcacaagtgaataaaccctggtctcagccatctaggggccaaattaagtcacagcatcatgccacacaaacatttccctgcggttctgggagaaaaaagtggtgagaaagtggaaccctcataccacagacagtaaaggcaggctaaattcataagagcatgcgtggaagcagccaatactacattcacactgcaaccaggaaagtactttcattgacagtattatctataacctgaaattaaatgctttttgaatatgacttttttgttcttttttttcttttagacacagggtctcactctgtcacccaggctggaatgcaatggtgcgatcatggctcactgcagcc

SEQ ID NO: 38 - DNA, 171162 bp, Homo sapiens
tccatggcgctgggccacagaggagccctgctgccagagtgcagagagtgaggaaaaggggcacgagggaatggggcaagacccatacaaagcttcaggtgaaggcggaggggaagggagggtgtagggctgaggctgccctgctagagactgggactctctctctgacctcaggcatgctacttaacccctcaggtctgtcgtctcttcccccacaaaacagtcagcagcagtgagctcacaggacagttgtgaggatgaaatgaactaacacttgtacaatgcacaacccagcatctggctcccaggaagcacccaataaatactggccatcagtgttttcattattaccagtgatgattttttttctcaaaactcagcaatgactaaatgagccccatcccctgaaagcccacagagggagcacaggtctcttctaaccaaaaccagagtcaacagtgaggggctgaccccggtgtccactaccatggtagcctcctcccgactcccaccccctacaccctcactaggcattgcaatactccttcatagcacttttccaaaacccatccacatcttattccactctggctggtaaagccaggacggggctgcttcacctttttacggaggcagaaagtaagtcttgtaaggtactgagctccccatcactgggggtattccagaaaagggtgggtgaaagagaagaacattcaggtctcagaggcccttgccctggccccctctgcctggttcactgcccctgagcccaccctgcaggctgagccttggcccctctgctgtttgtgcagggaagcgggggtaactcacgcgagcaaggagggaaagggctccaatctcaagtctctccgcgttctcctggcttctcccggcagcagccaaggatgggggagggaggggagcagtgtcgttgctcttttaggaaaacggtaattttaattaagaggcagacaaatgagcgctctgcagattgtctcagagcaaagttattaaaaagccatcaaggcggcggcagccacggtggcaaggagagctgcctcccccagctgcccacccagattgtagctgaatagcagttcagagagctggaaaagggctggaggacgtggaacctgaaaatagcccctctcctaagaaggcagggcagcatccagatagtacccagggtacagcctgcccaaccctgggcagcaggtggggacgcaaagggcacctgcaattaggcagcccctgctgtgggccaagtctgggcccatcactactttttctttactcttctcaacaatgctgcctgggaggtgttcttgtaccactttacaggcacaaacactgaggctcagagagggaaagtggctcgtccaggctcacacagctaggaaatggctgaagtgggggtttgaacccagggcaggctgactctcaagtccaatgctccaggctgctggtcctgggcccagattttggggggcggcttcccctgcccatacaccctcctccagccgggctgtttgatgtcctctgaaacagcctcaggagcagcctaatgatgttgcccttagccatcaaggtcactagggacttggaggccaagtaactgcttgcttggcaggggcacattatgagaggacactctacagggacataaagttacaaaacagcttccagcagggggaacaggggcagatagacagaggacaggcccccacagccaggatatcttccaactcttcaacctctacttgctcaacacttaagcaaagcatccaggaacctatctgccttggttgctgttagactctgagcctagcccagtgcctggcacagagaaagtgttcaataagtctttccccgccgccccgaccccgagatggagtcttgctctgttacccaggctggagtgcggtggcgcaatctcggctcactgcaacctctgcttcccgggttcgagcaattctcctgcctcagcttcctgagtagctgggattacagacacccgccaccacacccagctaatttttgtatttttagtagagacagggtttcaccacgtttgccaggctggtctcgaactcctgacctcatgatccgcctgcctcggcctcccaaagtgctgggattacaggcgtgagccaccgcgcctggccttcaataagtctttattgaataaatggatgaatagataaacaagcaaacaattgaataaatgaaacgagatcacaagtttgcatgtgactgtaagctaaacaaaatggtcccatcttctcccatcccccaccctctgggcatcactggaacatgggcttccccccataagaggtgccccttgctcctgacccctctccccaggccacaagccccctcagcagaggattcccgcctcttctcttcaccccagccctagcttacatggcggctttgcagcctgcacacacatgtacatgcacgcgtgcttgtacacgcacactcactgacatgcacacacgtgcacatacagacatgttctctaccagccaaagtgccccccccagagtcaggtatctgctgccccctcccctggcaaaggctgggcccaccagggatagccccctctccgtttctggccctccaggctggggaggagcatctgactacggagagctggagagctggcaggaggaggaatcgtggggggcctccctcctcctggcttactaacctggagactttaaacagagggaacagagtcctggaggcttccctcccgccgcacgctggagccctgggtgagggacaggaaaggaggaaagtcgtgaatgaatgcccagaaaggcccggctgcagaggagctggagagaggagggggccggggcaggggctcccaaagtgggctaggtcaggggcagggccatgggccatggggttgggggaggtgaagcaggtacagagcaaggcagagccttaggagctctccctttggggccccccagggcagacaggatagagattgggtgtcataggaagagcagggactgagggggtagagacactggtgggagacagacagggggacaaacagcaggacaacacagaaaacatggggtccccagaactgggttcccaggacagacagccaacaagccatgcctggttctccacccagaaacaggggcagacactttactgaggtgcccaacctagaccccaaatgatagcccgcctgcctccttcatgccaggttatgccattctggaaggttgatgggttcagggtcagagaggcttgccatcattcccctggtgacaaccctctccccagcctacgagacccccatctgctccactccccactaaccctgagaatgcccagcttcccctgcctgtgttagaggagacaggcattccccacccaaaaggcactcataggttcacactgtgctaggagcacagacctgcctgaagtccttcacctagctactgcctccacacccccaaccctcaacctgccatggcagggtcccctacagctgtccaccatgccccaccctttagaaaggttagaagtcctttctaaacctactccacctccctcatgctgcaatacctattagccttttaccctggggcatgcagcagttaagacccttcctgccgggagacactgtggccagcacccactcaggcacagccctccctgggctggctcagacccatccatacccacaacacgtctggctacaagcattctcagagccccctgccaatctcatggttccaattttcccaccgattacctaaaacatcgacatcccagggagaaacagctgttgggacacggactgggagaaaatattaagaatgctcattgatgtgtctagccccagagaacttcctggatgaggcagtgggaggcacaaaagtgaaggcttaggagctccagcttccttcttaccaccagccctaagtggcagctccaggggcccagccccagacaggctgaggtgaggatctgggttttcaaaaaatctaaagaggtttcttatgtatgcccttttctcagtggagagtgggccccattcaatcattcagtcagacagaggaagaggaggaagataaagatatgactatttattgaatgtctactatgtgccaggaactctgcctaaattacctcatataatcctactacccactctgtgaggaagccagtgttaatgctcttgatctacagaaacagaaactgagcttcagaaaggtgaagcaacttgccccaaaccacacagcaaatgactgtcagggctgcgattgcagcccagagctgtctgactgtagaccctaagctcttgacccaggagctaaactgtctcctatccactcccacccctctctcagtctttggctatcttccttttggtggcctctgggaagttctgcctaaagaaattatctcctatgggcaataaggtagaagagaagatttctcttcggctctgcctcgtcctaagagtgggaggcagactgttctaaccccaggctgccagtggaccaggagggggtgagccatcaggttaaggagagaggtgggtctaggttttcctgagctttatctttaggtgacttctgcctctctaatagccccttcctgcccctcccacttccaggagagaggaagctccaggaagccccgcacaagccccttcacgttttaccaaccagaagttcccatagtgcccaggtagaggagagcccagaagttctggggtggacaaagtgagagtctgcggcagtccccacagcccttgcctctgcacagagtcctaactttccatggataagggggctggggacaagaatgggggactcatcaggccagcctggtcactgggtggggtggaataggcagcagacagcccaggagagaagacagcaaggcccatcccaagggcttcaaggaaccatggaaggccttccctacgagctggggtcattcattcttcccataagaagcagaggctggtgtctggagtgatgtctgctgcgtatgcaattatcatgcatcctaggggtgaggggagactgcagaacacgtcccccccgcaatctccccagctctgcacaagcagaaacagctaggctctttctgtggggtctctgggtctggggtctctctataagctgagtctgggggcccctctatgggcccctgggtctggggtctccagcatgctttgccagctggaatggaaaagaagccagtgccctggaatgcgtgtgtttgcacaggtgaggaaggcaggcatgagaaaacccaactcccttccagtcttgggttactccacatcaggacatgcaggcaaccgaggcaggtggcctgggctaccaggagccaggataaggctgtgggggagctgagccaccagcttgaagtgccttgtgggagaaaacccgaattggattatagtccccggatggaatggagtgtggcaaagccagttctgctggggtgggaggaaaacagtgagtttagaattcagaggacagctgaatcctctagccactcccttctccatcccctgggctgggagggcagatgtaggcaaggtgtgccttcggaacaggagggggctgtctgtaaggcatgagtgtgtgtgtgtatgtgtgtgtgtacgtacgtgtgtgtgtattccaatattctcttgggccaaatccccattttttttttcttagcttaagctgggaaacagtcttcccaccctccatgtggcaaagcaatattatctcaagggagaggaggtagagagagcctgggagctctggaagggagcttgaaggtcctctagtcccaccctcttttcttataccaaggacactgaagaccagagggggcaactaaattgccaaggtcacacagcagtaggggagacaggcaagctgactccagcccaatgcttgttctttacaatttacttctttgccctaaggagcagaggagcagcttctctctttctcctcctcttctccctctcccggagcactggatccctccccagcagggtcccctgcactctggcaaccacaccagccaaactcttcaggatgcccaaagttcatctgaaaggtcacgctgaccagtcccctgccgctaggtccaacactagtctacgggtgctcacagaccaccgtcattgaggtgaaagatgcaaaaataccactggagcctcccatcctgaagtggccacacgctgggaggtttatcttcctatctaacctcgattcctcctactacagcgtgggcctgcttcctctcaagctgtcctatgcagagatggaggcagggggagaaaagcaggtttccagcctccacacccttatgtttgcccacccccagcagacaggatgagggcagggtgtccctgggtggctgggcccaagcccagtgcatgcgtggggcccgaagggtgggatgagggaacagcagcctgggtatgggggaaacagctcttctaggaatcgcccctccaagtcctcatcctctgcaaaatcctaactaagtctcaggcttagacttctctaaggattattatcttctctgggttcagagatgtctgtcccctatcccctcataattgattgtttattatcccaacaataagttgattgtttagtatatgtccggcactgtgcgggatgttttcatctgttgtttcatttaatcttcacaattccaggatcagaaacgaatctgtcccctgggaccatccttccttaagactaagtctaaccttgatctctcttgctgcatttcctctggcccagtcctccttggtggcatttttgttcctgtcttcagagactcttctcatgactcagtggcctacatgatctttttccaggctatcaacctttacccagccctgccccaggacggggtagatatgtaggtaaaagcgaccaaggcatgcgaagaggctctgggggaggtccccaaaaggtcaggcagggctgttggaggtacgggcaggactagggtggcaggctctcctccctcataatgtccatgacccctgcagggggcctgggccccatcttctgtgtggtagctaagagggcccagagaggcaatgaatgacctagtccttctcactgaccatctctgaggcccaggtttcagcacacacatccccagagcccaggggaatgggcaaaagcaggcaggggcacaagggcaggacttgccatgggttgagcctgggaggtgaagccggaggaggagctctgacacctggctaagctcccggcagagggctagcaggccctggagggtgcacagcctcaagcccctctgccggctgcagtatcaggcctccgtggggttctgcacaccccatcctagctagccacaggcaactttggtgaattcacccaccacttggcttctctgttttgaccttttggagcagaagtgctgagggcaggggtcccctcgactacagccatccccccaaccctgcccccagcatggctggaacacaggggccagactcacctccccagggaatgctcaagcccagctttcacccctctgggaaatcggagcagcaaaagcatgggccaatgggcaaggggagttggaatggtgggtgggactctgggccgggtgtgggcggcaccctcccccttcaagcaggcaccattaatatatgcaaagcatatgcaaatcacccagaagagagacacaacaccgctggaatgtcacaagaaaccttggagatcagccagcccacgccccctcatttcacaggtgaggaaagaggcccgcgctgggatgggacttgctcaaggtcacgcagacatctgggcactgaggaaggataagaatgagctctcttgacttagtgcagtgctttttccaccagggtcttgtctttctgctggggggtttataacattgcaaaggggccccagggcgtggatggggctccaggcaggcccatcagagacatgggtgggagatggagctgagaggcttcttggatgcctcccttaccgcctctgcacctggagatggtctggtgggtgtgaggggcagtgcaagggcagcatagcacctggggggccgcgcggttggaggggcgggaggctggaggtaggcaaagagaaatatgaggggcagggcagaagagcagggaacctggggtgtttgaggcaggggaggaagagcccaatgtcagggcaaggtgcctgctgtggtgtggggagggggatggcgccctcaacacatacacacacacgcacacacacacacacgctcgcgcgcacacacacacacacacacatcgctaagtgctctgcagcccttcctggactctgacaattatggcacctgacagaccataatagttaacccaggcccatcccttctgaggccacttccccgcccccagcttggcttctcaaccttccagacagtcctcgaaagcagggccagagctggggaaaggaaggggaggcagacaatgggaggggtggtcagagggaggaagggggaggcagaagaagagacgaggacagggttagagagagagacagcaggaagggcagcgcaggagaaattgacgaacagggagcgggaggggaggaatgggaagacggaaaggcacagaggagagatgggggaggggcgaagactgagggcatccaggggagtgctctggagcccaggtatcgggtagaggaaccctgaccccgaggttctaggctgcttggcaggagttggggaccatgcccctgcccctctgcccacctcccccagaaactcccctggctgccaggaactcagtcctccctccttcactgcctccctcccttcctccctcggggcaggcactgcttcccagccaaatccgaagccttcatctccgctactcagagcttggaatgaaagaaggggaagcgagtacagccctcaaacccgctgacggccagatttttattatctttgctcgaatgggccctaggaagccagtgagggattcttcaaagagcatctgagtgcctcattgaagcctgcacctgcaccagcccacccacagcaggcagccaggacttggggggcacaacctgtcccccaccccccacaaatcctagagtccagagcctcagctaccaggagactcaccctcagcagcttgtgcccaagcaggggtccctaggtcaggaaaccaggcttaaagctagacctaagtctgctgggcctctgaggcagtctgtgtccctctctgggcctcaaggacataaatgaagaaagaaaacagatttccttgccagggcttggaggagataaatgcttgagattcctcgaaagagcagcttttatggcaagccctggatccttcccctgaactccctgcctgcccagcacccacaggcccctttgcaagagcaccccccaccacagctgcctcttcatgtgccccaggcctgctacccaggatgacagacgccatgaactgttcttccttgagccccaaactcagctccctcagttcaaatcctcaacactgtctcccttctttccccaaaacctaacctggggtgggggtgggggctcaacaaactgggtacttcaaagagcccagccgcctccctcctaagcacttccagggctggggttttggcagagaattccaaggttggcataggcagatggcagccatgccacccccaccctctagctctgaccacactgtcgatgcccacagccaaagaaggaatcaatggttctaattaaaccctttttccagggtgggtccctggcgagagagagggaagagggagagagacagggaagggaggggggagagggggagagagagagaaagagagagagagagcgcgagagtgcatcagagaggccctgcatcccagtgcccaacccagtatcctgcacatctttaagacgcctggaacccagcagggatgaggccacgaagaccccagaccctccgcattaggcaaggaggcaagtagaggggcaggggaaagcctggggtgggggtagctctttgaggggttcattcgagcgacccttcccctagtggagcatccctctccactcagcactccccgaggaccacagttgcctcttccagatagagctccagggcacagacagtgggagccagaagggggatttgtgcctccatcccagccttgagggtcatcacagagaaccagccatcgtggaaagggcagaagaagcaggaattgttgtggggggactggacaaagaccctcttgtccccaaggcagggtggcaggaagccagggcaaagcctttgcacttgctgccagtggtgcctgggtgccaggcagtctgggtggggacagcggggtggagggggggtgcatcttattcttggaaaccctccccttatgcccagagccctcaccccatcccttgcttctaccccaggccaccagctaagtctctgtccccagcaactctcagcttgcctggagcactccttcctgtgtgaatgttccttcccatgtccctgacacctgtatggagtggcccatcaccaaccagaaccagcaaaacccctcaaatgcaccatagctgctccccacatacaaccacaccagaaaccaccaccatcacagctgccaccagtggcgacagcctcacaatctccatcaaatgcatcatcaatttttaaagatcaacaagagggaaagggatgggaataagagaaactgaggcaaggaattagacagcaaagcagttggctcaaggtcacccagaccaagataccaagagtcgggaagaaggtatcctgacgaccccccaaaagtgctcaaaccccacccaaaggaacattcaggcccacaaacctggaagtctggtcagcttccctcactcccaagcctcacctgtttctcccttccccaaaacagacagcagctcctccatctccttttgaaaggctgctgccagaaacccccacccccagctcggggagcccactttccttaaagttggggtgctgcaggacctccttgtcccacaacatttgaggaggggggctgggaagatccccctccttgcatacttccccgcgcctgctcacctggctcccctcggcccccagggtccctcggtccagcctcctccctgggagagcgggctctgccctccgccgtcctctcccaccaggccagggcaaagcgccggaggcactgccagggctgcatggggacgcgtggggctgggggacgagcaccagcagccgcacacgccccgccgggccctgacagctgagctgcggaggcacccggcctgtcccctctgcttccaccagcatcctgctgcccccaccgacaggactcggagctggcccgggagcttctgacgtagcaggggggtgcgtgggaggggagggggggccacggtgcgtccccttcccagccccaccctccacccctcagccgcctgccttccctatcttctcactcaccctagatgccctccccagctgggggcgccctcccctgccccctggcctctgcagggggaggggttaagatcaaatagcccctccctaaacccctccctctcgtggccctccctacccgctggtagagcggggagctggtccccagtttctgcaactgctgctgaggctcagaggtctccagggctagggcctcgaggtgcggggagggggggtgtgtggaatacaggcttgtatcctggcaacgcggccaaccccagaacgcactcatccccttccctccctggaggctggcgcaaagggcccaccaccaccatcctagcccgtgcaccccattctgggagctgggggagggaggcctttgatgcacccctcacttctccatccccttcccctcccctgcatcctccacttcccccacctcggagggacgcccttctccccccaccctcctcaccatccatcccccttcttctcctcacccctcccccttccacacaagcccctttacagttgaacccctctggcccccaccccggggcgtagtgaggccctccccacccagtctcctgcctcgccaccctgcccccttctctggtcccagcactcctctcgcccgggtccttctcccaagcccggcgcacagcggtcccctgcccccacacacctgcgccccagcatccctcgccccgccggccaccgcctccccggcccggccgccgcccccgcccccggccgagggggaaaacacacaaagaaaacagaaataccttccacttaagcatggaggcacattagggaggagagagacagggacatgccttgggacggagcgttccccatcgggcgggggcgcggggggcgggggccccgggccggcctgcctggcgctcgccctctcgccgcctcgcgggctcctcgctcggccccagccccggggcgcggtgccaggcgggcgggccgggggcgcgggccccgccggggtggaccagctgggagggcgccggcggccgggcgtgtgggtgagcgcgcgcgcgggcgtgtcaccgagtgtgcgagagcgagtgtgtgtgtgtttgagtgtgtgtctgcgcgcgcgcgggccggcgcgggtgtgtcactgcgggcgggcgcgcgcgcggcgcgggcgcgcgcgtgtggccggaacttacaaagggccgcccggggcggcgggggcgggggaggggagggggcactgcgccttctcgcgccctccagcttcaccgcgtgatcccgcagcgcgcggccggggccgggcgcggggcgcgctcactctctccttcccgcgccacctgcttcgtcccaccccaagtagtcttcgcgccacgatagagacaaatacattgaccgaggaccggctcggaggaggcacccggggaagcggggacacttggagggtggaggactcctgggtctccaagcccgggcgcgcctagggatggaaaggctctcggggctgggtggggaggcggggcggcgagactgggggctcccttcagccaaggtgaccgcggaaaccaacagccgccccatgctgggagcgcccggatcctcctctgcttctgcctcgcgacccctcaccccagcgcgcctagacgcggctcggtcggagggtctgggctccccggcgccccctgctgggccgccgcctcgcccccgctccgggttgcagcccctcctgcaggcgtgcgcgggaactgcaggcaggtccgcgcccctccggccagtgagaccccaccgtaggacgctccagcgacggtccctgctcacgcctcgcttggcggcgtcactgccgcctctacttcagcccgcagagcactagctcggctccaccctgccgtcccccgcccctccgcgtcccaccttcgttggcctacctgttggctccgcagacttctccagcgctgacccggacccagacccagacccaggcccgcgccgacacctcgtgattccagcggccccctccctccctcgctccgatgctctggccagtcccttctctctcaagctttcttgcggaggagaaggtgggctgagtcccctgtcccttttatttacttctggagtttccaaaagcagtttaggtgagcaagagagtggacacagtacttctattcactgtgggccatcaggcagagtggcaggcaggcagagagcccaggagaggagaccccaccccaagtggcccaaatgacaaaccggtttccccacttcctggtctacccagttgcaaccttaatctgggctctcccaatttcctatccacccccaggcctgcccctgagccaaccacatgcccagctagggacaaggtcccagattccccttagagataaataaccaattgcagtaactcagatgccagggccaggaccagaggagaggcccttcccagctccagtgggacagatcaggaggacagccaagagctgtgtcctggacacacagtctgggcacacgaccccagcggcaggcaccctgacttcttccctcctgggccaactgcctctccctctgccaactggatggtgcccatcttttggcctctgagcgcacagtgggcatccatccagtgccctgcctggctgcctgcccaggatgggcatgggaggcagcaggctctgtgtgggggaggctcaggggaggcaagggtagcttcccctcagcacacggacaccacctcccaagcggctgggagcccagagctctggcacaggtcgctcctccgttcagattcctcacccactgactgcacaggactcctgcccttcacctgcccccaactcagattccccccaagggacaagatttcttccctcccccactttgtgcctaaggggaagaaaattagcaggtgctctaccataatctctaattttaccctttcgacagcctgatggaagtgagcattttcaaccccctatcagagagatatagccaattgcccaatgtaagagcagcaaagttgaaattcaaacccacatctgccttatgtcaaagctccctgcctttcttctatcaccatcatctcataaccctgtgggtcgccacagcagggacaacccctgggacacaaagtctcataaccatatagtcgttagaagagaactgagatcaggaatgtggctgagagttaagatgtatagccatgccataatcaggaaggagacagggatctggtcctattgtggagagagtgacctgaggcattacctctagttgacaattgaaaagatgcttgtgccatcatgtggagatttgcctgcccaaccccagtggcttggggtggggtgggaaaggttctgtgatgcagcccccagggattggaacagttccaaaggtgtcagcagaacgaagcatccatttttacccgccctaaggtgagctcgctcatcatgaaggccacctccatagtgaggagcttaaatcagatttatgtaatatttttaatttgtatagctcaccttttaatgatgaatccttagcatttctgatcatcttcatagctatcagctcatttgagacccttctgccctctcttccccaaagatgctttgtccacacccaccctgcccagctgactccatgggtctcctggaggggtgagaagggatacagctccctgaatagaacccaaggtcccaaggctgaaagtggagccagaggacagatggcctggcatcatcgcccctcattgaccccaagaaaaatacgtgcctttccctcctcccaccaggtctcaaaaggaggggttcctggtggagagagaaggctggggacaccatctccactgatcagggcaaaagcaacacaggtattacttcagctgagagatgagaattgctcctgtaagctggcatggtgcccaggcacaaccaatttgccagctgcctccacctgagatgcctcaggtgccgccccgcccccgctctcattcctcaacaggtaacttccctctggtcctcctctcctgtgcctctggcagtgtatttggtggggagggggcagctggcatgtttggggcttggaacagcagatcctaaccactcaccttgcctccccaaacatcccacccagccctcacctgttcctgggagcttgcgagagagaggttatgggggtgcaccctagaggagagaattctcagccctgcctctccttccccaagatgcaataggaacaggggttgcatctggacaaacatctgggcaggcaaagggagatgggccttggggtgggcagagaagggcatctgggcctctaggagaaggcacagggaaaaggtgacgtggaaataatggctgggacaccccaaactggtcactctgctgctttggagcacccccagcccagtatccttgagaaagcccccggtccatggggctgttgtctggccaggcatttcatgagaccccaaggaaccatccacattccactaagggtggcctgcagacagtgagggcctggggacctggtcctattctgggtcaagtaaccaggggcagtgacctagcacctggggcacaagaggggtgggggaggagccaaggaggaggagggtgcttcccgctgccccaggcctgcttctggggctttctgaacacagcctggtctcccagagcccctaagcctcccttctcacattcctcaccctcctgctcctcctcccactccataggagaggagtgagtggcagtaaatttctaaagaccctccccgcttccctgcttgttattgtaatgaatgctaatgatgctccctaactgatgccctcattagcacatcaaacccgctttctgaagaatggagacagaaagtggaggcaggttctctggggtcggagccgtagccagcctcctccagagaaccttatcccgttgcttctggcagggagggaccagcgtaggggcttggagtgaaaagccgaggtgttcccctcccagtgggaatttcctgagcacaaggctgtcttccctgtcagatggcaagggttccatctgtcccatcagactgggagctccttgagtcaggcaccttgcccccctcattaagccagggctccccctgtggtagggcagtggctctgaaagtaattggaaaagcccagttgcctggagggcatgttaaaccagcgattgctcccctcccctcaaggtctcagattcaacagatttgaggaggggcctgagaattcgcatttcttttttcttttcttttctctttttttttgagatagaatctcactctgtcacccaggctggagttcagtggctcgatctcggctcactgcaacctctgcctcccgggctgaagcgattctcctgcctcagtctcccgagtagctgggattataggcacccaccacaatgcccagctaatttttgtatttttagtagagaccgggtttcaccatgttggccaggctggtctcgaactcctgacctcaggtgatccacccgcctcagcatcccaaagtgctgggattataggcgtgagccaccgtgcccggccccaccctgacaattctttttttttttttgagatggagtttcacttttgttgcccaaactggagaccggaactggatccctgatcccctgctgtgtgccaggtccatgctcggtgctgctgatgccagtggatctcctttctctgtaggaggggagaataaccgcaagggagagggttcctagcacccacctcactctgggtgacctcccagggcctaagtggggagaggggcttgtggctacagtccataagcatgcctgcagctccccacctcctcccttcccacttggtcccttaggcataagaattgtcgggatggggccggatgcggtgctcacccctgtaatcccagcactttgggaagcccaggcaggcggatcacctgaggtcagaagttcgagaccagaccggctaatatggtgaaaccctgtttctactaaaaatacaaaaaattagttgggcatggtgtcaggtgcctgtaatcccaactacttgggaggctgaggcaggagaatcacttgaacctgggaggcagaggttgcagtgagctgagatcgcgccattgcactccagcttgggcaacaaaagtgaaactccatctcaaaaaaaaaaaaaaaaaggaattgtcggggtggggccgggcgaggtggctcatgctaggcgaggtggctcacgctgtaatcccagcactttgggaggccaaggcaggtggatcacctgaggtcaggagttgagaccagcctggtcaacatggagaaacgccatctctactaaaaatacaaatattagccgggcgtggtggcacgcgcctgtaagcctagctactcgggaggctgaggcacgagaatcacttgaactcaggaggcggaggttacagtgagccgagatcacaccactgcactccagcctgggtgacagagcaagactttttctcaaaaaacaaacaaacaaaaaagaattgcccgggtgggtgggtgagtgaactgcaaccttagtgctctagttgggggaggagggagacaggagactggagctggagtgaagagatggagggtgaggggagggggcaaacagaattgggatgaagagaagatgagaggtggagaaaaacagaagaaaagggaagaagaggggaagcaggagggagggaggggaggaaagagagaagaagagagggagggatgtatggagagatggaaagagtgaaagaaggcctttgacagggaaagggaaaagacaagaaagatgaggccagggcagggaggaggagaaggaaggtacagtctgtatctgtccttaacaggacatattatgagccactgaggcccaggtagaccacaagcccaactcctgcagggccacacccagcttgactttaaggctctagatttcaccatctgattcacatgtcttggggaaaaaaatggaagactccttccacctccagctagctgccttcccaggcctgccaaccagccttagaagactgtggtagaaggtgcagggcatggagccggtactatcctgatccgttttacccctgctagcacctagtaaccatctccttgccttccaaggttatagcaatcccctagttaatgatgaaagtaggaagaactctcgtgcattgctgatgggaatgtgaaatggttcagcagctatggaaagcagtttggcagttctttaaacatagaatgaccctatgatccaacagcccaaatgtccttcagtggatgaatggatacacaaattgtggtatatccatacaatggaatactattcatccataaaaaggaatgaagtactaatacatgcttcaacatggatgaacctcaaaaacatcatgctggctgggcaccgtggctcaggcctgtaatcccagtgctatgagaggccaaggcaggataattccttgaggccaggcgttcgaggccagcctgggcaatgtagcaagcccctatctttacaaaaaaatccccagtccccaccaaaatatcatgttaagtgaaagaagccagtcattaaaagtcatatattgtgtgattccatttatatgaaatattcagaataggtaaatccacagagatttgcctggagagacgggagaacagggagcaactgttaatgggtatgaggtttccatttgggatgatgaaaacgtgctggaactatatagagttgatggttgcacagtattatgaaagcactaaatgccactgagttgttcactttataatggttagttttattaatatactatgcaaatctcgcctcagaaaacaaagtaataatgaaagtaggagtctgccagggaattcaatgagtagaaccatctgaaaagttcagcttatcttctttggaacaaaagagcttgtgcccacatgagtcacagcctttcccggtgtgctggaacactgggcactgctctgaggactctcagaggatgctcgtaggaccttgagatgttttctggccccaggctgctccccgaagcctcttcctctgcctagccctcactccatgggggcctccctttcaggttcctgcctcccaagcaggtggcagacagttgatctgtgcttcgcatcttcagctaacatcgtgccatctgccccagtggcaggtccacccctctctgatcctttgctccgaacatagccttcaaagccctctagttttctttaccacaattttttttttttttttagtaagtgcagtgatgcgatcttggctcactgcaacctctgcctcccgagttcaagtgattctcctgcctcagcctcctgagtaactgggattacaggcacgtgccaccacgcccggctaatttttgtatttttagtagagatggggtttcaccacgttggccaggctggtcttgaactcctgacctcaagtgatctgcccacttcgacctcccaaagtgctgggagtacaggcctaccacagattgttttcatcaccccttaagtgaacctcctgctctctggaatctcacattccccacagcactctccccacatgccaggccctgggctgcctgctcagggtgcagcagagtggggaggagttccagggtgaatcaggctgttcactgctcctccctgctccaaagcttcctatagccccttctgctcaaagatcttccatggctccccattctcacaccaagggattataggaacctgaaccctttgaggtcctaacaagaattttgcattctctgtaaataaataaatgtgcccatgtacaagaaatgagtgggcctctttgacctctgcagcccatccaaggacctctaaggcagagctactcaaagtgtggtccatagaccagtgccagccactggttcacaagaatacagaaatggagagtaagcactgagaaacctttatagcgattgcctgtacatctaggcacatgaccacttttactgtattttacaaaaatatgggtatgcaatcaattggaaatttttttaaaaggcgggggtagtccttcattacagagtttgagaaacactaccctaaggaccctttcactgctgacctactcaataaattcaggctggcattccaggccctccacgaccccatcctctaatctttccagccttatttctggctacctcccacaacacacacacacccacacacacacacacacaatcttcccttcacactccatgtctttgcctatactgttcccctcccccatggggttgtcctttccttcctctgcacctgttgacacctgattctggcctcaaagcccagctcaaattccatttcctcagtaaagcctttccaaattccacccccttccttccttacacacataagcaaacacacaaacatattctagctgaactttgcactcccctgggctttcctaacacccatgtagctttctttgtggccgtctgtctcttcctagccaaggcagagctgtggtcctctctgccggtgcctcctggcctctcccgctctgggatgtccagcacctcgctgcatggattctgggcattgctatcctgatttgtaccccactcccctggcctctcctgtggttgctcctttgtgtccacccatcttctgtgctggcccctctgagctcccctcagcaaggactccatcccactccctgccccactcctgacttcacctcatcacctgggagatccgaccctctcagcaataactgctggtatatgactgggaccaaaaattagtgacatcttgacatgttaagaactgtaaaaaaaggctgggtgcggtggctcacacctgtaatcccaacactttgggaggctgaggtaggcagatcatgaaatcaagagatccagaccatcctggccaacatggtgaaaccccatctccattaaaaatacaaaaattagttgggcgtggtggcgcgtacctgtagtcccagctacttaggaggttgaggcaggggaatcgcttgaacctgagaggcagaggttgcattaagcattgagccgagattgcgccactgcactccagcctggcaacagagcgagactccgtctcaaaaaacaaaaacaaaacgaaaaaaaaaacactgtaaaaaaatactggcagggcgtggtggctcatgcctgtaatcccagcactttgggaggccgaggcaggcagatgcttgagcccaggagttccagatcagcctgggcaacgtggcaaaaccctgtctctctcttttttttttgagacagagtcttgctctgtcacccaggctggagtgcagtagcacaatctcagctcactgcaacctctgcctcccggtttcgagcgattctcctgcctcaacctcctgagtagctgggattacaggcatgtgccaccacgcccggctaatttttgtatttttagtagagacggggtttcaccatgttggtcaggctggtcttgaactcctgacctcgtgatccacccacctgggcctcccaaagtgctgggattacagatgtgagcgactgcacccggccaacgctgtctctattaaaaatacaaaaaattagttgggcatggtggcacatgcctgtagtcccagctacccaggaggctgaggtgggaggatcacttgagcctgggaggcagaggttgcagtgagccgagatcatgccactgcactctagcctagacgacagactgagactatcaagaaaaaaaggaaagaaaaaagaaagtaaaataatacattttgcttattttttattttattttattttttgagacagtgttgctctgtcgcccaggctggagtgcaatgtcccaatcttggctcactgcgacctccacctcccaggttcaagtgattctcctgcctcagcttcctgagtaactgggatgacaggtgcccaccactacacccagctaatttttgtatttttagtagagatggtttcaccacattggccaggctggtctcaaactcctgatctcaggtgatccaaccgctttggccttccaaagtgctgggattacagacctgagccactgcgccaagcccataagtgtttcaaatgaatcattatttctagttttgccctgattagtggatccatagcaaccaatcttcctcgatttggccacatttttctatttatgcgaattagccaggtgtgatggtgcacacccgtagtcccagctattcaaggggctgagacagtagggtcacttgagcccaggaggtggacactgcagtgagccatgattacaccactgcactccagcctgggcaatagagtgcgaccttgtctcaaaaaaaaaaaaaaaaaaaaaaaaaaaagaagaagaagaagaaggaagaagaagcagttcagcttcatcagagttagaaaaatgcctcaagaattctgcccaccttgagaaagagagggaaggagggcatgtttcatctgaaaagggagaaactaaaataatgatcaccgtgtgtgtgaaggaggagacaagccagggaacactctaggggtttcatgtcagcaagagagactgaaattagctctgagtgtgaacctcctggcagtgcaggagggatgatgaaggcctggcaccagggggaggatgctgggtgacttcctattcagagatcattcaaccaggattaagggtggaggcccagccaggcctgctgggaggcagaggaccggagcaggtgaccacttaagctgccatgcaagggcagagcctcgccgacagggagaggctgagaaacggattattaaggcagggtccagagctttagagtcttcaaagcaaccccataatcaaggcttcaaggaggcaagccaggattacgaataacctgttttcctgatgagaaaactgaagcccagagaagttaagaaacttgtttgaggcctcacaggtgagccaggacttgagcccagaccctcagttcttcagtccagtgagatgacccccactgccctgcctcttggggccagaagcttcccagataggacccaggcctcctttcttggtggctctgtgaacttccttaggccttctgcacccccacacccccatgccaccctctccaccaacaccccagccacacagccccagaacagggcagggaccgcggggagaggctgcaaatccctctcctaacaactgaactgagggaggaaggaggtgggaacaggtcccaaacttccatctcacttgtcctcgcccgtctccgtctcagactctcgtgataggaaagtaggccagtttggaatatgtcacggatattttcaacaaccccatctgtactatagcttcgcacacagcctaccggggtggagccagaggcttcctgccggatgaggaatacacctgctacctctggggctcagagcccagatgggggctggggacgtacacaggggactctgaagggccaggcatccagcagtcagggtagggcgggacaggagaccagctgtgtctgtcctcttcccagagcagcgggagcagaacagctgggacctacagacaccattccactgccctgcgacagtgtgccctcccagcctgtgggtggggcactgaggaaggagcaatcagtcctcagggaaagggatctggaaaagctttatgacagaggtggctgacatctgagttgggccttgaaagcaaagcagggttttgctgagtggaaaagaggaggagggtgtctctggccaagggagaatgttgagaaagctggggccagcgcgccggggccagcgtgcgggagctggtatggcttgggggtagagggctgcccagggagtggcagcaggagaggctgggaggtggcaggctagcgttggaggagctgtgaatggtggatgcccagctaaggagcttcaggtgggccctgcaggtgcccacggaggcttttaagtgatgtgattcaggaagaacatgtagctatgggcaggaaggagtcaacttgggaggggcagggatgcagaggttgagtgagtgtcccttctggacaccagacaccctgaccacatccttctccagtccactagcagggtaacctctcctgactggggagagaggccaatgtaagaaataaattccttgtaaaagtattagtgacagccaggtgaggtggctcacgcctgtgatcccagcactctgggaggccaaggcgggcagatgacttgagcccaggaatttgagaacagcctggacaacatagcaaaatcccatctctacaaaataaaatgcaagaattagccaggcatggtggtctcagctactcgggaggctgaggtgggggtatcacttgagcccaagaggccaaggctgcagtgaaccatgatcataccactgcactctagcctgagcaacagagcaagaccctgtcttaaaaaaaaaaaaagagagagagagagagagagatagagatgatagaggcttactagctcaaggggaccaaggtcaggtcagggatgcatttcaggggattcacctggaaaggctggcccaggggacacccacatgcttttgtttactaagcaccacctgctataggcacttggcagcatggccttatttaaccttacaacaaggccaagtggtgcacatgcttccctcctttctattgatgtggaaacagaagctcaggaagttcgggtcccatccccaaagtcccacagtttgtaagtggcataagaatttggatccatgtgtctccagagcccagtacattcccttcatctcttttttgtttgtttgtttgtttttgagacggagtcttgctctgttgcccaggctggagtgcagtggcacaatctcggcgcacggcaagctccgcctcccaggttcacgccattttcctgcctcagcctcccgagtagctgggactacaggcgcccgcctccatgcccggctaattttttgtatctttagtggagacagggtttcaccatgttggccaggatggtctcgatctcctgaccttgtgatccacccgcctcagcctcccaaagtgctgggattacaggtgtgagccaccgtgcctggccctatccccttcatctcttaccacctcccagaacagagccacgactcccttccaaagaagggccccaacctttaccccctctcactgtctctacccagatccagggctccagggccccatggcaaccccacaaccctaactacactcagataaagaaactgaggccgagcaatggctcatacctgtaaccccagcattttgagaggccaaggtgggcagatcacttgagaccaggagttcaagaccagtctggccaacatagtgagaccccatatctcctaaaaatacaaaaattagctgggtgtggtggtgcctgtaatcccagctacttaggaggctgaggcaggagaatcacctgaacccagaggtggacgttgcagtgagccgatatcgtgccactgcccagcctgggtgacagagtgagactctgtctctaaaacaaaacaaaacaaaaagaaacaggttcagaagcatcaagtgacttgcccgacgacacaagttaatttgtgacgtaggcagaattcagagccagatcccttctcacacctacccactctgcctttcagccctgtgtctctggcagtttatttggtcgggagggggcatctggcatgtttgagagcgctcagcctctgtgtttcccagtttcttcatctgtaaaatgggcctgggagggttagtgagagtgcacaggtacaagtcactcagcacagtgactggtatgcactcaacactcaacaaatatttattgagcaactactaggagcaagatcatctttcagtggttggggcacaaccagaaacagaaataatctgctcttccaaagtggatattaagatgaggattgagaggagaatgggccagaggcacagggaatgtgccccataaatgctcccactgagtcccaccttctggctgtgggagcttgagcaagtctctctggtgtgctctacgtgtggatctagaaattgggaagaaggcggaagaagctccccactgtgtagccgctatgtattactatcactgccagcctctgtggtgagcagccctgttccaacccctgtgagaccagcaaagcccttcccaaccctgctctgtttttggccacatctgggtcaggcagacgggtgcacgctttgccttctgttccctcccttccaggacccacagctctgctccttgtcctgttgcagactcacagctgcccagcccccgtccaggcccagccctgaatccgacgcaagcatcctgtcggaggctgtaagggctggtgttcaggggacacctttgaggccctgatgctgccctgagcgtcgggctccaactccttacttccaagggttgggctgcacttctggccaaaatcaaggagctcctcacagaaagacaaggaaatcaaggtctagctctaggaacataaaataatcatagttggggtaattcttaagcacttaggatattattttatttagttccatctgcgagtataaaaccccattttagagttgataaaactgaggctcagaaaagtgaagtgacttgcctgaggcatccaaagcccctctcttctttacttccagattgatggaaacacttggctctgaatccctggactgtgtgtccaacttccaggccgtggctggactccagtccccaagtgtaaccagaggcaggggatctgggaccccaggactggggagaaagagtctggcacctccccatggctgttgcggctcacattgtccctttcaggaacagctgctgctcagtctccttcacccccaacctcagggtcaggaagtggggccaccgttgggaggtgggatcaggcccttcctaggtccccatcgctgtttccaaaacatcattctgttactttcttgcaaaagcctctgctctatccatctgtgccaccctcaccgtgccacctacagtggccttgtccattgaactcgcaatactgcctctatttgttgaagccttttgacatcccaattcctagcatatcctgggtaacttcaaagcctcagcctctcagtgctgtgaccttcacatgcctgatcactttccactgtacccatagccttgtttccatctagacactgttaccatctgtatgtgctcatattttcctctctggagcatcgtccactccctctattcaactattcgtcatacaaccgttcttcaatctcccaccaactgatccagaggtgcattccccatccatcagttcccttctgccttcactcttttttttttctttttaatgaggcagggtctcactctgtcaccgagactggagtgcagtggcgagatcttggctcactgcaatctccgcctcctaggctcaagcaattttcctgcctcagcctcccaagtagctgggattacaggcatgcgccactaccacccggataatttttgtatttttagtagagacagggtttcaccatgttggccaggctcgtctcgaactcctgacctcaaatgatccacctgcctcagcctcccaaagtgctgggattacaggcgtgagccaccgcacccggcccactctttcttctcttgtcagcccagagtccctggtttgtcagatcatcttaactccccacactctgtattttggggttacacttccctgacaaaaccctaacatttagacttctgattcaagatggttacccttaacacgtatgtttgcccctccatcctggacaatccctttgaaatgacacaaaaaaatatcctggggttttaaaacaggcttgatttactgatagcacaacctaacagagaaggaatctatgacatcatagagggctccactaagagagtgaattttccccgaagagccctagacttgtgtctcagcatgggaataaggcagggatgtccacccccatcatccctagtcagcactgtagttcagccagtgcaagaaaggggaaaagacatcagatttgaaaggcagcagcaaaatgatcattatttacagatggcatgaatttctatgtaaaaaatctgatggaatttgttaaatggctattacaactaataagtaagtttaacaagattgtaggagataagatcaatatataaaaatcgattacatttctatatactagcaagtgaactattggaaattgaaattaaaaaaaaaaaaactctgtatagtagcatccaaaaaatatgaaatatttagggataagtctgacaaaggatatacaagacttgataccagaaactatgaaatttgcttagaggaattaaagacctgaatatcatccctagtcagtgttgtagttcagccagtgcaagaaagggaaaaagacatcagatttgaaaggcggcagcaaaatgatcattattcacagatggcatgaatttctatgtagaaaatctgatggaagctgggcgcagtggctcacgcctgtaatctcagtactttgggaggccaagactggcggatcgcctgaggtcagaagttcaagaccagcctgggcaacatggtgaaatcccctctctactaaaaatacaaaacttagccagaacagtggcacatgcctgtaatcccaactactcaggagggctgaggcaggagaatcacttgaacccgggaggtggaggttgcagtgagccgacatcacgccactgcactccagcctgggcgatagagcgagactctgtttcaaaaaataaaagaaagaaagaaagacaaagaagaaaagcacaagggatttagaatagtcagaacaattttggaaaagaaggggaaaaattggaggacttacactatctaactttaagatgattataaagcgacggcacaatcaagacagtgtcatattggcatcaagatgggcaaatagatcaaggcttgtaaacagatccatgcacatatgttcaactgattttcaacaaagatgtaaaggcaatctagtggaagaaagactgtcttttcgccaggtgcagtggctcacgcctgtaatcctagcattttgggaggccaaggcagttgggtcacttgagctcaggagtctgaagccagcctaggcaacatggtgaaaccctgtctctaccaaaaatacaaaaattagccagtcatggtagcatgcagctgtggtcccagctacttgggaagctgaggcgggaggatcgcttgagcccaggaagtaggctgcagtgagctgtggtcatggtgctgcactccagcatggacaacagagcgagatcctgtctcaaagaaaatataaataaacagtaagttagctggttgttgtggcacgcacctgtagtcctagctactcgggaggctgaagcaggaggattacttgagcccagaagttcaaggctgcagtgagctacaatcacaccattacactccagcttgggtgcaagaacaaaaccttgcctaaaaaaaaaataaaaagaaaaaagaaaaggttgggtgcggtgggtcacgcctgtaatcccagcactttgggaagccgaggcgggcagataacctgaggtcaggagttcaagaccagcctggccaacatggtgaaaccccatctctacaaaaacacaaaaattagccgggcatgatggtgggtgactgtaatcctagctacttgggaggctgaggcaggagaatcacttgaactcgggagacagagattgcagtgagccaagatcacgccactgcactccagcctgggcaacagagcgagactcggtctcaaaaaaaaaaaaagagaataaaaaagcaagccagactgggaaagaatatttgcaagcatatatggataaaggacttttatccaggatatataaagaactctaaaatcccaataataagaaaacaaacaacccaatatttaaaatgggcacacggaggcaggggcaatggctcacgcctgtaatcccagcacttggggaagccaaggcaggtggatcacccgaggtcaggagtttaagactagtctggtcaacatggcgacaccctgtctctactaaaaatacaaaaattagctgggcgtggtggtgtgcgcttgtagtcctaaacactctggaggctgaggcaggagaatcgcttgaacctgggaggcagaggttgccgagatcgtgccactgcactccagcctgggtgacacagtgagactccttctcaaataaataaataaataaataaataaataaataaataaataaaatgggcacaagagccgggcacggtactcgcacctgtaatcccagcattttgggaagccaaggcagaaggattgcttgagcccagaagttagagaccagcctaagcaacataatgaaaccctgtctctacaaaaaatgtttaagctgggcgcggtggctcatgcttgtaatcctagcactttgggaggctgaggcaggtggatcacctgaggtcaggagttcgagaccagcctggtcaacgtggtgaaaccccgtctctactaaaaaaaaatacaaaaattagccggacatggtggcaagcgcctataatcccagctactggggaggctgaggcaggagaattgcttgaacccgggaggcggaggttgcagtgagctgagatcgctccactgcactccagcctgggtgacagagcagtagtctgtctcaaaaaaaaaaaaaaaaaaaaaagtttaaaaaactagctgaccgctgaccactgtggctcgcgcctgtagtcccagctacttgagaggctgaggtggaaggatcccttggaagtcaaggctgcagtgagccacgattgcaccactgcactccaatctgggcaacagagcaagatcctgtttcaggaaaaaaaaaaaaagcgcaagattttggatacttcaacaaagaagaagatatgcagatggatatggaaagagacccatcactagtcattagagaaatgcaaattgtggtttcacaatgagacatcactattggaataccacagtatcaagcgctggtgagaatgaggagaaaatgaaactcatacgctgctggtgggtatgtaatatggtacgaccactttggaaattagtttggcgggggttttttttgtttgtttgtttgttttttgtttttgtttttgttttgagacagagtctcgctctgttgcccaagctagcgtgcagtgacgcaatctcagctcactgcaacctccacttcctgtcttcaagcaattctgcctcagcctcccgagtagctgggaccacaggtgcctgccaccaagcccagctaatttgttttgttttattttgagacggagtcttgctctgttgcccaggctggagtgcagtggtgcaatttcggctcactgcaaactctgcctcctgggttcaagcgattctcctgcctcagcctcctgagtagctgggattacaggcatgcaccaccacgccccgttaatttttgtatttttagtagagacggggtttcaccatgttggccaggctggtcacgaactcctgacctcaagtgatgcccccacctcggcctcccgaagtgctaggattacaagcatgagccactgcacccggccacataataaaaaattattatgctggatgaaagaagaaaaatgaaaaagaggagtatctactgtatgactgcatcaagaaaatgcaaactaatctatagggatggaaaacagatcaatggttgcctagagatgaggggagagttgggggagcaaaggggcatggggaaacttttggggtgataaatatgttcattatcttgacttgatggctttgaggatatgttcatatgtgaaaacttatcaaattgtacattttaaatatgtgtagtttattgtattgtcaattgttcatcaataaagctataaaaaggtaaataaaaagaagcaagaatcaaataaaagagttagtctaagaaaagaaatgagatataaatactacaaaaagagcaaaatcatcactacatgcagattacattattgtctagttagaaaagtcaaagattcaactgaagccatttagatcacatcagcaggttcagtaagatggccaaaagaaaaatatacaaaaatcaatagttttcttttttaccaagcaaaaacaattttaaaatgttagaaaaaaattatctaattcgtgatagcaattgaagctatgaaatacccaggaataaactttacccagaacatacaagaagacctgaataaacagagagacctatgccatcttctcaaaatggaagaacactccggaaaagctctcaattttcccccagattactctataaattcattgcaactccagtttaaatttccagtggaattatttaaccaaaactagagaagataattctaaaattcatctggaagagtaaatgggtaccaagaacaacaacaacaaaaaaagtagttaaaaataaggataatggaccaggtgggaattacttccattaccactaatccaaatgtaccataaaacaattattattatagcaagcatggatttgttttcctagttcacaaatatttacgaaataaccaagtaaatgaataggcaaacagaacaatagaatgcatcatacagagacagtctccaaaacgtttttcatgtagtgaatattttagcataaagacttatcatgtatttctattatttttatttattttttttatttttttattttattttattattattatttttttgagacggagtctcactctgttgcccaggctagagtgcagtggtgcaatctctgctcactgcaacctccgactccttggttcaagtgattctcctgcctcagcctcccaagaagatgggattacaggtgcccaccaccatgcccggctgattttggtatttttagtagagatggggtttcaccatgttggccaggctggtcttgaactcctgacctcaagtgatccacccgcctcggcctccaaaagtggtgggattacaggcttgagccacctgtatttaatgtatttctattaaatatgtcctggatatccatgagtccctcaaaagcaacatgccccagattgacctaccttcttattcatgcacctcttcctactccacagttccagacaatcactcaaccaggaaaagtagtcaccctggatccctccttttcctcccactcactctctcattcagttttaccttttaagatatttctcaatctccacctcccaccacatggaaatttagcacatgataaaaacagcatttcaaactagcaaggaaaagaaaccgtgctggaataagtggctatccatctatgaaaaataaatacttaagtcagatctatacataacaatgaattccagatggattaactaagtacataaataactacaaaagcaccaggaagaaatacaggagggtttggttttttttgtttttatttttttatttttttgtttgttttgttttaatcagacagtgccagaagaaggagaacattttttgtaatttggggataagaaggactttcataagacatgaaattcataaactataatgaaaaatatcaaaagatttgattacagtaaaagacaccataaagtaaaaaaagggaatgctaggccgggggcggtggctcacacctgtaatcccagcactctgggaggccgaggcgggcggatcacctgaggttaggagttccagaccagcctggccaacgtggtaaaaccctgtctctactaagaatataaaaattagctcggcgtggtggaacatgcctgtaatcccagctactcaggaggctgaggcaggagaatcacttgaacccgggagtcagagggtgcagcgagccaagatcgtgccactgcactccagcctgggcaacaaaagtgaaactccatctcaaaaacaacaaaaaagtgaatgctaaagtaggagttttgcaatatttaaagcacagatagagttacctgctaattattatccctaatatacaaaaggatcctacacatcagtaagaaaagatcagaaaatccaacaggacaaagggcgaaggtaatgacaggacaatttatgctttttttgtttttttgagacagagtctcagtgtgttgcccaggctgaagtgcagtggtgtgatcatagctcatggcagacttaacctcctgtgctcagcctctcaagtagctagaactacaagtgcacaccaccaagcctagctaatttttagtatttttattttttgtagaaacagggtcttgctatactgcccaggctggtcttgtattcctgggctcaagcaaccttcccacctcagcctcccaaaatgttggaattacaggcatgagccactgcacctggtagagatacatttttgtccattaagttggtaaaaaattaatgcaattgataatgtttggtgttcacatgagcgcagatacaagggaactctcaaacattgttgacgaatatacaaaacaatacgacagtttgggaggcaattgatctgtactcaccaaaatgttaaacaaaccctttgagaaagctactcctttttagtaaaaatctgttgttttagctttcccagcacccattaccccttcagaattctggcaactgcccttccctcaccccagattgtctgcagaaccacttgtctcctactgtccagcaagcagtttgctggggctggctccgcctcccagttgcgggggtgagttctgtgacttaaacttgcccaatcagtgtattccatcccccacctcaagcaaagtgattggtttagggcaggacatgtgatctaagtgagagccaaattagagaccgccctgtgacttttccagcctcccagagaagagcaggtggagtgtggccatcttgactttccatgcaagaattgatctgagaatgaagccaaaacaaaggaaatccaagtgctagtgagagattatgaaggcaaaatttgggcacctggacccagctatacttgaattcagctgtccctaggaattgagtgatatgagccaataaaacaccctccatggccaggcacagtggctcacgcctgtaatctcagcactttgggaggccaaggtgggcagatcatttgaggtcaggagtttgaaaccagcctggccaacatggtgaaacccccatctctactaaaaatacaaaaattagccgggtgtggtggcacgcgcctgtaatcccagcactttgggaggccaaggcaggaggatcgcttgaggccaggggtttgaaaccagcctgagcaacttggtgaaatctcatatctacaaaaaatacaaaaactagcctggcatggtggagtgtacctgtagtcccagctactcaggaggctgaggtgggaggatcacttgagcccaggaggtcgaggatgcagtgagccgagatcacactgttgcattgcagcctgggcaacagagaagatcttgtctcaaaaataataaataaataaataaataataaaatacttgagggggaaaaagtttcttagaaccatgtggaaatactacttcttttttgttttgtttttattttgtgtttgtttgtttttgagacagagtctagctctgttgcccaggctggagtgcagtggagcaatctcggctcactgcaatgtccgccttccgggttcaagcaattctcctgcttcagccttccaagtagctgggattacaggcatgcgccaccatgcccggcttatttttgtatttttagtagagacggggtttcaccatattggccaggctggtcttgaactcctgacctcgtgatctacctgtgtcggcctcccaaagtgctgggattacaggtgtgagccaccacacccggccttcgtttttaattttaaaatacaccaagacccgcagtggatacctgaaactgcagatataccaaatcatatatgtactatgttttttcctgtacatgcaaacctatgacaaagtttaattttaaaattatgcacaagaggctgggcacagtggctcacgcctgtaatcccagcactttgggaggctgaggctggtggatcacctgaggtcaggagttcgagatcagcctggccaacatggcgaaaccccgtctttactaaaaatacaaaaattagctgggcgtggtggcacatgcctgtagtcccaccttctcaggaggctgaggcaggagaatcccttgaatctaggaggcagaagctgcagtgagccaagattgcaccactgcactccagcctgggcaacagagcgagactccatctcaaaaaaaaaaaaaaaggcacaaaaagagatttacaacaattaataaaatagcacccctccccctccccctccctctccccaccgtctccctctccctctctttccacagtctccctctgatgctgagccgaagctggactgtactgctgccatctcggctcactgcaacctccctgcctgattctcctgcctcagcctgccgagtgcctgcgattgcaggcgcgcgccgccacgcctgactggttttcgtatttttttggtggagacagggtttcgctgtgttggcggggctggtctccagctcctaaccgcgagtgatccgccagcctcggcctcccgaggtgccaggatggcagacggagtcgcgttcactcagtgctcaatggtgcccaggctggagtgcagtggcgtgatctcggctcgctacaacctccacctcccagctgcctgccttggccccccaaagtgccgagattgcagcctctgcccggccgccaccccgtctgggaagtgaggagcgtctctgcctggccgcccatcgtctgggatgtgagtagcctctctgtctggctgcccagtctggaaagtgaggagcgtctctgcccggccgcccatcgtctgagatgtggggagcgcctctgccctgccgccccgtctgggatgtgaggagcgtctctgcccggccaccccgtctgagaagtgaggagaccctctgcctggcaaccgccccgtttgagaagtgaggagcccctccgcccggcagccacaccgtctgagaagtgaggagcccctccgcccagcagccaccccgtctgggaagtgaggagcctctccgcccggcagccaccccgtccgggagggaggtgggggtcagccccccgcccggccagccgccccctccggaagggaggtgggggggttagccccgcgcccggccagccgccccgtccgggagggaggtggggggggtcagccccccgcccggccagccgccccgtccgggaggtgaggggcgcctctgcccggccgcccctactgggaagtgaggagcccctctgcccggccagccgccccatccgggaaggaggtgggggggtcagccccccgcccggccagccgccccgtccgggaggtgaggggcgcctctgcccggccgcccctactgggaagagaggagcccctctgcccggccagccgccccgtccgggagggaggtgggggggtcagccccccgcccggccagccgccccgtccgggagggaggtgggaaggtcagccccccgcccggccagccgccccgtccgggagggaggtggggggtatcagccccccgcccggccagccaccccgtccaggagggaggtgggggggtcagccccccacccggccagccgccacgtccgggaggtgaggggcgcctctgcccggccgcccctactgggaagtgaggagcccctctgcccggccagccgccctgtccgggagggaggtgggggggtcagccccccgcccggccagccgccacgtccgggaggtgaggggcgcctctgcccggccgcccctactgggaagtgaggagcccctctgcccggccaccaccccgtctgggaggtgtactcaacagctcattgagaacgggccatgatgacaatggcggctttgtggaatagaaaggcgggaaaggtggggaaaagattgagaaatcggatggttgccgtgtctgtgtagaaagaggtagacatgggagacttttcattttgttctgtactaagaaaaattcttctgccttgggatcctgttgatctgtgaccttacccccaaccctgtgctctctgaaacatgtgctgtgtccactcagggttgaatggattaagggtggtgcaagatgtgctttgttaaacagatgcttgaaggcagcatgctcgttaagagtcatcaccactccctaatctcaagtacccagggacacaaacactgcggaaggccgcagggtcctttacctaggaaaaccagagacctttgttcacttgtttatctgctgaccttccctccactattgtcctgtgaccctgccaaatccccctctgcgagaaacacccaagaatgatcaataaaataaataaataaataaataaataaaataaaataaaatagcacaattataacaatatacttattgtattcctcctacctgttttcagaactcgattgaccttgggtaactaaaactgtagaaagtgaaactgtgaataaagtggaactactgtatgtctatgcatacaaaaaggtctggaaatatagacagacacacacatccccacaccctcacacacacacacacacacacacacacggacacacacactattagcagtaattatccctaagggagtggcaatgggagccaaaggaatccactgttgtgtgttttttgtgttttttgtttgtttgtttgttttgagacagagtctctgtcacccaggcagtgcagtggtacgatctcagctcactgcaacctcctcctcccggattcaagtgattctcgtgcctcagcctcccgtgtagctgggattacaggtatgagccatcacacctggctacttttttaatttttagtagagacgggttttcaccatgttagacaggctggtctcaaactcctgacctcaagtgatttgcccgcctcggcctcccaaagtgctgggattacaggcatagtcactgcacccagccccaaaggaatccacttttaatcctatacacatctttatgatttgaatttttcttttcttttttgtagagatgggatcttgctgtgttgtccaggcttgtcttgaactctaggcctcaagtgatcctcccgcctcggcctcccaaagtacttggattacaggcatgagccaccatgcccagcttgaatttttctaaagagcaatgaattattcattcaacaaatatttaaataggacctgtcttgaccaatcactgttctaggttaaggccatagcattaaacaaaacggacaaaatccttgctttcatgatgggagggggcatcaatatattttaaaaatgatatctaggtggggtgcagtggctcacgcctgtaatcccaaaaattttggagaccgaggcaggcggatcacttgaggtcaggagttcgagaccagcctggccaatatgggaaaaccccatctctactaaaaatacaaaaaaattaggtgggcattctggcacatacctgtagtccagctacttgggaggctgaggcaggagaatcgcttggagtcaggaggcggaggttgcagtgagccaagatcatgccaatgcactccagcctgggtgacagagtgagactccgtctcaaaaattaaaataaaataaaatgttaaaaattgatgaacccaactcttggcttttatcgtgcctgcatccgggcagctgagtatcactagagaaaagcacatagctgagaagactgggaccaaagaaaatggtggtcctcgatgttatatggaacctgaatgtggcttgacaatcctggctatgcttcagtgattaactccctacctgctcttcaaagtgacaacttctaacatctcccattctccttccttaaactgtttaaaagagtgattgctggggccaggcccggtggctcatgcctgtaatccgagcactttcggaggccgaggtgggtggatcacgaggtcaggagttcgaaaccagcctggccaagatggtgaaaccccatctctactaaaaatacaaaaattagccgggtgcagtggtgggcacctgtaatcccagctattcaggaggctgaggcagaagaatcgcttgaacctgggaggcggaggttgcagtgagccaagatcataccactgcgctctagcctgggtgacagagcaagactccttctcaaaaggagtgattacaattgtcattaggactattctgtgtctctgccttctgggcacaaagcaagatgctatttcccttaaagttagaatggtcggccaggcgtggtggctcacgcctgtaagcccagcactttgggaggctgaggcaggcagatcacgaggtcaggagatcaagaccatcctggctaacatggtgaaacctcatctctactaaaaatacaaaaaaaaggtagccgggcgtggtggcgggagcctgtagtcccagctacttgggaggctgaggcaggagaatggcatgaacccgggaggcagagcttgcagtgagccgagattgcaccactgcactccagcctgggcgacagagcgaaaaaaaaaaaaaaaaaagttagaatggctacgcaacttcatttggtcaacgaaagttggacagaagtgatgtgtgttacttccaggtcaatgcttttttaaaaaaaatcagtagttttgggggtgcaagtggtttttggttacatggatgatttatatagtggtgaagtctgagattttagtggacccctcaactgaatagtgtacactgtacccaacacatagttttttatccttcaccccgtacccacccattctgcttcttagtctccaaaatccattatataatttttttttctttttttcagacggagtctcgctctgttgcccaggctggagtgcaccggtgcgatcttggctcactgcaacctctacctcctgggttcaagcaattctcctgcctcagcctaccaagtagctgggattacaggtgcccgccaacacacccggctaatttgtcttcatttcttcatctcctactttataacgccctccacgctggtgccaccccactaactccattcaaactactcttccttaggctgtggcatacctgttttagtccttacctaataggacctctcagcagcatagagcagttacccatttttctctttacaaaaacactctcggccaggcacagtggctcgtgcctgtaatcccagcactttgggaggccgaggtgggcagatcacctgaggtcgggagttcaagaccagcctgaccaacatggagaaaccccatctctactaaaaatgcaaaattagtcaggcgtggtggcgcatgcctgtaatcccagctactagggaggctgaggcaggagaatcgcttgaacctgggaggcggaggtttgcagtgagttgagatcgcaccattgcactccagcctgggcaacaagagcgaaattccgtctcaaaaaaaacaaacaacaacaacaacaaaaaaaacccacactctcttcccagcttctaggatactgtactttgttttttgttttttgtttttgttttgagacggagtctcactctgtcacccaggctggagtgcagtggcatgcttttgcctcactgtaacctccacctcccaggttcaagcaattctcctgcctcaccctcctgagtagatgggattacaggtgtgtgccaccacgcctggctaatttttgtatttttagtagagacagggattcgccatattggccaggctggtctcgaacttctgacctcgtgatccgcccgcctcggcctcccaaagtgctgggattacaggcgtgagccaccgcgcctggccaggatactgtactttcttggtttccttctcacaacctctctgactacttcttctcagtctccttggctcaacccaactatgaaatgttcctcagttttttgtcctaggcctgtttctatcctcactccctgacactcccatggccttaattaccacccatattttagcaggtcccaattaatatctccagctcagatagaaattctagtcctatatattgaattgcataccaggactttctccactaggttgtcaactagtccaaaactgatctcattatctttccccttagttctgtttctcctcctgggttttttaaataaatactggtgccatccaccaaacctcttaaaccagaaataggagagtcttccttgattctttactcttgcactctataccctaaagcaggagtccccaacccccgggccacagactgtggcctgttaggaacagggccacacagcaggaggtgagtggctggcctgcattcccgcctgagctccgcctcctgtcagatcagcggcgacattagattctcataggagcagaaagcctactgtgactgcgcatgcaaggaatctaggttgcatgctccttctgagaatctaaataatgcctgaagatccgaggtggaacagttccattccaaaaccaccccccatcgcttctcggccttttggctaaaatcaagtgtaaagccacctcccaccccaccatctgtggaaaaactgtcttccacaaaaccggtccctagtgccaaaaaggttggagaccactgttctaaaggtaatcagtaagttttttttttttttttagacagagtctcgctctgttgcccaggctggagtgcaatgacacgatctctgctcactgcaacctccacctcctgggttcaagcaattctcctgcctcagcctcccaagtagctgggactacaggctcatgccaccacacccggctaactttttgtatttttatagagtagcgggtttcatcatgttggcgagactggtctcgaactcctgacctcaagtgatctgcctgcctcggcctcccaaagtgctgggattacaggtgtgagccactgcgcctggtcacaatcactaagttctatttttcctacctcccaaatatctagtttgttcacatctccttatcttcaccaccatgaatctaattcaggatgccagtttcactcacctggacagctgctccgatctcttaactggtttccctgcatctgtgcgtgtgttcttccagtcagatcttcatactgcaaccagagagagacctttgcaaatacaggaacaaataggaaacaaatagaatatggtaaattaaacccaactctattagtatttacatgaaatttaaaggggctaaatcctctaattaaaagaaaaaagatgtcagactgcattaaataatccaattatgtgctgtttacaagagccacatcttcaatataaggatgcagaaaggttaaaattaaagggtgaggcctgggtgtggtggctcatgcccgtaatcccagcactgtgggaggccaaggcaggcagatcgctttgagctcaggagttgaagaccaacctgggcaacatggcaaaaccccatctctacaaaaaaattaaaataaataaataaatactacaattaaaggatgaaaaaagatataatgcaagcgctaaccaaaataaagttgtagctatattagtatcagacagagtaatctttagggcaagaagcattactaaaaacaaagaaggaactgggcagggtggctcatgcctgtaatcccagcattttgggaggccaagacaggtggattgcctgagctcaggagttcgtgaccagcctgggcaacatggtgaaaccccgtctctactaaaactacaaaaaaattagccaggtgtggtggtgcacgcctgtaatcccagctgcttgggagactgaggcacgagaatcacttgaacccaggaggtggaggttgcagtgagccgagatggtgctgttgcactccagcctgggtgacagagtgaggctctgtctaaaaaaacaaacaaccaaaaaaagaaaaacaaaaaagagggacatttcacgataataaaagggtcaattcaacaggaagacataacagttctaaatactcatctgataatataacctcaaaatacataaagcaaaaatggacagaattaatgaacaggccaggcatgttggctcatgcctgtaatcccagtgctttgagaggtcaaggtgccaggatctcttgagatcaggagttcaagaccagcccaagcaacatagtgagaacctcatctctacaaaaaactaaaaataaaaataggtaggcgtgatggcatgcacttgtaatcccagctacgcaagaggctgaggtgggaggatccttggagcccagaattcaaagctgcagtgagccatgatcatgccactgctttccagcctgggtgacagagcgagaacctaactcaaaaaaaaaaaaaaaaaaaaaaaaaaaaattaaagaagaaataggcaaatccccaaaattcccaatcatagttggagatttttgacacagctctcccagtaactgatagacaagtcgattttttaaaagtcagtagaggatttgaacaatgtaattaaacaaatttccctaactgacatttataggatattattttaaaaaccaggaggaaaccaacaactacagaaggcacatgcttctcaagtaccaattttgacacttaacaaaattgaccatatgctgggccataaagcaagtgttaacgaatttccagttcctgaaatcatgcatagtatgttctctggactcagtgaagttgagctagaagtcaataactaaaagataactagagaattctccccaaatattcaaaaattaattaataagcctctaaataggccatgggggtcaaagaagaaaccaccatggaagttataaagtattttgaactgaatgataatgggatattgcccaaaacatgtttaaggagaaatgtatagacttaaagtcatagaagaacaaaaattaatgatttaagaatccattaaaagaaatttttagaagaagagcatttaacactccccttcccccaaaagtagaaggaacaaaatgttaaagataagagaagaaatcaataaaataggaaacaaatatagaatggagaaagtcaacaaagacaaatactggttctttggaaagatctctaaaattactaaagacctctaaaagtaataaagagcaggaaagattaaggtaaaaagagaaggagggaaggagatcacaagtaacaaatattagaaatataaggccaggcacggtgactcacgcctgtaatcccagcactttgggaagccgaggagtggatcacctgaggtcaggagttcaagaccagcctggccaacatggtgaaaccccatctctattaaaaatgcaaaaaattagctgtgtgtggtggcaggcacctgtagtctcagctactggggaagctgaggcaggagaattgcttgaacccaggaggtggaggttgcagtgagccaagatcgcgccattgcactccatccagcctggatgacagagagagactctgtctcacaaaaaaaaaaaaaaaaaaaaaaaaaaaacaaagaaagaaaagaaaagaaagagagaaagaaagaaagaaagaaaaagaaaataaataagaaataaaaaaggaaacattactatagaccctacagatgttaaaaagataatagcaggatattataaacaactttacatcgacatttgaaaattgagataatatgggcaaattccttaagagaaaacacaaagtgtcataagaatatttaaaaattttataagaattttctgatttttgagatcacaatacacctatatctgttaaagaagttgaaggtcgggcgaggtggctcactcctgtaatcccagcactttgggaggccaaggcggctggatcacaaagtcaggagttcaagaccaatctggccaacatggtgaaaccccatctctactaaaaatacaaaaattagccaggcgtggtgtcaggtgcctgtaatctcagctacacaggaggctgaggcagagaattgcttgaaccgaggaggcagaggctgcagtgagctgagatcgcatcactgcactccagcctggacaacaaagcgagactccgtctcagaaaaaaaaaaaaaaaaaaaaagttgaattaatttaaaatcttcctggccgggcaaggtggctcatgtctgtaatcccagcactttgggaggccgaggtgggcggattacctgaggtcaggagttggagaccggcctggccaacatggtgaaaccctgtctctactaaaaatacaaaaattagctgggcatggtggcacacacccgtaatctcagctactcaggaggctgaggcaggagaattgcttgagcgcgggaggcaaaggttgcagtgagccgagatcatgccactgtactccagcctggccaacagtgagactctgtctcaaaaaaaaaataaaaataaaaataaataaataaaataaaataaaataaaatcttcccctagagaaaacttcaagctcgggcaggttcactgaggcaattcttccaaacatttaaggaagaaataataccatcttatacaaactcagaggacagagtaaaaaggaacacttcccaattcattttatgagacttgcataactgtaataccaaaagctgacaaggatagtacaaagaaaggaaagtcacaggccaggatctctcataaatgtatatacaaaatcctacacaaaatatagcaaacgaggctgggcacagtggctcaggtctgtaatcacagcactttaggaggctgaggcggatggattgcttgaggtcaggagttcgagaccagcctggccaacatggtgaaaacccatctcttctaaaatataaaaattagctgggtgtggtggtgggcacctgtaatcccagctactagggaggccgaagcaggagaattccttcaacccaggaggtggaggttgcagtgagccaagatcacgccactgtactccagcctgggcaacagagcaagattccgtctcaaaaaaaaaaaaaaaaaaaaaaagacaacaacaaagccaggcgcggtggctcatgcctgtaatcccagcactttaggaggccgaggagggcggatcacctgagatcgggaatttgagaccagcctgaccaatatggagaaaccccatctctactgaaaatacaaaattaactggatgtggtggcgcatgcctgtaatcccagctactagggaggctgaagtaggagaatcgcttgaacccgggaggcagaagttgcagtgagccgagatcgtgccattgcactctagcctgggcaacaagagcgaaaactccatctaaaaaaaaagaaaatatatatatatctcaaaccaaattgagtaatacatttatttttaaccttttattttgaagtttttaaaattgttattattattttggaggcagggtctcactgtattactcaggctggaatgcaatggtgcgatcacccctcactgcagcctcgacctcctgggctcaggtaatcctcccacttcagcttcccaagtagctgggactatacaagtatgtcatcaccccatctggctaattttttattttttagagagacagtgtctctctatgttgcccaggcttgtctcaaactcctgggctcaagcaatcctccaatcttggctaatttttgtattttttgcagagactaggtctcactatgttgtccagggtggtctcgaactcctgagctcaagtgatccacccaccttgacctctcaaagtgctgggattacaggtgtgagccactgtgcccagccagtatacattttttaaaaagataactcagaataatgaccaaatgcagttttgtccagtaaggcaaagtaagtttaatataccaaaaaatgtaattaatcatattaacaaaataaagtaaaaaatctagacaaccacttcaatagatgcagaaaaagcatttggcaaaatttagtcattattcatgatttttgaaaactagaataaaaagcactttcctcaatttgatagaagttatctcagaaaaaaaatacccacaattgacctcatatttaatggtacaatattgagaactttgctgctaatactggaaacaaataaataagaatgtctattctcatttcttctattcaacattatcctagctagctcaataaagaaataaaacaacttacgagcataaagactgaaaaagaagtaagtccgtctttgtacaacaaggttatatacatagaaaatcctgaagaatctgcaaaaactattatattatagtcagtgagtgaaattagcatcaatattgtcaacataccaaaaagtcaattgcatgtctaccagcaacaaatagttgaaaaatcaaattttagaaacaccataggcaataatatattaaaaaaacactaataattttatgaaagatatgcaagacctctattataaaaatacaaaaatgttgcttgaagaaataaaagacaactgaaatacatagagagatgcatcatgttcatagaatagactcgatattgttaagatgtcatgtctctccacgttgatctatagattcaatgccatcacaatcaaaatgtcagcaggtttttaaaatagaaatggacaagctgattccatcatttatatggaaatacaaaagacctagaatagacaaaacaattttgaaaaagaagaacaaacttgaaaaacttacactattggattttaagacttactacaaagctataataatcaagataacataggctgggcatggtggctcacgcctgtaatcccagcactttgggagtccagggtgggcggattacgaggtcaggagatgaaggccgtcctggctaacacggtgaaacccctctctactaaaaatacaaaaaattagcggggtgcggtggcggacgcctgtagttccagctactcaggaggctgaggcaggagaatggcgtgaacccaggaggcggagcttgcagtgagccgagatcgcaccactgcactccagcctgggcaacagagcgagactctgtctcaaaaaaaaaaaaaaaaaaaaaaaaaaaagataacatagtattggtataggagagacaaatagattagtggaaaagcgtgttcataaacaaacccacatatataataattcatttttgacaaaagagtcaaggtacttcagtggggaaatgaaagtgccgtcaaggggagagacttcaactctcaccttacaccatttgcaaagattaattcaagttagatcatggacctaaatgtaaaaagctgaaactataaatctcctggaagaaaacataagattttgcagccttggagtaggcaaagatttcttaggacaaaaatgtaaccataaaggaaaaaaaatgatcaattggacttccttaaaattaaaaattccattcatcaaataatacctttataaaatgaaaaggtaagacaccgaatgagagaaaataatcacctcatatatgtgatacagacttatatacagaagaaatgaataacttccacaactcaataataaacaaacaatccaattttttaaaaaggcaaaagacttggcagagtgcagtggctcatgcctgtaatcccagcactttgtgaagccgaggtgggaggattgcttgagcccaggagttcgagaccagcctgggcaacatggcagaaccccatctctacgaaaaatacaaaaattagccaggtgtggtggtgcaagcctgtggtcccagctacttgggaggctaagatgggaggatctctggggcccaggggtgaaggctgcattaagccatgattgtgccactgcactctggctttggtgacagagcaagaagaccctgtctcaaaaaaaattaattaattttaaaaaagacttgaagaaacatttcacaaaagaagatatttgaggccgggcacagtggctcacgcctgtaatcccagcactttgggaggccgaggcaggcagatcacttgaggtcaggagttcaagaccagcctggacaacatggtgaaacccagtctctactaaactacaaaaattagctgggcatggtggcacgtgcctgctcaggaggctgaggcaggagaatcgcttgaacctgggaggcggaggttgcagtgagccgagatcgcgccactgcattccagcctgggtgacagagcaagactccgtctcaaaaaataatatatattattatataacaataataataataactaaaacaacaacaggctcatcagaatggttaaaattaaagtctgaaaatactactacatgttgagaagatgtggacaaccagaactcactgacatggattataaaatagtacaacctacaaccactttgaaaaacagtttggcaatgaagatgcacctaccctatgactcaacaattccactcttaggttttacccaagagaaatgaaaacacaagtccacacaaagacttgtataagaatgtttttggggtttttattgttgctgtttttttttgtttgtttgttttttgagtcggagtcttgctctgtcgccaaggctggagtgcagtggtgcgatctcggctcactgcagcctcctcctcctgggttcaagccattctctcgcctcaacctcccaagtaactgggattcccagtgcagaccaccccacccggcaaatttttgtatttttagtagagatgggtttcaccatgctggccaggctggtctcgaactccttacctcaggtgatccgccctctttggcatcccaaagtgttgggattacaggcatgagccaccacccctggacaagagtgtttatagcatttatattcataataagctcaaactggaaacaacccaaatgtccatcaacatgtgattgaataaataagttgtaatatattcatgggaaaccactcaccaataaaaaaggaactaactacaggtgcatgcaagaacataataaattgcaaaagtcttatgattagttttttaaaaaagccagacacaaaagagtacatattgaataatttcatttatatgaagttctagaatagggaaaaattaatctatggaatagaaataagaagagtggttgcctctggagatttcctggaaagaggcatgagggaatttactgggatgatgaaaacgtttgatacattagttggggtagcgggtttgtaaaagccatttactggaaaatctgtacattttactgtatgtaaattacacatcaataaaaaattgaatcgtgtaagtagcacatcaagtatatatcaattatatatatctatacatataaacaattgtttaagaaaaattatagttagcaccatacttaataataaaatactgaatgttctctgagtttgggaataagacaagaaagtccactttcaccacttttattcaacatcacattggttttaactagtgcaattaggcaagaaaaggatatgaagactggaaaggaaaaagcaaaactataattatttaaacaacatgattttgtatatagaaaatccggctgggcgcggtggctcatgcttgtaatcccagcatttgggaggctgaggcaggtggatcacctgaggtcaggagatcgagaccatcctggctaacacggtaaaacctcgtctctactgaaaatacaaaaaattagcggggcatggtggcgggcgcctgtagtcccagctactcaggaggctgaggcaggagaatggcgtgaacacaggaggcagagcttgcagtgagctgagatggcaccactgcactacagcctgggcaacagagcgagaccccgtctcaaaataaaaaagaaagaaaatccaatagaatctgcagataaactattagaaataataagtggttagtggccgggcgcggtggctcatgcctctaatcccagcactttgggaggccaaggcgggaggatcacctaaggtcaggagttcgagaccagcctgccaacgtggtgaaaccccatctctactgaaaatacaaaaattacccaggcgtgatggcacgcacctgtaatcccagctacttgagagactgaggcaggagaattgcttgaacccaggagacggaggttgcagtgagccgagattggagatccactgtgctccagcctggatgacagagcgggctccatctcaaaatgaaaataaaaataagtagtttgcacaagaatgggcaaatagactaccactggtacagaatagaatgcagaaacagacctacagatacatcgtcacctaatttacatcaaagacccaactgcaattcagtggggaaatgatctttccaataaatagtgttagagtaattggctagccacatagaaaaaattgagtcttggctctcccatttcgagcctacactcagattaatttgagatgtataatagacttcagtgcgaaagataaaaacaataaaccttctagaaaaattatggaaggatattcttatggccttggggtaggcaaagatttcttgatcaggacacaataagcattaatgatatatttgacttcattaaaataaacaagctctgttcatcaaaagataccataaagatgaaaaatcaaaccacagaatacataactcctattaactaattttaaaaagtaaaacaatctaattttagattgtttaaattgtttagatttaaacaatctagatttaattttaatctagatttagattcaaataggcaaaactgttgaacgcatttcacaaaagagatatccaaatacccaacaaatatgtaagtactcaaatcaccaggcatcaggaaaatgcaaattacagctgcaatgagatacctattctgcacatcgacaagtatggctaaaatttgaaaaactgaaaatttatggtgcgagtgtaaattggtatcattcttctggaaaactctttgacaacttctgtgaaagataaaaataagcttaccttattatctagcaactctaaggtaagtacacaagaaacataaacgtgtatttccagcaaaaatcatgtatagccaaaaactagaacaaacctgaagtccatcaatagtacaatagataagtaaattgtgttatagtcacacaacagaattccatacagcattgaaaatggtccaggcacagtggctcatgcctgcaatcccagcactttaggaggcagaggcgggaggtttgcttgagcccaggagttggagacaagcctggacaatatagtgtgaagccatcactaccaaaaaaaataaaataaaattgactgggcatgggtggcacatgcctatggttccagctactctggaggctgaggtggggcaatcacttgagtccaggagttcgagagcagcctgggcaacatgacaaaactgcaacatggtctgtacctaaaaaaaaatacataaattagctagtcccagctactcaggcagctgaggtgggaggattgcttgagcatgggaggttgagcctgcagtgagctgccatcaccactgcactccaacctgggcaacagagtgagaccttgtctcaaaataataataatacattcaacaatatggatgaatcttacagacataattgttgagtgaaagaaaccagatataaaagagtatgtactatataataattccatttctatgaagttcaataacaggcaaaaaaaaaaaagaaagaaaacccacaaacaagaaaaacaaaactatagtgggccaggtgcagtggctcacacctgtaatcccagcacgttggaggctgaggccagcctggccaacatggtgaaatctcgtccctactaaaaatacagaacttggccaggcatggtggcacgtgcctgtaattccagttacttgggaggctaaggcaggagaatcacctgaacccaggaggtagagattgcagtgagccaagatcatgacactgcactccagcctgggctacagagcgagacataacaacaaaaccctatgttaatagaagacagaaacagtcacctgtagggacaggtttgggatgggggtgccttctggagatggaaaatgttctgtgctgggtggggtgtctcacgcctatgatcccagcattttgtgaggccgaggctggtggataacttgagcctaggagttcgagacaagcctggccaacatggcaataccccatctctactaaaaatacaaacattaggtcaggtacactcacgcctgtaatcccaacactttgggaggctgaggtgagagaatcaactgaggttaggagttcaagaccagcctggccaacatcgcaaaaccccatctctactaaaaatacaaaaaattagctgggtgtggtggtgcacacctgtaatcccagctactcaggaggctgaggcaggagaattgcttgaacccaggaggcagaggttgcaatgagccaagatcacgccactgcactccagcctgggtgacagagcaagaccctgtctcaaaaaagaagaaaaaaaatgttctgcattgtgaatctgggaatggttatatcatatacctatgggaaaatttattaagctattacataagatttgtgtcctttgcttatgcatgttatacctaaacaagataagagtcctttaaattcattttggcatggcctatcctctattaacatagccactccagcattcctttttttttttttttgagacagagtttcactcttgttgcccaggctggagtgcaacggcctgatctcagctcactgcaacctccacctcccgagttcaagcgattctcctgcctctgcctcctgagtaactgggattacaggcatgtgccaccatgcccggctaattttgtatttttagtagagacggggtttctccatgttagtcagactggtctcgaactcccgacctcaggtcatccacctgccttggcctcccaaagtgctgggattacaggcgtgagccatcgcggcccggcctccagcattcttttgattaatgttagtatattcttgtactttctacctatttgtgccttttttctttttttttctttctttctttctttttttttttttttgagctagggtctcacgcccatcacccaagctagagttcagtggaatgatcttggctcactgcaacctcaaattccaatactcagtttcctgagtagctggcactatcagaacatgccaccactcccggctgatttttttgtatttttagtagagatgggttttcaccatgttgcccaggctggtcttgaactcctgggctcaagcaatctgcctgcctcagcctcccaaactactgggatttcaggcatgagacaccgtgcccggccttgtgtctttatttttaaagcgggtctcttgtagatagcatatagatgggtgttgctttttcatctgccttttaattgggttgtttagtttatgtatatctattttaattgttgatctgattgagtttaaatctaccatcttggttgcacaactgtataaatttattcagtatcattaaactgtttatttaaaatccaccatcttgctgtttttttgtttggttttgttttgtttttcgagacagagtcttgctgtgtcacccaggctggagtgcagtggcacgatctctgctctctacaaactccgccttcagggttcaagtgactctcgcgcctcagcctcccgagtagctgggattataggcgcctaccaccatgcccagctaatttttgtatttttaatagacacagggtttcaccgtgttggccaggctgatttcaaactcctgacctcaggtgatctgcccactgtgacctcccagagtgctgggattacaggtgtgagcgaccgtagctggctgttttttttttttttttttttttttgagacacagtttcactctgtcccctaggctggagtacagtggctcgatctcagctcactgctacctctgcctcctgggttcaagtgatcctccttcctcagcctcctgagtagttggaattacaggcatgcgccaccatgcctggctaatttttgtatttttagtagagatggggtttcgccatatttgccaggctggtcttgaactcctaagctcaagtgatccacctgcctcagcccccccaagtgctgggattacaggtgtgaaccactgtgccttgcctagattgattgattgattgattgattatttatttattttgagacggagtcttgctgtgttgcccaggctagagtgcagtggcgtggtctcagctcactgcaacctctgcctcccgggttcaagtgattctcctgcctcagcctcctgagcagctggaattacaggtgcctgccaccatgccgggctaattttttgtgtttttagtcgagatggggtttcatcaacatgatggtctcaaattcctgaccttgtgatccgcccacctcggccccatgaagtgctggaattacaggtgtgagccaccatgtgtggcctagatttattttctaataacaattcttgagttttgttctgggatgaagcgaagctacttcacaaaagtttggtccctttgaggctaatttttaagctttgttaggcgggactagaacagactttagtctagggctaattttgccccattactgagtcaatacccttctgagtactatctgatgccctgttagttataatgttttgtctctctgctagcaggaccataaccaattcccagccttgtgtgagtctcggaatcattctctctcctccgttggatggtcttgacctggcctcaggtggtttcctcacacacatgcactgattagtactcggctgaagactcaagtgggatcccctgcaaattttcaggattctcttcctctgtctggcacttttttttttttttttaagacagggtttcactcttgttgcccaggctggagtgcaatggcacgatctcggctcaccaaaacctccacctcccaggttcaagcgactctcctgcctcagcctctcgagtagctgggattacaggcaactgccaccatgcccggctaattttttgtagttttagtagagacggggtttcaccacataggccaggttgttctcgaactcctgacctcaggtgatccacccgcctcggcctcccaaagtctgggattgcaggtgtgagccaccgcgcctagccctctgtgcagaactcttttctaataccttacccagtgaacttctgggcctctcttgtctcccaacttaacctcctcaactcaggtagaccatcagactctgactgacttactctgctctgtactgtggctggaaactcactccaggtaataggtttgaaaaattgtaggagctttgtttctcttctgtcagggatcactgggctgtgctgcctgatgtccagtatctgaaccccattgttctgaatattctgtctggtttttttagttgtttctagtgggaagataaatcaattacctgttactccatcttacacagaagcagaagctcagctcattcattttggagattcatgtcctacaattctgtgaatcttttttttttttttttttttttttttttagacagagtcatgctctgctgcccaggctggagtgcagtagtgcgatctcagctcactgcatccttaacttcctgacctctcaggctcaagcaatctgcccacctcagcctcccaagcgtgtgggactacaggcacgtgagccaccacacccaactaatttttgtattttttgatagagatggagtttcaccaagttgctcaggttggatgtgaaatttttaaaaaattgattgtcaatttccaactgggtactgtagctcactcctgtaatccaagcaatttgggaggccaaggtagaaggatcacttggggccaggagttcaagaccagcctggacaacacatcaagatcctgtcactacaaaaataaataatttaaaacatcagctggatgtggcggtggcatgtgcctatagtcccaactactggggaggctgaggcaggaggatcacttgagcccagcagttccaggctgtgtggtgacccatgatcacaccactatactcctgcctgggagaaagaccctgtctttaaaaaaaaattttttttaaattaaaagtcagtttcctgctctcttcatctctgtcttctgtttcaggattagtcagatattggagccaccacactccagtctgggagacagagtgagactctgtctcaaaataataataataataataataataataataataataataataagcacatcagttaccactccttgagcgcctaccaaattaccaaaaacctgccattttaatagattttcttattgaatcatcacaggaattccatgaagtaaatattattatccctctttcacagatgaggggactgagggacaaagagattaactcactagctcaagatcataccgtttgtggctgggtgcggtggctcatgcctgtaatcccagcgctttgggaagccaaggtgggtggatcacgaggtcaggagatcgagaccatcctggctaacacggtgagaccccatctctactaaaaaaaatacaaaagattagccgggcgtggtggcaggcgcctgtagtcccagctactcaggaggctgaggcaggagaatggcgtgaacccggaaggcggagcttgcagtgagccgagatcgtgccactgcactccagcctgggtgacagcgagactacgtctcaaaaaaaaaaaagatcatactgtttgtggaatggcagaagctgggttgaaactcagccatgtggggcaccaaaaaccgtgatcgtgaccacagagggcagctggaattcaaggggcctgcctgtttttctgcaactcaccatccacggatttcctaagttttttgtgccaggctctggggaacctaagtgaatgtgggcccaacagatgggtgttcaccagagagtgagccaagaaagaggggtggggacagacagaggtccctatagaagtagaaaaaagcaagacaaggccagaagactgtgtctttcttcttctttttttttttttcttttttttcgacagagtcttgctctgtcgcccaggctagagtgcagtgacacaatcttggttcattgcaacctctgcatcccgggttcaagcaattctcatgcctcagcctccagagtagctgggactacaggtgcgtgccaccacgctgggcctttttttttttttttttttttgagacggagtcttgttcttgttgcccaggctggagtgcaatagtgcaatcttggctcactgcaacctccgcctcctgggtttaagcgactctcctgcttcagcctcccgagtagctgggatgacaggcgcctgccaccacccctggctaatttttgtatttttaatagagatggagttttgccatgttgcccaggctggactcaaacacttggcctcaggtgatccacctgccccagcttcccaaaatgctgggtttacaggcatgggctaccatgcccggccatgtgtcttttgactttaaaggagcagcttgcaaatcatattcaaagcagtatgcatatgagatgtaaattgcatcagaaatgagcatctggtatttttgagtcaatagctcaggcacttttgggagggccctccccagctttctcccagggttgcctggggtcaggatcccttgcaagacctattaactaaacttgagatgtagcatgtgcctctgccaaacccagctctggatagaaaggggagtgctgctgaccatgtcaaggtgggttctttattctcacatttgtctgacaaatacttgtaaagcacctgctgagcataaggtgctcaggcagatgcagtagacaagcaggaaagtcattatttctaacttttaggaacataccctctactcggggaaataaataaatacagtaaagactccagtattgtctagagtctagaccaggctttctcaacctcagtgctattgatatttggagctgggtaattctttgttgaagggggttttccggagcatcgtaagatacttagcagcgtccctgagctctacccattagataccattagcaactcctgagttgtgacaaccaaaaatgttcccagacattgccaaatgtggggagggagggcaaaatccccccagttaagaaccactgctcaagaccctaaggctatgagcttttcatacagacccagcgggctgaggacttgccttcaaggatgcacgttgttccatatttttgtattttaaccactatggaaggtgctcttctcaaatttatcatgtaattcttttccttgaagcccagacctgccccgcaaccacagcatgcgctataattccatccagatcccggagattcttgaggaccaatcaacgttgcccccagatggaatggccccagcctgcagagcctgtcaggtctgcagtctgctctttctgctcttcagcatctctctacctcctctttccctgtcatccaattggccctgtgggactgctcgttatattcttatcgactctggcccccattccctttaattggcagcttcgaggagttaaggaacttagttttgcagatcagtgtttttctaactgtgccccgccaagcactgggaatccccagggccctctcagaagcccccgtaggatgtagtggggtaggaggaggaggaggagcttccgggaggctggaggagtggaggcggcaggtcgccctgccccagccctcagtggccccacagcagcttggctgttcttggttttgtttctctctgcttctgcatgatatctttgaacaaaaagtcccaagtgtacaaaaagtcccgaaaggcgttcgcaaaccactgacctagatggagggaattgtgaggagcagagggcaccctcttataaaatgcctgtacttcggtgcagggtttggtggtgtcggcggtttggaggccctttaagcttcctaactccttgtcactggtggatggtggggtgccggcaggagggcatccctttacataggggctcattgctgtatggatgtgggcagagaacgaacaggagagggagactgaactcctggcttccacatcaggcacaaaccccaggacgtgaagatccctaactgcctcccctccggcccccaaatagcagaacagagagtaatcgcactgcagtggcagtggaaagagctgaagctagacgccgggaagaacttcccaacttggcacctgggggaggagcagctgggagcaaatgtggaactgtctgaggtaggaggaggtcccctttgcaggctgagagataatcacatacatcctcccactcacacccccttcgtctgctcctgccccaaccagggctgactccagaaattctgcacagataaacctccaggccctgaaactcagcaaggggtggggagagtgggacctggggccatgccccctctgttgctaagaagccctttctgggtgagcgtggtggctcacacctataatcccagcactttgggaggcccaggcaggtggatcatttgaggtcaggagttcaaaaccagcctgaacaacatggtaaatccccatctctacaaaaaaaaaaaaactatatatatatatatatacccacacacacaaaaattagccagcgtggtggcacgcctgtaatcccagctactcgggaggctgaggcacaagaattgcttgaacccgggaggcagaggttgcattgagccaagactgcgccactgtactccagccttggtgacagagcgagactccatctcaaaaaaaaaaaaaaaaaaaagaatccctttctgtctgacccccaccagacggcagcagaattgtgtggagagcttgttcccgagggacctgggggatggagcaggcaatcccttctccctctgacctccaggccccactgagccctctggacacaagcacaatcaggcacttcatgcctggcaagggtcagaatgaaaggcctgtgtctgtctgctccccgcctccctttctccatcttcagataattccatctgcccttgggccagagcctcatctttctccctcctttccccctcctgcccgctgagttatttacaaatatctgggaacagaagggatttcttcagtgctctgtagtgcctgccactgactcaggtctctaacatgctggggggcagcgagggtaaagatgcttgtggtcctctcctgtcacccacaggaacccaaagagctcaatacactgggcgcagtggctcatgcctgtaatcctagtattttgggaggctgaggtgggaggatcacctgaggtcaggagttcaagaccagcctggccgacataatgaaaccccatctctacaaaaattagccaggcgtggtggtacgtgcctgtaatcccagctacttgggaggctgaggcaggagaatcacttgaactcaggaagtggaggctgcagtgagctgagataacaccactgcactccagtctgggcaacagagagagactccatctcagaaaaaaaaaaaaaaggctcatgcctgtaatcccagcactttgggaggccgaggtgggcggatcaagaggtcaggagatcgagaccagcctggccaacatggtgaaaccccatctctactaaaaataaaaaaaaattagctgggcacggtggcaggtgcctgtagtcccagctacttgggaggctgaggcaggagaatggcgtgaacccgggaggcggagcttgcagtgagctgagatcgctccagcctgggtgacagagcgagactccgtctcaaaaaaaaaaaaaaaaaaaaaaaagaccttggccttggctagacacggtgtaatcccagcactttgggaggtgaggccgaggcgggcggatcacctgatgtcaggagtttgagaccactctggccaagatggtgaaaccccatctgtactgaaaatacaaaaattagctgggcatggtggtgagtgcctgtaatcccagctactcaggaggctgaggcagagaattgcttgaacccgggaagtggaggttgcagtgagctgagatggcgccactgcactccagccggggcgacaaagcaagactctgtctcaaaaaaaaaaaaaaagaaaaagaagagctcaatggctccccaaggtcacaccgtggcagcccattttctgtttcccactctgttctcctacatggtttgtcccgggtacagggtgaaccaggaagaggatgagttaccgccatttccccatggagtcaaagggcttcttcctcctggaaaatccccggacacggaagtgactaagacctagtggagctgctgaacctaaaaagtaagttcaaattcggggcccctccttctgatagccatgtggcccaaagaagggaagctgtccgtgcagctgggggagctgatctccaacatgttctccccaagcccacctcctgccaccccaccccaatgctgaagcccagacaagcagccaggaactggcgtcaccatccccagtcccgcagacgctcatcccaccgccaccacccgtgagcaaccattccggggcctgacattctgtcggcttcacaccacctcccggagccccagccagaagcacttcctggataaaatattaaacatgcaaatctgagacagagccttaacgagcgacagactgcacgaccacagcctggcaaacgagacgcacgacgtccgggggtgggggggtgagaggtatatatagatatagactttggatctatctgtgcaatgtgtgtgtaaggcagagaacagcagggatggaaaagtaccgcagcagcctccagctggggtggcctgaggtggcggcaggaggctggccgggagggagggtcaagaggagccccagagccaggctcagagtgagggatgacaaaagccctttgtgcttggattctgtgcagggggtgccagacacgctgggcaggggaatgggcattggttttggagaaggaagttggttagaggcaaggcctccgagtggaagaaaagaaggggagacagaggagaggcatagacctgtgtggcaggagtaggggtgtctagagggagaacacctccactcacatggggcacggggcggggggggggtgtctcttgtcaccacactggcccaggtgtcatggagctcacgtggaattaggtcagcaaggttcctgccttgattcaggtcagcatgcatttgatgatggcgcttcttaaacttgtacatgtgccaggatcgtctaggatcttgttggtaaatgcaattccgattagggaggcctggagtggggcctaagagtctgcattactagcaagactcaggtgatgccagtgctgctggcctcccggcccccataaagtggcgagggactacaaggagctagagcaacacggagctccctttggctcaggcgaacacaggacccacaagagtccagagtgggatcagaggctgagcccaaaggcgtctggcctaaggggaggtccacggtgctgatcaagatggtgtctgtccacagtgtccagcctgtcatggaattagaactataggacacctaacttggcccaaaccaacacagaacccagcccagggtgtcagggagcctgtagcagcccacactgagacagggctcacagggcctggagtgacatggagcctggtggggtgggactgaatgatagggcgcccatgttgcttcaggaaatcacagagcccacagggattagactgaagtggtgcccgttttggtccagagtgacatggaacccacagtggccacaggggtctggactgacttggaactcagaaaggactaacagaggtgatggccacatttgctcagggtgacatagagctcatcaggacttggaccaactggaccaaccaggcacccaacacagagccccagacatgacagggggctctccgtgcaaactccaggttgcagaagacaggaagggagggtccggaggaggctgggagaggagaggagcaggtgccggggagcaaggctgctctgtggctgctgtgagcctgcctgccgtgggctgagtgctacttggctgggccccagagaggaggtgctgctgctgcaaggctcagatggaggaggaagtgggaagctggaggcagggtgggcgcgaggctggggtggggagagcacttcctcccccaaagaggcttggcacgggggctggcccactgcccatgtggatcctggcatttacactccccgctcccattatacacaggcgatgcggtgggttatgggtctgggacttacggacctcagatcaaggagcattcagcgctgggggaacagacaaaccgatgtctccctgaatggagcactcagggtccagaggaggaagggttctccctcctggcactggaggtccttttgatgcagccaggtccctaggcagagtgccctggccctattgtgtccttgcccagaggaatgcagaaaacaatgcaggctgccccttcccacatccctggcaagatctagaaataggtgcccacaccttcgtcttaactaaacccagccctccctcccgcttctggtcagatgcctctcagtccttgtccctaccaaggggagaagcccctcagaggctacctgcagcttctctttatgccaaggttaatgtagaggaggaagggatggagggaggggcattactatgaatttattttttgagacaaggtcttgctgtctcacccagaccaaagtgcatcagcacaatcatagctcactgcagccttgatctcttgggctcaagcaatcctccccgttcagcctcctgagtagctgagctgggactacaagcacaagccaccacacctagccaatttttaaaaattttttgggccaggcgcggtggcttacgcctgtaatcccagcactttgggaggccgaggcgggcagatcacaaggtcaggaaatcgagaccatcctggctaacacgatgaaaccctgtctctactaaaaatacaaaaaattagccgggtgtggtggcgggcgcctgtagtcccagctgctggggaggctgaggcaggagaatggcgtgaacccgggaggcggagcttgcagtgagccgagatcccgccactgcactccagcctgggtgacagagcgagactccatctcaaaaaaaaaaaaaaattgtttacagagtctccctatgtttcccaggctggtctcgaactcctggcctcaagcaatcctcccacctctgcctcccaaagtgctagaattacaggagtgagccactgcacctggccaatttgaatggggagctggatgacgctccccatccagcctggtactgctgaagaatccaaccctaactccactcctgcccacacatctccaggctgacctagtttctgtttcaaggcaggggggacacatgttacacactcctagacacagagctgtgcagagccaagagatgcacacgcatgcacgtgggatagacgaatgcaggagatcgcacactcgaggccggtgcacacacatgcatatccagagactccttcctgactcacgaacaaacccaaggaccccctccagcagacacacagacagagctccctgttcacagggccacacagacacacatggacctcataagccataggcgtgattccccacaggggttccctactctctatccagctcctgctcccaggtccccactctctggggcacaaaaacagcaaaggcagtcctgctgccacactaccagggccatgggatcaaggatcaccgcaaccctgggaatggatccccagtctcccctcttctctccataagctcctgtcttttggaactgcagtgcttatttccccaggacaagtctctctgtgggagggaccaagggtggaggacacttcacttccctacttcccttctggtttttttgtttgttttgagactgtcgcccaggctggattgcagtggagtgatctcagctcactgcaacctccgcctcctgggttaagcgattctcctgcctcagccttccgagtagctgggactataggagtgcatcaccacgcctggctactttttgtatttttaatagaggcggggttttgccatgttggccaggctgttctcaaactcctgacctcaggtgatccacccacctcggcctctcaaagtgatggaattacaggcttgagccactgcacccggccttttttttttttttttgagatggagtctctctgccgcccaggctggagtgcagtggcgcgatcttggctcattgtaacctctgcctcccggattcaagtgattctccctcagcctcccaagtagctgggattacaggtgcccaccaccacccctggctaatttttgtatttttagtagagatggggtttcactacgttggccagactggtcttgaactcctgacctcatgatccacccgcttcggcctcccaaagtgtttttttgtttgtttgtttttctttttttttgagataagttctcactctgtcacccaggctgcggtgcagtggtgcgatcatagctcactacggcctcaaactcctgggctaaagtgatcctcttgtctcagcctcctgagtagctgggacaataggcacatgccactgtgcctggctaattttttaatatatttatttatttacttttatttttggagacagggtttcgctctgtctctctgggtggagtgtggtggggcaatcacagctcactgaagccctgacctcccaggctcaagcaatcctctcacctcagactcccaagcatctgagactacaggtatgcgtcaccacacccggctaattgcttattttttgtagatagggggactcactatattgcccaggctggtctcaaactcctggcctcaagcaatcctccctccttggcctcccagaatgctgggattataggtgtgagccactacactcagcccctcttcttcttatttttgttttttgttttttgagacggagtctcgccctgtatctaggctagagggcaatggcacaatctcagctcactgcaacctctgtctcctgggttcaagcgattctcctgcctcagcctcccaagtagctgggactacaggcacctgccaccgtgcccagctaatttttttttatttttagtagagatggggtttcaccatgttggccaggctggtctcaaactcctgacctcaagtgatccactcgcctcggcctcccaaagtgctgggattacaggtgtgagccaccgtgcccagcctgtctccaggctcttgtgtcaggtgtgtgtgcatgtgtgttcatgtgtgcgtgcacgtgcgtgtgtgtgtgcatgtgcataggagcaggagtctgagcccgtttgggaacacgcttgtccatccctgtccacctgagctctggagcccagcacctgccctccacagaggccttcctctcttctttccggtgtccccaacccctccctctctcctaacgcactgtaatcgtgctggatcctgggttcgttctagagccttcctcatctctgcccttcctcatccaagttcctcaaaagagatgcatgggctggatctgcttctttccctcccgtttcatccctactccccaggaagatctcactagagtcactggtgccatcctgcttgccaaggccagtggaccttcctcatcctgtatctgatcttgtttttttttttaagacaggatctcactctgccacccaggctggagtgcagtggtgcaatcactgctcacttcaacctccacctccccaggctcaagtgatcctcccaccttggcctcttaagtagctgggactatggcttgcgccaccacaccagctaatttttgtatttttagtagagacggggtttcaccatgttgcccaggctggtctcaaactcctgacctcaagtgctccacccgccttggcctcccaaagtgctgggattacaggcatgatccaccatgcccggctctatcccatctttgtgtgacattccaccctgttttcctcctttcttgatactctcctcctttgattattggatgagttagggtaagttgtgttcgttaggccaatattttattttattatgttttaattttccattgtattaatttggctaattattttttcattaggttaattctctgtattatttgggctatgctaaactgtttagcttagtctaagttgtactggttaggctaaactcctagaacaaagagatccaaaaaaagatgatggcttgaagaatgtaaaatttgcttctttcctgtgttgcaggtgaacactccaggtcagccgggagctctcacagccattcggggaccaggctccttccatgtgctgctgtgctgccccctagggccctgccagtgactcaggaccgaagctgagtgactgccatgccgggttccagccagcaggaagggcaagggagtgtggggcgggcaggcccagggtcttaaagcccaggctgggagaggcacacaccccttccccttcgcagcccagtggtgggaattaaatcacatagtcatacctgaccgcaaaggggctgggaaatgtgcctacccagttggcacagggagctcagatttgggtggacaatgagcagtggtcaccagagcccccagagcctccccctctctccctcctctccaccctctctctccccactctctccctggccattcctccccagcccccgcctttttttgttgttttttttttttgagacaaagcctccctcttttgcccaccacaggctggagtgcagtggcatgatcatggctcactgcttcctcgacctcctgggctcaagtgatccacctcaacctcccacaaagctgggactacaggcacgaaccaccatgcccagctaattttttttttttttttaatttttagtagagacaaaatctgactatgttgaccaggctggtctcaaactcctgggctcaagtgatccgtactccttgccctcccaaagtgctgggattacaggcgtgagctgccacggcacttggctcccctttgtaaatgtgccccagggctctgttcttggcccttttctcaccccacatgcatgccttggccattcccgtccaatcctgtctgatgccctaaagcctccctacctccagctcaggcctctctcagccacaaacccacgcaggcaacagggccaaatctgggactcaagccacactcctcctctgcctcaccccacattcaatctgtcaccaaagctggtgagtctaccttgtaaggaccccctcaccgagactgtcctctccttctccccgccgaccccgcccccgaatgggttctcacagcctccacccctgcccccctgcctctacccccagggactccacaccagcctcccatgaatcatgaaatgtgagtattcaccctgcctgttcctgagccctcttctctcacagtctgattgggtcacccttcaggggctccctcttgtcttcagaatcaactccttaccctaacatataagaccttttgtgatctgacctcggtctacttcatctcttgtcacatgtaccctgtgctccagccactcaaatcttggcacttttgtgtgtgctctgccccagtgcctcccggccttcacttcagggattcctatatccttgaagactcaattcagagagctccttctctgagaagccccctctgatgccctgatgctcttcccacatgctccactgttccctcaacctcaccagtctccacctctatgcctgtcttgtcctgattgctcacttacctctctcccctgctaggtggtgagctgtcggagagcaatatgaggttttagttatttctcatctccagtccttagcccattgttggagacagttaacgcttaacgcttgagaaatgttagctcctttctcttctcctttaaaactgtgacacaaaggctgggcacagaagctcacgcctgtaatcccagcactttgagaggccaaagcgggtggatcactggaggtcaggagttcgagaccagcctggtcaacatggcagaaccccgtctctactaaaaatacaaaaattagccaggcgtgatggctcacacctgtaattccagctactcgggaggctgaggcaggagaattgcttgaacctgggaggcagaggttgcaatgagctgagatcactccactgcactccagcctgggcaacagagcgagactctgtctcaaacaaacaaacaacaacaataaaaactgtaacacgtagctttatacataaaactaaaatctggaaacagcccaaacatccatcaacaggaaaacatatacattgcagaatattcattcaatcaaatactacacggtgataaaatgagttaactacagcttcatgcaacagcatgaatgaatcccatgcataatgttgaacaaaagaagccagacccaaaaacgtaccttccattcttatgagggtcaaaaacaagccgaacggatcttcggtgacagaggccggcatggtggtcatctccgggtcaggagatcaactgggagcaggcctcacacagcctcccaaaggctggaagtgttgcttatctaggtctgggtggcgatcacacaggtaatgtacatgtgtaatgatcatcaagctgaaattctggtgcattttagagtaggtaacttccctctgtttgtttaagtgccatgattttgtaataaatcatcgtggaagccgggtagagtggctcatgcctgtaatctcagcactttgggaggctgagtcaggaggatcccttgagatcagaagttcaagatcagcctgagtagcataatgagacccccatctctacaaaaaataaacagagctcacgcctgtaatcccagcactttgggaggccaaggtgggcggatcacttgaggtcaggagttctagaccagtctggccaacatggcaaaaccctgtctctactaaaaaaatagaaaaaaaaaaaattagccaggcatggtggtgcacgcctatagtcccagcttctcaggaggctgaggcaggagaatcgcttaagcctgggaggtggaggttgcagtgagccaagattgtgcactccagcctgggtgacagagcgagattccatctcaaaaaaaaaaaaaattggccaggcacggtggctcacacctgtaatcccagccctttgggaggctgaggcgggtggatcacaaggtcaggagttcgagaccagcctggccaacagggttaaaccccgcctctactaaaaatacaaaaattagccaggcatggtggcaggcacctgtaatcccagctactcaggaggctgaggcaggagaattgcttgaactcaggaggcagaggttgcagtgagccaagattgcaccactgcactccagcctgggcaacagagcaagactccgtctcaaaaaaaaaattaaaaataaacagaattagctgtgcatggtggcacgtgcctgtggtcacagctactcgagagggtgatatgggaagatctcttgagcctgggagatcaaggctgcgatgagccaagatcgcaccactgtactcagcctgggtgacagagtcagagcctgtttcaaaaaaaaaaaaaaaaaatcaccatggatggcaagtctgcgtctgagaggcactttctgttacagagtcccctgattttaggtgatgacactgagccccagagagggtaaaacactcaacactcagcttgagtcgctcagcacatctgtggagagtccacaccctaaggaggggactgcatgtcctgctttccccatgccactctagggaccttgggggcaggctctgtgtctttgtgtctctggaacagagctctgggacctctacatattggtgggggctactcccaccccataacaggttgctgctgggtggtgaaacatggcagcagtgtggtcatttagagcacaaactcaaaggacacaattccgtagctgtatgggcttaacctctgtgaaccccagttttctcatctgcaaaatggagctaatagtaccacggttgggcgcggtggctcacacccgtaatcccagcacattgggaggccaaggtgggcagatcatttgaggtcaggagttcgagaccagcctggccaacatagtgaaaccccgtctctactaaaaaatacaaaaattagccaggcatggtggcccacgcctgtagtcccagctactagggaggttgaggcatgagaatcacttgaacccagaaggtggaggttgcagtgagccaagattgcgccacggcattccagcttgggcaacagagtgagactctgtctcaaaaataaataaataaataaataaataaataaataaataaataaataaataatagtacctacctcatgttgtgtcctgaggattacatgagcaactaagcataatataacaaggcctggttccaaggaaatgccattacagtgcttgctatgataaccactcaggaggaaacctagtcagacagaccagagctactttgctcctccactggctgtgtgacctcaggcaagttaattaacctctctgagtcccatttcctcatctgctaaacaaatagtacttatctattgctatgaaagcaaaataatgcctgtaaaacacctgacacctgcttaagttccttgtgtgcagagaccacgtcttgcacatcgatccccctcagggctctcactccatggcctgggagaatgaatcccttccccagccacccttctctggctcgccatcctctttctggtgctagcagacagcagcatctagtggacaagctctggaactgcattctggccaagggtcactcgccaagctgctgtgcagtcatttaaatgaggctttttaaaaatgctttagacaagggtggaggggtcaggaggaacggaggtggggtgaaatgcattgggcaagtattcattaggtgcctgctgtgtgcaaggcactgatccaggaccttaaaaaatgaagcaagagatacaagatcactgtagaaggacacaagaaaaatcacaaataattataactttgtcatcaataccctaactttttatcttagagaaaatgtgaacacagcatagggggacttggcacactggacagtgtcttctcaggaagtgttttttgtttttgtttttgagacagggtctcgttttgtcacccaggctggagtgcagtggagtgatcacagctcactgcagccttgatctccctgaagtggctgagcaatcgtcccacttcagcctccagagtagttgggactacaggtgcacgccaccacacccagcttgttttttgtttttgtttgtttgtttgtttttggtagcatcaagttctccctatgttgtccaggctggctcaaactcctgggctcaagtgattctccccgccttggcctcccaaagtgctgggattacagacacaagctaccttgccagccttctcaggaagtttttacaattgcaggggcgatttttttttgaaatggttgttacatgtcaatgactctcagttaaggccaaggcaataaaatgaaagcttaggtcaggaaggttctgcctcgagtcccctgacccaggttctccatagacagaggggagcgggagtgtctggccccaaagccgcactcgccctccacactccacagtcccttcctaccagacacagaagagtgaagagggtctagaggtggcatgaagcacatctaactgggggaatcaaaaaatacttcatgggagagatgacattttgcattggagaatgaaggtaaagaaagcagggaggggcatgctgggggcgctggggaaggaagtgcattccagcctagtagaccaggtataccttcactggtataaagcgaagtaatgggaaccaagttggttgagggagctgggggttaaggccaaatcacagagggctccaaatgacaggccaaggaggctgcatttaatactatcaggggacccactcagtaagaaggtaaactgatctgagggcatcagagaaaaaccagacacccagaaactattaatagttaggtggctactgtcatagtccagcctagaggtaggggacactgcaccatgatggagtggagattagagacagaattgtgagatccttgggaggggagaagcagggggaggcttggaaatagatagctgtgggtcaaatgggaggacccagctgagaattcaaggtgctgagtccaggggaagtaatggggagaaaagcagagctgtaaccagaatgtggacttgaccagggggactgctgtgggcagggagctgtgggcagggaccaggagcttggtctttgacaggggcaaatgagttgccattgtccctgtggagatgcgggaccaaggctcaggaggggtgctggagggagaggaggcagggacagtcaagtgggagtcatttacccatataggtgcaagctgatgacctaggggaggaaaacagaatcctgcgggcagatagggtggagggcaggcgccaccggacttcatcggactttgtctttttaaagcttctgggggaggggggcaagagaaggaggagatggaagaagacagaggcgggacctttggggacagagacccttgtgagtgtccagcagtgtcacaggctatgcagaagtccaggagtggtggcagggaggcaactgttgaatttgaggttgggggctctcctggctgaccttggcaaaagcggtttcagggacagaagtcaggctgcagaggtctaagaggtgagaggcagaggagctggaggcggctgatgctcccgggaggagggaggagacggtaagcagggctgggataggggaaggtgagcgaggggttactctgggggtcctgccagaccctgaagaggagggtagagacccagaggcacatggagaggagaccctctgagaccctttgagacagaaggaaaacaggtgatgctgtaagagcttagagacccagacagaaataagactatgaccaccacatccctgacaaaccaacgtggtggccaccagccctagaggacatgggactggaggaagggaggggtagaagcaggggctgaagacacctgggagggagagcagacttcctcagaccctctcgggctccagcgtattggcgtgggagagggagtcccagattcccgggagctcagagcctagggaaagccaggggtccctttcccctttccccaggcggctcctgttcggagaaacttgtggccctcgcttggaagcacgcttttccctattccaaccccaaatactcagtacctgtttgcttcccccagaagtctgggcaagtttctttcttttctgggactcagtttctggggtgggctgaatgatggaacccaaaaagatgtgtccaggtcctaatccccagcccccactcccccagagcctgtgaatatgacttcatttggaaaaagggtctttgtaaatgtaacttaattaaagatgtcaagacgagatcatcctggattgtctggtgggccctaaagccaatgacaagtgtccttgtgacagacaggagaggggagggccataccatgggagaatgggaactctgcagccccaagtcaaggaacacctggggccacagaagctggaagaggcacggagggggcccttcccgagagccttcggagggagttcggccctgcaatgccttaggtttggacctctggtcccagtaaatggaagagaagaaatatcggggtttgttgttgttgtttgagatggagtctcactctgtcgccaggctggagtgcagtgtggtatgatctcggctcactgcaacctccgactcccgggttcaagcgattctcctgcctcagcctccagactagctggtattacaggcatgcgccaccaagtccagctagtttttgtatttttagtagagacagggtttcaccatgttggccaggatggtctcgatctcctgaccttgtgatccacccgcctcggcctcccaaaatgctgggattacaggcgtgagccaccttacccggccgcttaaatatctgtcttttaagccaccaagtttgttatgatttgtcatggcagccctggaaactaacgtagttccctattctgtaaaataactagaattaaatcttatttggccaaaaggtgtgttttttaactcgccaccccgcccccttccaggttgagttgtaaccctttcacttgcagggcgggggtgggggagtgagggtgggggcaggtgatgcagggaggaaagaacctaaattaacagcatctcctcctgccccgaagaggaggaaagtccaagaagagtatttcatgcccaccagcccttcctccttcacccagagctcacaccatcatcccgtgcccggctccaggcaggcgggtggggcagacgctgacccggagcgcgttactaaaaccaaggggtctttgaaaatcagggagtctgcctttccagacttctgacagcccccctcttcacagcgattctctccccaccccttgtgtcttcttcctcccgttctccattcttggggggcaaaataagatggagactcccgaagcacagggtggaaggcactcccccaccccttcttcctcctcctcccacaacacagctggagggggaggggaggtcagcagggttcacagaggccagatgttaaggaaaaagagagaagtgcccacccaccccacccccaccctcacccccaaggaaagaaaaatgaaaggagacagtttttaaaacaaacaaaacttttatggtccaaaacagtttttctcaagaatctgctctatgcaaacaataacaactttttacaaagcattttcacagaaaaggagacaagtccttccccagcgtgggaattgttcctctcgcacctcgttttcgggggaagagggggcgctattcactagtgcgggatggaaggcgcactgggtccctcagttgttcggcagctccaaaagccccagcttcccttcatacctcaacttgccatctccctaagacctaagctcccctgacctcacctgggtggaggagaaagcacttccaatcctctctgactcaagatcctcctagctggagggcatggcagagggcatgatccaggcctatctcacccctcccctggaaaacagaacctctgaccccaaacctaatcccctggccctgcccctttcggatccatcagatctctgacaactcccgcaatccctgaggctggggtgttgcggggggaagcttaaggtacctcagcccaggttccatccagactcaaactttgccccttcaaaccccaggggactcttgaagttaggccaagagtcctttcatttaccacctctgcaaagtgcagcttgttttgtttccactctttaagggggctgagtttgggtgtccaaagaatggacttgggcctgccttccacctccaccccctctcatccataaatcggtggaggccctcgaaaggcgacttgtttggtctgattttattgatttcttccaccttctattactttccctgggacagtgtctagccccttccccaggcaaagtaagcactttccaggagaggaggtccctcagccctacccgtcctaagggaagtaagttgggggagggggctgattaatcaaggttgggggaaatctttctcaccggccagaccttacactcggaaagcaaacaaggaaaaaacgggaactccaaaactggacaaaagggaaaggtcggcggctgaggctgaagatctcaccaattaagggtcacctgcacttgagggggcctagaaaggggacaggaagggggtgatcttcctcttacccaagttccctcacccattaaaggctccagcggtgcttggagcgttagggaaggcctgaggggagcaaagggttaaaggcctggacagtgggggtgggggatgcccccagggagctgccaatcatctccccacccccaccacagccccgcaccccaggctcgcccacagacacagtaacaaccggtttgtccatcaccgaggtctctctcttctccccttttttttgggtgggggggtgtctttgagcggtggcctcctttgctcccactggggtgcaggccctgcctccaacggtccgagatggaaggaggcagggattggaatctatgtcatcagccttctcccgactccagccctgggttcctctgcaaaggatgagggggagggactgtcaccccgaaaacttaggtgcttgaatgaagatcactgttatttaggtccctctgcccacagctcctaaaatgtaaaggaaggggacaaatgtgagaaacggggctccctcctcaagcccgcggtttggccatggtcccaacttttcccctttggcagaagtcccacggtcagctttcatccatgttgatcccccagaatttgaggccagggggctcagggacagcgggaccccccatctgccacctccacagcgggtgggcgggcgggggcttagagtctccctggaggcgaagcgaggatgccggctttaggtctccgtcttcccccaccaccagggccggggggcaggggaagcagttgaggaggctgaaggtgctcgtggtggggagcgtcggtgcagggcggcggggctgcgcggtgcgcggagggggcgccggcagccggcgtttcttggcggctccccgagccggccctttcgcaggcggccgctctggcccccggcgcaaactcggagtgtccaaggcgaagcccttcgcgtaacaccaaagtttcgaccggcggatcagacgatcgaaatgttcctggcggagatctccgggtgcggccggagccgggctggccgtcgaggggctggccgctggagcctcgggggcggccggcggggggtttccatcgacttcggcaggctggccgggcaggaacggccgcggcgccgtcccgggacccgcgggctcggtggagaggcccgcaggtggcgacggaggccgggaactgggttcctgaggcgggctggcggctgggccacgctgaggctcgagacccggggccgggcgaggcggggccgaggcgaagctggtcgtagattcccgagggtgcgggggcgcagggcagcggcccggaggtgcacaggagcgaacgccgaagtgcgggaaaccgcctccgccctcttcctcctctccgcggcgggggcacgctgcgacgtccgcatcctcgccggcggcggtgttaggaacgccgggccgcccggtcggtgcccagaggtgcttcaggccatccggggcccagccgccagggcgcaggggggcctgagggccccgcagcactggggaccgcgccgccagctccccaggccccgggcccagagaggacgcccggggcttggcaagggcgcagaaggcgagggcacgcaggcacagcggagagaattcctgggtcccccgacacggcttccggggcgtgggggagcagggcgaccctcgcggggacgccggcactgccaggcggggcgcagggcacagggtctccatggagcagcctgaggggtgcccactgagcgggtccaggtcccagcggcgggatgccctggctgcccgaagagcccacgggtgaggggaacatcgccccccgtcgacggggaggtctctgctcacgggcgcccccggcccgccacccggggccgcagagctcgggctccctcttcgctctcctcacgcggccctcccggcggccggactcctgggtccctgtgagtcccggcggggtcggccgcccttctgccgccgcgtccccttcgcaaccccggcgggagaccctctcgagtcgcccgaagcgcagaggcaggggaaacaaagcggccggcggccgcgggaggcgggaaggaccccgggcccggcacccggtgcccgggcccaggcggcggggagggcgccttccgcccgctcggtttctttcttccccgctggctcccggagaccgcgttatagagaactgccccctcgctgccccaataccagcgccggggccgcgagcccgccgctgattgggccgcaccgcccgtgacgttagcccggaccccacccctccggcggcaccgcccccgtccccattccgcacacagacacacacacgtggacccggcgcggcggcggctgggagggagcgcgggagggagcgtgcgcgggtgggatcgcgagcggccagatgcgccgccgcacgtggcccggtggcgtcctgggatttcgtcgtcgcaaagccactcgttttttcccgagcagtcacggttttgcatctgtaaaatgggacggttcatatctgccctcttgggactaaaagagctatgtgaatcaacgtagatgaatctcagaaataatgtttaggggaaagatgaaatgaggcaatggttgtttacaagctttgcacagcagggattctagcgggccgtgaatggcccctaaaacagtgcgtggcacacagtaggctcaaaaatgctgtaatgtataagtagttaataattcagtacttgtatgcaagatgaacaaaaaaaataaatttggaagggtgggagtgttattacatccatggaagccgataaataggctgtctcggtatctatttccatttctctgatgcagtatctaaatactccgcctcaactaaattccgagggctgactctgcaacccctgacccccaatcccaggatgcccccctctgaggtttgatctgccaaaccggttgaagaggccagaggagggcacgcgcagaccctcactctcatctgccccaaggaaaataaagaaaaagtgaattcccagtacaaattctgataatgcagcacacacccccaccctgttctatccccttaaccttctttagtttctgcatagcttattgttacataaaagtctgtaaatggatttattctttagtgtctgtctctcccattagtctggaaatgagttgacgagaactttgtcttgatcattggtgcatcccccactgcctagaacagtggccaagatataataggtgctcaatcaatatgtgtgaatgaatgaatgagcaagtgagcgagtgaatgaatccttgggatatttctctcttgataaaaatcaggttattggaatactgccgtttcctatctgtggaaatacagagattggtatgatgacttggggtaaaggtgtggaagaatgctgggggcggccccacagataaatatcttattctggagccaggacaagagagggtttcagaacggggacaaatgatgcagcttgcctccgggcccttctagcagtgacaacagaggtgtagtttccctatgtgtcatcaaataacatctgggaggacaggggtaaggaggatctgcctcccccacctgcaaagtccagaggtaaagtccctaggtggggcgagggtttgaggaaggaggaggtgtgatgttccattgcccaaaacactcaccctctaacatctgcagaagagctctccagggcagttgtcacaaggggggatcctggggtcctgccaagtcatgaagctgagctgggtctagactccagggctcataattgctcaaaaagcccacctctacacacacacacacacacacacacacacacacacacacacacacacggaaagttctggaaggatgatcttcatggctgtctcttctgcaggacagtgctgaggactcatcctcaacaacagtgcctacttgcactcctgtgcctaccacagtgtagacacaaggagagaatgcccaagaaaatgatcagtatgaataaatgagtgaatattacataacagtgcagatcaatggcctcttctttctctgcctccaaaagctcccagctcccccttccccatgtgagtttgggggctttattgaggggtcattacgattgtgagtgcttctctctgcctccactatccctacttccccttgctctcatcaggcaccccagaatatggactcagggatggaatcactacaaacagtaggagaatagtgtgagtgcctctccagctgaaaggagatcatcaaaccaccctttatggcctggatgggggcgggggtggcgctgtgcaaccctgggcaggtcacctagacactctaagtctcaatgtccttatcagtgaaaaggggacaacagtggcttcctcacattgttgggagggttgaaacatgatgtgagcagtcaccagaactcacgtgggcaggcccagctgctgcaattaccatttcctccggtagaggacactcgaccccatcctcagcctgctatgagggcggcaacacccttctcaggaacctctcctcctcataggagaaaaagagggacaaggctggatgccgggtcccatctaacacttccagagtgaaggctagaaagggcccctctggatccagaagccagcccttccctttccttggcccatctaggtctcacctggggcagtaaggactgtgttcaaggatttgggagcaggagacctgcccggttgccccttttggggaactgcaccccaggcgtccaaccccatagtaacttctgtagtacttactgcccagtctctgttctaagaactggatgtcacttaatccccataacagcctatgaaatagaccttttttttttgagacagggtctcactcggtcgcccaaactggagtgcagtggcgcgatctcagctcactgcaacctctgcctcccgggttcaagccattctcctgtctcagcctcctgagtagttgggactacaggcgcgcaccaccacgcccagctagtttttgtatttttagtagagacgaggtttcaccatgttggccaggatggtctcgagctcttgaccttgtgatccgcccgccttggcctcccaaagtggtgggattacaggcatgagccactgcgcctggccgacactatttttaaaagtgaacataccacacataacccattttaagtgtccaattcaatgatttttagtaaatttacagttatgcaaccatcatcatagtccagttttgggggtttttttgagacagtttcactttgtcttccaggctggagtgcagtggcacaatctcagctcactgcaggcttcaccccccgggttcaagcaattgtcctgcctcaacctcccaagtagctgagactataggttcccaccaccacgcccagctaaatttttttttttttttgagagtctcactctgttgcccaggctggagtgctcaatctcagctcattgcaacctccgcctctcagattcaagcaattcttgtgcctcagcctcccaagtagctgggattacaggcagatgctaccacgcccggctaatttttgtatttttagtagagacagggtttcaccctgttggccaggctggtctcgaactcctgacctcaggtgatccgcccacctcggcctcccaaagtgctggaattatgggcgtgagccaccgtgcccggccccataatccagttttagaacattgcttataagactcctcctccccacttgtagctctcccttcccatccccagccctgggtgactaatctttctgtctctatagagttcccttttttggatattttatataaatggaatcatgcaatatgtggtcttttgcatctggcttcacaaaagcataatgtttttgaggtttacctgtgttgtagcgtgtattggtaatctgttccttttttttttcttttgagatagagttttgctcttgttgcccaagctggagtacaatggcacaatctcagcttactgcaacctccgcctcctgggctcaagcgatacgcctgcctcagcctcccgagtacctgggattacaggcacccgccaccacgcctggcaaattttgtatttttagtagagacggggtttctccgtgttggtcaggctggtcttgaactcccgacctcaggtgatccgcctgcctcagcctcccaaagtgctgggattacagggatgagccactgcgcccggcctgttcctttttattgctgagtagtagtctgttgtagggatatgccacattttgtttatccaatcacatttgggtgtttttcactttttggctattatctataatgctgttatgaacatttgctatacacgtcttttgtgaatatatgtttttatttctcctaagtagacatttaagggtggaattgctgggtcatatgctacatttatgtttaaccttttttttctttttcttttttttttgagacagggtctcacagtctcattcaggctggagtgcagtggcacagtcagggctcactgcagccttgacctcctgggctcacgagatcctctgcctcagcctccagtgtggctgggaccacaagcctgagccaccatgcccagcgaatttctttttaaattttttttgtaagacagggtctcgctatattccccaggctggtctcaaactcctcggctcaagggattctcctgcctcagcctcacaaagggctgggattacaggcatgagctaccatgcccagctgtgtttaattcttttaaaaactgccaaggtcgggcatggtagctcacacctgtattcccagcactttgggaggccaaggcaggctgatggcttgaggccaggagtttgagaccagcctgggcaacatggtgaaactccatctctacaaaatacaaaaattagccgggagtggtggcatgtgcctgtagtctcagctactcagaaggctgagggtgaggaattacttgagtccagcaggtcaaggctgcagtgagccacattcatgccattctgtgcctgggcggcagagtgagaccctgtctcaaaacaaaacaaaactaaactaaaaactgcaaggctgttttccaaacgggctattccattttacattcctattaatatccatgatataggctgggcacggtggctcacgcctgtaatcccagcactttgggaggctgaggtgggcggatcacctgaggtcaggagttcgagactagcctggccatcatggcgaaaccccgtctctactaaaaaaatttaaaactaggccgggcgcagtggctaacacctgtaatctcagcactttggaaggccaaggcgagcagatcacaaggtcaaaagatcaagaccatttggccaacatggtgaaaccccatctctactaaaaatacaaaaattagctgtgcgtggtggcgggtgcctgcaatcccagctactagggaggctgaggtaggagaatcgcttgaacccaggaggtggaggttgcagtaagccgagattgcgccacatcaccccagtctggtgacagagcgagactctgtctgtaaataaataaataaataaataaataaataagccaggtgtggtggtgcacgcctgtaatcccagctgcccagattctcgggaggctgagacaagaatcgcttgaacccaggaggcggaggttgtggtgagccaagattgcaggactgtactccagcctgagtgacagaacaagactctgtctcaaaaaataaataaataaataatccatggtataaatgaggacattgagggagataagtgacttgcccaagttacactgctagcaagtggtagagccagaacccaaacccaggtagttgagtcctaagttagctctggtaaccacaaggctaccccacaacaatgaatccaagagggaagccatttctccaccctgccacacccagccaccatcatttaacctttcttggtcccagaattccctaagtcagcagggctgcatcaccccctagcataaacccacatgttcctctacctcctctgggaatttgcacccagggttaacagcttaagttctgggctcagatgggtcagttcacattccagacccatcattttactagctttgtgactttggggcaattacttaacctcaggaagctttagtttccttatttgtaaaacaagactagcatctttcctcatgcaattaaaaaggtattatatgatggaaaatttcaaacctacacaaaagtaaataaacataattaacctctgagtacccaatatccagcttcgacactcaccaactcatggtcagttttgtttcattcttacccacccacttcctcacttaaaaaaaaaaaaaatcaaattggccagtatgatggctcacacctgtaatgccagcattttgggaggccgaggctggcagattgttagagccaggagtttgagactagcctgggcaccatggcgaaaccccatctctaccaaaacaaacaaaaacaacaacatgtaaattagctagtcccagctactcaggtgactgaggtggaaggatcccttcagcctgggaggttcaggctgcagggacctgcaatcaccactgcactccagcccaggtgacagagcgagaccctgtctcaaaaaacaacaataacaacacaattttatttaggtatgatttatgtaataaaatgcacattttaagtgtacagttcaaatggttttgccaaaggaatatgcccatgttaccaccacaattaagatgtattatagccgggcgcggtggctcacgcttgtaatcccagcactttgggaggccgaggcgggtggatcatgaggtcaggagatcgaggccacggtgaaatcccgtctctactaaaaatacaaaaaattagccgggtgtggtggtgggcacctgtagtcccagctgctcggagaggctgaggcaggagaatggcgtgaacccgagaggcggagcttgcagtgagccgcgattgcgccactgcactccagcctgggcaacagagcgagactccgtctcaattaaaaaaaaaaaaaaagatatattatagaacaatggccaggcacggtggctcatgcctgtaatcaatcccagcactttgggaggccgaagcaggtggatcacttgaggtcaggagttcaagaccagcctggccaacacggtgaaaccccatgtctactaaaaatacaaaaaaattagctggatgtggtggctcgtgcctgtaattccagctacttgggaggctgaggtgggagaataacttgaacccagtaggcagagattgtaatgagctgagattgtgccactgcactccagcctgggtgacagaacaagactccatctaaaaaaaaaaaaagaaagaaagaaaaatataagatatagaacaaaccccaaaccccatattattttgttttgctttgtttgttttttagagacaggtcttgctctgttgcccagactggagtgcagtgatgcgacctcggctcactgcaacctctggggttcaagtgattttcataccttagccacctgagtagctgagactacaaacgtgtgccatcacgcacggctaatttttgtatttttttgtagatatagggtttcactatgttgcccaggctggtctcaaactcctgggctcaaacaatcctcctgccttggcctcccaaactgttgggattacaggtgcgagccactgtgcccaacctagaacaaaccccatgttatttttaggcaaatccaagacatcacataatttcattcctaaatatttcaatacatatttctataaggaccctttaaaagtaaacataaccccaacattattatcaaacctaaaaaaaattaacaattggccgggcacagtggcttatgcctgtaatcccagcactttgggaggccaaggcgggtggatcacccaaggtcaggagttcgagactagcctgatcaatatggtgaaaccctgtctctattaaaaatacaaaaaataatcagccgggcatggtggcatgcacctgtagtcccagaaactcaggagactgagacggaagaattgcttgaacctgggaggcacaggttgcaatgagctgaggtcacaccactgcactccagcctgggtgacagagtgggactccatgtcaaaaaaaaaaaaaaaaagaattaacaatcacactttaacttcatcaaatagccagtcagtgttcaaatttctaattatcttataatattttttctttacaatttttagtttatttgaattaggagccaaagaaggatttcaagtggttaatatgtctctctttttatctataaattccccctttatctctctctgtctctctttttttttttcctctttgcaatttagtcattggagatactacgattgtcttctagacttcccatagtctggaatttactggctgcattcccaccgtgagatttaatcaaacaatatttatggaacaatatttattaaggacctgctatgtatagtattgtcaaatttagcacagagctgggtgcactggctcacacctgtaatctcagcactttggaaggcgaaggcgggtgatcacttgaggccaggagtttgagtccagcctggcctacatgatgaaaccccatctctactaaaaatacaaaaattagccgggtgtggtggcgagtgcctgtaatcccagcttacaaaagaggaggctcttgtaagggaggctgagacaagagaatcacttaaaccctcgaggcggaagttgcagagagctgagatagtgccactgcactccagcctgggaaatagagcaaaactccgtctcaaaaaaaaaaaaaaaaaaaaaattagcacaaaatatacagaacatatttatttatactaaaaaacttacttattgtttatctataattcagatttgacagtgttttatctggcaactctatgtgccaggtgctattctagcactggggacacagcagcaagacagacaacccccacctcaaggagtttgtattctagtagattcgggaagccagctaatgcacaggcaaataatattccttctgaagatattgtgaggattaaagaagaaacctagcctaggcgaggtggctcatgcctgtaatcccagcactttgagagacaaaggaaagaggatcacttgagtccaacaagagttcaagaccagcctgagcagcaacatagcaagaccccatctctgcaaaaagtgtaaaaattagctgggcatggtggtgcatgcctgtgcccccagctacttgggaggctgggacaggaagatcccttaatcccaaaagtttgaggatgcagtgagctttggtcacaccactgcactctagcctgggtgacagagcaagaccctgtctcaaaaaaaaaaaataattattatccataggtaagaaaaaacatggccgggcgccgtggatcactcctgtaatctcagcactttgggaagccaaggtgagcagatcatttgaggtcaggagttcaagaccagcctggccaacatggtgaaacccatctctactaaaaatacaaaaattagccgggctcggtggcgggcacctgtaatcccagctactcgggaggctgaggcaggagaattgcttgaacccaggaggcggaggttacagtgagccgtgatcacgccattgcactccagcatgggtgacagagcaagactccgtctcgggaaaaaaataaaaaataaaaaatgagaaactcacgtattaatgcttggtgcatagaagttcatgatcaatgtaagtgcctttggcagtagcttaggctgccttttccctttcctcctttctttccttgtcccatccctctccgcattcacttaggaactattccagacttgcctcctcctgcagtacttcctccatatgaccatggttaattcattcatttatttacctcacagttactgagcacccaccatgtagcaagccccaggccaggccctggggactcagagatgctggagacgcagtctggtgggggagatggacattacaagctgatctaagaagtagcaatagagggatgatcatggtcctggaatcttagaggaggatgaccctagaggaagaggaaggaggtcttttcagagaacgtaatcttcctcctatgtctacaggctgaacaggagtatacaaaggaggcagggctgggcatggtggctcatgcctgtaatcccagcactttgggaggccaaggcagatggatcacctgaggtcacctcagatcacctgagaccagcctgtcaacatggtgaaacaccatctttactaaaaatacaaaaattagccatgtgtggtggtgcatgcctgtagtcccagctatgcaggaggctgaggcaggagaatcactttgaacctgggaggtgggagttgccgtgagccgagattgcaccactgcagtccagcctgggcgacagaatgagagactccatctcaacaaaaagaaaaagaaaaaaaaacaaaggaggcaggagagaagagagaagaattccacctgcagaggaatatgagcaaggaaccaaggcaagcaagtgcctgccccatgtgctgccaacttccagccatcagcgtaccacccctctgttaagtagcagggtgccctggccttggcctttctcatccaccttcctagagtcatctcatctcccttgcacagccaatcactctcgccatcaggaggtctctcccattaaaaagctaaatcttccttgaccccagaggctacagccctatccctttcttcccttcacagccaagctcccccgagagctgtctacgcacgtagccttccttttctcacttcccacttgctccccaacccgcttccatctgcttccaccctcgcccgccaccggaatagctcttgctgaagtctcggtggcctccatctcatcgaaactggcaggcacttgtcagcctccctgacctctccgggcagcccgcttggctggccacttcctcctccgagacatttccagtccccttctttctggacaccaagctcccttgctgtcctgcctctggggctgcttcctcttgcttttcagtgcaggctcactctccccttttcagcccaaaatgtcggggctcctcaaggctttgtccagaactctcttctctctccagacactcttccctgctcactttgcagtcagcattggagccccggggttcagcctggccctttcctctcaggtctggcccagacaccacactgcccactcagtccacctcggacatttcaaaagcccctcaaactcagccatcccaaaccatcagcacccactccaccccctcttcccaggaaacctatcctgaggtgtggctcccccatctattcacttccacagccagaaacccagtcctcatcccgacacctccagccctccaagtcaatgcctcagcaagactcatcataccccacagtcatctttccaaagccacaaatctgactgttacgcccgtattcaaaaccttttttcttttctttttgagacagggtctcactctgtcacccaggctggagtgcagtggcacagtcacagctcactgtagcctcaacttcctgggctcaactgatcctcccacctcagcctcccaagtagctgggactacaggtatgtgccaccacacccagctaatttttaaaattttttggggggccaggcccggtggctcacacctgtaatcccaacactctgggaggctgaggcgggcggatcacctgaagttgggagttcgagaccagcctgaccaacatggagaaaccccatctctactaaaaatacaaaattagccaggtgtggtggcaggtccctgtaatcccagctactcaggaggctgaggcaggagaatctcttgaacctgggaggcggagttgccaggagccaagatcgtgccattgcactccagcctgggcaacaagggcgaaactctgtctcaaaaaaaaaaagtttttgtagagtcggggtctcaccatgttgcccagtctggtcttgggccagctggtgagcaaatgtggtcccagctacttgagaggccaaggtgaaaggatcgcttgagcccaggagttcgagatccatctctacaaaaaaacaaaaatctgttaatggtttcctactgctttcaggagaaagaccagactttttttaattttctttttgagatggagtcacactctgctgcccaggctggagtgcagtggcacgatctcggctcactgcaacctccatttcccaggttcaagtgattctcctgcctcagcctcctgagtagctgggattacagttgtgcgccaccacacccagctaatttttgtctttttagtagagaagaggtttcaccatgttggccacgctggtctcaaactcctgacctcaagtaatctgcccaccttggcctcccaaactgctgggattacaggcgtgagccaccaagcccagcctaaaagactaaactcttaatttggctcacaggtagtgttacttaactctagcaatgccacacacaggtcttcttagggaaggggacagttcccttgcctcttccttcagccactcatgtcttctttaggcctaaagcaataagctccttcctctctttccctaagcacttgctgttccttcagactgtaaactttccccccacattgcttctcctggccaacgcctgctcctactcagagctccactgagtcatcccttcctctaagaaaacctctcttcgcccttccagatgatgcccaggtcagtttccacactatccccacttcaagagctgtgtatatttccttcaaagatttccactggccaggcgtggtggctcacgcctgtaaccccagcactttgggaggccaagacgggcagatcacctgaagtcaggagttcaagaccagcctggccaacacagtgaaacctgctctctactaaaaatacaaaaattagccgggtgtggtggcacgtgcctgtagtctcagctacttgggcggctgaggcaggagaatcgcttgaatccaagagacagaggttgcagtaagctgagagggcgccattgtactccaacccgggcaacagagcaagactccatctcaaaaaaaaaaaaaaaaaaaagatttccatctgctaatcactattcatctattagtgtatctgattatccacctctcctccctctcctccgccactctgtttcatggggacagggaccacattgaattttgcagtagcttagtaattggcacagagttggcaacccaatacactttttttttttttttgagacggagccttgctctgtcgcccaggctggagtgcagtggtgcaatctcagctcactgcaagctgtgccttccgggttcatgccattctcctgcctcagcttcctgagtagctgggactacaggcacccgccaccatgcctggctaatttttttttgtattttcagtagagacgaggtttcactgtgttagccaggatggtctggatctcctgacctcgtgatccacctaccttggcctcccaaagtgctgggattacaggtgtgagccaccacacctggccaccaaatacttttttatttttttttaagagacagggtctccatctgtcacctaggctagagtacagtggcatgatcatagctcactgcaatctcaaactctgggactcaagcaatcctccctcctcagcctcccaaagcactgagattacaggcatgagccactgctcacagccaacatttgctaaaagtgatttaaagttttcatggaagtttacccctaaatacttcaggaagttttcttactacaatatcatgatcataggctgcgtgcagtggccacactttaatccgagcactttggaaggccaaggtgggcgggtcacctaaggccaggagttcaagaatagcctggccaacatggtgaaaccctgtctctactaaaaatacaaaaactaaccaggcatagtggtgcgcctgaaatcccagctactcagaaggctgaggcaggagaattgcttgaacccgggaggcagaggctacagtgagccaagatctctccactgcactccagcctgggcaacacagcgagactcagtcaaaaaaaaaatacatatatatatatatatacccacacacacacacacacacatatgtatatatatgtttatatataaaatgatcatacctcagaaaattacccattccttaatatcatccaatatgtagcccatattcaaatttaccaacttgtcctccaaaatgctttttttgtatttgatttgttccaaccaagatctttatttacttatttattttttgggactgggtcttgctttgtcgcctaggcttctggcacaatcacagctcacagcaacctcaacctccaggcctcagcctcctgagtagctgggaccacagacgcgtgccaccatatccagctaatttatttatttatttatctatttattttattatactttaagttctagggtacatgtgcacaacgtgcaggtttgttacatatgtatacatgtgccatgtcggtgtgctgcacccattaactcgtcatttacattaggtatatcttatttatttatttatttatttattttggtagagataggctcttgctatgttgcctaggctggtcttgaactcctgggttcaagcaatcctcctccctgggcctccaaaagtgctgggattacaggcatgagccactgtgcctagctccaaccaaaatctaaatacggtctgcgcactgcatttcgctatgtcccttaagtctcatttaaatctagaataactttttccccctttgccattgacttggtgaactgctaaagtattttaagtaaattacagacatcatgtcccaccttctagatttctctgattgcttcctcatggtgttgtttatcccgtattttctgtaaactggaaattagatctccaggcttgattagcttcaggttgactatgctgacaaaaacactttgtgggtgaagcttcctccaacatattgcgttcccttggggtgtccctgatgcctgagtttcactgttagtgatataatattgatcagttgctccccttggcaacagccaatccttctatcaagaaattgcattttttggctgggcgaggtggctcatgcctgtaatcccagcactttgggaggccaaggccagtggatcacttgaggtcaggagtttgagaccaccctggccaacatggtgaaaccccatctctaccaaaaatccaaaaattagctgggtgtggtggcatgcacctgtagtcccagctactcgggaggctgaggcaggagaatctcttaaacctgggaggcagaggcttgcagtgagctgagatcgtgccactgcactccagcctgggcgacagagtgagactgtctctaaaaaaaattaatgaacagaagaaaagtcatattttacagatgaggaaaacagaggctctgcctcattcagtcactcgccccagaaagcagcaagagatggttaagacctaaaggaaggcagtggccacaggaacggacgggttttcaaaggagaatcagcagcatctgcaaacaactggctgtgttggggagggaaccagaagccctggcagaagcagagacttccctcacatctcgggtgggacatgaggagacagagcaacttggggggaaggtaatgagctcaggctccaggcttcccagatgtctccaagccgctctctagggaaatggtgtttataacatgacaatgtctataatttggcttccggcatgactcgataattagcttaagttatccctcattggcattttattcaaagcaaggacactcttccattcattctgatgaggcctgccttctgtgagtgttccagggtaagtgtgaactgagagctgtgcctctgtctcttttgactgaagtgggctggagactgaagttggtggggtggttgaagtgtctgctcactgggctcaagtctgtctctggggcttgaaggtgtgggctccccctcggacagggtgtggggggtgctgagacctgcacattcaatgcctagcaggagtttggcccagagattggtttccaagaggtgtgtgaaggaggcagtgaccaggaagatgggggatagatcccctgggaggcagtgtggaggactacaaccaagatgcttcaggctgaacagggctgtgctcaggggaaatgggaatgcttctgggttaggacgcattgaccaggttgattctgtgggactgagtggctgattcagagaaggagtgaagaagacagagttgagaaggcccccatgtctttgtctccagagaaagtggaggctagtagctgaggcaggacctggaagaggaagggtgggtctggggtggggagatgcggagcttagtttagatgcggagggagtggccagaggagacctggaaaaggaggcctgggactggagaggtgaggaccaggtcacaggcacacaggtcaaggttaaagccacagacatggataagctcttccaggggaagccaagcggatccagaagtgggcccctgtgggaggggcagggcaaaagggccctcgcaaaggtggctgggaaggaagagagtgagacttgagggcaagggaaagggagttttcagaggagggggatggtcatggggaccaaatgccatggacagggtaagcaggacagtgtttgaggagctactgaccttagtgattctgaagccttaggagactccagcttctcagcaaaaacagagaaacgagaggactcacttggtgtcagagccctgtgggccaagaagcagaaagtataatacaattgtctctcagcccggaaaaagcacaggaaacagcacccgctgggtgctaccagtgtagccactgagtgacccctgctagcctctggctacttgctcctcagaatagaccaggagggcatcagactggcacagcttgggccatatgtccacatcttggctgcctagggcttgaagacagaggctcagaattccttccttcagttctttctgtaaatatttactgagaacctagaatgcgccaggcaccgttctaggccctggaatacagcagcaaaatccacaaacatccctgtcttcatggcactcacacccgaggggaaagaatgacaacaacccacagacataaatgtggaaataatgtaaaagctgaaggacaaaaggaaagtataaggaagacggggagtatgggggcagcaggagaacagggtgcagtttttttgtttgtttgtttgttttgagacagagtttcactcttgctgcccaggctggagtgcaatgacatgatcttgactcactgaaacctctgcctcccaagttcaagagattctcctgccccagcctcccaagtagttgggattacaggcgccagctaatctcctcgtatttttagtagagatggggtttcaccatattggccaggctggtctcaaactcctgacttcaggtgatccacccacctcggcctcccaaagtgctgggattacagggatgagccaccgtgcctggcccagggtgcagttttaaatagggtggtcctgcaggacttggtggctcacacctgtaatcccagcactttgggaggctgaggtgggtggatcgtttgagcccaggagttcaagaccaactgggcaatatggcgaaaccctgtctccacaaaaaatgcaaaaattagcctggcatagtggcacatgcctgtagtcccaactactcaaagggctgagctgggaggatcacctgagcccagggaggtcaaggctgcagtgagccgagattgtgccactgcactcaagtgtgggtgacagagtaagaccctgtctcaaaaaaattaattcactaaaaattaataaataaataggatggtccagaaaagcctaatcgggaagggaggagcatgccaggaaacagcaaggaagctggtgaccagaggatgggggttggggtggaatggagaagaagctggagggattgggacagtaggttgcgtaggaccttgtaggcccctggaaggacttgggcttctctttggtttttttgtttgtttttttgacggagtctcgctctgtcacccaggttagagtgcagtggtgtgatcttgggtcactgcaacctccgcctccaaggttcaagggatcctcttacctcagcctcccaagtagctgggattacaggtgtgtgctaccatgcccggctaatttttgtatttttagtagagacagggtttcattgtgttgcccaggctggtctcaaactcctgacctcaagtgatctgcccgccttggcctcccaaagtgctgggattacaggcatgagccaccgtgcccggacctcaggcttccctttgaatgccatgagaacatctgggggactctgagcccagaggtgacctgattatcttacagcttaataggatcactctggccactgtgcagggaataaatggcagggccaaggatggaggcagggagaccagttaggaggtgaccacagtaatccaggggagaaaatgatgggggagatggtggcaagtcatcatattctgcacatattttgaaggtagagccaacaggatttgctgacagaatggatgtgggagaggagtcaggaatgattctaaggttttcagcctgaacaacaagaaagatgaaattgccatcagttgagaaggaagaggctgtggatgaagcggtgggtgtggggtgggaagggggaagcaagggtagatccagggttccagggcagatcacccaatggagcactcccctgacctaggaaaggggacactggacagccacaacttccggcaaatgcccaggacaggtggttcctggtgacctgcggcagagcaattccagcagggtgaggaggaaccacacagctaagtgtgctgcgcatgtggaggccgcgcttggtctcctgacttacgaagcagagcagagggatctgggagacacagagggtggtggcctgagcccatgtggaggctgccgggaagagccaggagagggagagagtgcagatcaggatagagtctccacatgagggaggagagatggatcccagccaaggcttggctgcaaaagcacagggtcaggctcaaggcactgagggcctggaccagcgtcagggagcagggggaaaggatccagagacatttgcgcagcagagatggccaggaagctgctggagagtgggaggagtcaggcgcaactccaagattttgaatcccaactcctgccagcgtcctgaaggcctctgtccccctctaagtccaggtttaccaaagcctgctgcaccctggagttctcagttctctgagcacggccccatacctgattctaaattcacaccactgcttcctctgcttttgttgcaagccacaatcagaggacactgttcacttgctgattccaatgccctttggcccctctatcccacagcccggtgatgtggctccttctcctgccctccaccagagcccccatctcagcaagggctttgctttctgtctcaaagagaaacacggtgctgagcgggggaagctgagcacaaaagagtacacataatacactcttaggaggttctagaagcagtgacacccacctactgtgacctacagtgatagaaatcagatcagtgctgtctggggccaagggactgattgcaatgggataggaagaaactttccaaagagatggaaatgttctatatctctaaggggtggtggttacacagctgtctacactggtcaaacgacatcacctgtacattgaaaacgtgtgcattttattatatgtaaattataccataataaagtttattttatttaattttaattcttttttgagacagagtttcactcttattgcccaggctggagtgcaatggcatgatctcagctcattgaaacctctgcctcccgggttcgaatgattctcctgcctcagcctcccgagtagctgggattacaggtgcacgccaccacacccagctaatttttgtatttttagtagacgtggggtttcatcatattggtcaggctggtcctgaactcctgacctcaggtgatccacccacctcagcctcccaaagtgctgggattacaggcatgagccaccgagcccagcctaataaagttgatttttaaaatagagaactaaatatttttttgagacagggtctcacccggtcacccaggctggagtgcagcactaggatcatgactcactgcagacttgacctcccaggttcaagagatccttccacctcagcctcccaagtagctgggactacaagtacccaccaccatgcccagctaatttttaaattttttgtagagacagggtctcattatgttgcccaggctgatctcaaactcctgggctcaagtaattcctcctgccctgtgctctcaaagtacctggcctaaaaaaaagaaaaaacaaaaatttttttttttagattgagtcttgttctgttgcctaggctggagtgcagtggcgcgatctcagctcactacaacttccgcctcccaagttcaagcaattctcgtgcctctgcctcccgagtagctgggattacagaggtgcaccaccatacccagctaatttttgtatttttagtacagacaaggtttcaccatgttggccaggctggtcgcgaactcttggcctcaagtgatccacctgcctcggcctccaaaagagctgagattacaggcatgaagcaccatgccgggccttaaaaaatttttttagggccgggcgtggtggatggctcatgcctgtaatcttagcgctttgggaggctgaggcaggcagatcacaaggtcagaagaccagcctggccaatatggtgaaaccccgtctcgactacaaatacaaaaattagccaggtatggtggcaggcgcctgtagtcccagctacttaggaggctgaggcaggagaatcgcttaaacctgggaggcagaggttgcagtgagctgagatctcgtcaccgcactccagcctgggcgacagagcaaaactccgtctaaaaaaaagagggtgggtctgagaggcccccttggaagaagtgagactagagcagggctgggaggtctgagaggctcccttggaagaagtgagataagggacagctgggaggcattccaggtggaagaggggctggttcactcacaggcccagaatctacagggccaccaaggaaccagcctgacagcagaggcaggtggggccactaagaaagttggggctgtgtggcccctctgtgaccacagttcttccttcccactccctttctgttctttgattcccctcctccaccagggcacacagttcccactgggcagcctgtgtaatgcgccccacatttgtgctttgaggctacagagcacttcccctacaccagggacctgaaacgtgtcctggctaagcatgttttttttttttttttttttttttttttttgagacagagtcttgctcttgtcacccaggctggaatgcaatggcaccatctcagctcactgcaagctccacctcccgggttcaagcgattctcctgcctcagcctcccaagtagctgggactacagacatgtgccaccacacccgactaatttttgtatttttagtagagacggggtttcaccatcttggccaggctggtctcgaactcctgacctcgtgatccacctgccttggcctcccaaagtgctgggattacatgtgtgagccaccgcaccccgcctaaaaaattgtttttaaagataaaataacagtctatcaagcagaaaaatcctacacacacacacacacacacacacacacacacacacacgctcatctcacacatacacacactcccatctgtccacatgctttgcttcctcccttctctctggcacggcagagcgcctcctcttgtccatgcaagctatcacgcctagactgttccccctaaaaaaaactcatgccacccttcctctgaccttgcatccatctcccctgctgtccttacagcccagcccctaggaaggatgggctatattccccttcagcatgctggatcagtcacccatctctgagacacctgccctgcagagacactccttctctcctttctgtcttctctcaggttcctaggaccccacttgcttgtatccagcgatggagggagagtttcaggctctccctccatgtctggatactccttctcatgctcccagcccagctcctctccctctgacacctcttcagtgccggcattccctgggcccctggacctggtcttctgctttccactctgcacctgcacagtctcccgtcatgatctcacctgctccagggcttcagttaccatctattgctgacaatgctcaaagatacctctgaatatttttttcagagtatcaaggatgtggcagaagaggtagacacaggatatatgacatatgcttcagaagctgtttacaatttttaatatgatatgtatactcaacccccttctgtcacagtccactggacctcaggctcagaaagccccaaactgaactcatcagccctttgccagccctgctcttcctcccttcctcaggattccagcttcaggcagaaacctgggagttaccctcttactccatgaccagcaattgtcaattatccccttctcttgatttcaccctctaaaactcccccttctccacccctacagacattcccagagaggttcaagcattcattcattcaataagtattagctgagcacctactctgtgccagacactgatcccgatgctcaaacacaacacataaaaatcagtgccctacagagcttcccttctagcacttgcagtaatttcaaaagcggctccatctttcattctaacccctctaactgcccactctgctgtggccacagcaaaagtcaccacatgtgcagctgctcagcatcttccatgggacttcatcctcctgggatcaagcctgggccatgtgtgaggtgtcctgatccccttcctcctgtcttctctcatcttcccttcctcccccaccaaacacttgtaccctctaaacatggtagactccctctgcaggtggtccatccccaaatataaggcatattgtactgcctgtccagcggccttcccttcaaccccaagcacctgcaggaccagaactgcttttatccttcctgcagtatcagtgcctggcccattatccggcacatagtcggggggtcaacaaatggtaactgattacatagatgacagtggattaacagtagtgtcacacagacagggagagtcttggggagcagggaaacatgagttctgaattagccccagaacacctccctgattgataatttagaccaaccccatggacacctagttaaaagggggggtgctagcggggcatggcagcttacacctgtaatcctagcactttgggaggctgaggcaggaagattgcctgacctgagtcaagatcagcccaggccaggcgcgatggtttatgcctgtaatcccagcactttgggaggccaaggtgggcagatcacgaggttaggagttcaagaccagcatggccaacatagtgaaaccccatctctactaaaaaaaaaaaaaaaaatacaaaaaaattagccagggcgggcgcggtggctcaagcctgtaatcccagcactttgggaggccgaggcgggcggatcacctgaggtcgggagtttgagaccagtctgaccaacatggagaaaccccgtctctactaaaaattcaaaattagccaggcgtggtggcgcatgcctgtaatcccagctactcaggaggttgaggcaggagaatcgcttgaaccgggaagtggaggttgcagtgagctgagatcacaccattgcgctccagcctgggcaacaagagtgaaacactgtctcaaaaaaaaaaaaaaaaagtgaggtgcaaatcctacttttgcacctactgctctttcctcgccctagaaatttccacaggagcacagtcatcaacctacagaatgttaacaccaaggggactttcaagatctggtcacctgaccaaataccagagagggtaaccgctttgcccaaggtcacactgctggctggggcagggctgggactagagtagctctggaaaatgggaacaagaatagaacctatctcaatcttgttgcagggagtatgttacatgcttagcacattgcttggcacataataaactctcatcgaataggagctgttgctgttatcgttgctattatcatcatcatcatcatcacaggtgtccatccttgcctccaagttccttgcctcctgatcctcccatcccccagtgctattctccactatttcctccctttcctcccaatccatgatttcctcccttctcccctcccaattcatgtttggcccactgcagtcagcgtccaccaccaccagtgcctggaaccttccaggctgaggtcaccagggacctcctccttgtagaacccttccttccctcgacctctcaatggcatgtgaccctagcactgcttcctccttaaatgtccttgacttctataacataaactctcctgctgctcaggacatccggctctccctctcaccctctctgctaatccagacacaaatagtcaactgcctactgccataggcacccaacgtcagcacatccaaagcagtttgttaccagctccatcaccctgccccgctcctgggttctactgttcagtgtacagatagccccgtccaccaaataccctaggctgcaccaggcaagacaggggaggactcccagaggtacagcctaggggatggatttggtggatggggttcatctgaacatccttcttaacatcccacctttttttttttttgagatggagtctcgctctgtcacccaggctagagtgcagtggtgtgatctcagctcactgcaacctccgcctcctgggttcaagcaattctcctgcctcaggagattctcgagtagctggaattacaggcatgcgccaccacgccctgctaatttttgtatttttttttcttgagacggagtttcactcttgtcatccagggagtgcagtggcgcgatcttgggtcactataatctttacctcccggtttcaagcaattctctgcctcagcctcccaagtagctgggattacaggcacctgccaccatgcccagctaatttttgtatttttagtagagacgggggtttcaccatcttggccaggctggtcttgaactcctgacctcgtgatccacccgcctcagcctcccaaagtgctgggattacaggcgtgagccaccatgcccggccgcctctgcgcctttgaacatgctgttccccctgcctggaatgctcttctgccccttaactgcctgcaaactctccctcacccacttggtcctagttcaggccctccctgatcccataaactcagttacttcctccctgcagtatcagcatcattcatagcactgtcatagcccttttcatcctgaagttaataattccctatgtctgtcacccctactagctatctgtgtacctaccatgtatctccatgtatctgttaatactttcctatgtctgtcatccccaggtgctatctgtgtatctcctatggccagcccatgatgattcagtgagtgtctgctgaaagaccgaataattaaactttttcaacttctgtcctgatggtaagtataagaggagggatgaagattaggctgtaaggccaggcgcagtggctcacacctgtaatcccagcactttgggagcctcaagcagggggatcacgaggtcaggagatcaagaccatcctggctaaccggtgaaaccccgcctctactaaaaataaaaaaaattagccgtgcgtggtggcacgcgcctgtggtcgcagctactcgggaggctgaggcaggagaatggcgtgaacccagaaggcggaggttgcagtgggccgagatcacatcactgcactccagcctgggtgacacagcaagactctgtctcaaaaaaaaaaaaaaaaaaaaaaaaaaaagattaggctgtaagaggaactggtaaagtggaacacagcagggcaaatgtgctagtcaactgtcattgcttaccctggaaatttccccaggagcggagtcatcaacttacagaatgttaccaccaaggggactttcaagatctggtcacctgaccaaataccagagacggtaactgctttgcccaaggtcacactgctggttaggggcagggctggggctagagtccacgtagctctggaaaaagtttgggcagatgctatctcatcccatgaacttcttcccttcctacccattctgtctccccaaaggaggtccctgatgccctaacatggtcagggaactacctgggctcactcacagctcttacagcatttgctgggaccttggccaggtggagttaccaaaatcctgtagactggaggcagggggatccaactatcaccatattagagattggcaaactgaggcagctagctaaccgcagagggcaagatttgatattgagtactgtgttcctcctgtagaaagacctgagaagcccaaactcccacatatgcagagtcactattcacaataatcatgactgctgacttcctaatgtcagggaaatcccctcactcccaccagttcctcctgaaacagagcctccctccatcttgcacagggtgtctgacttaggaaacaaactgtacacccaccctcctaagccacccaggcctactagatagatcacctccgagtcataccctttaatggggaaatcacccttctttgtgccaggcacttgacatcgtcactgctcacatcagccctaaggttagtactacagtctgcgatggggaaacggagggtcccagataagtcactactaatccatggtcaaagcaagaaagtggcagggctgggactcgaacttaggtttgcctgactccagcgggtccccgcccaggcgggaggccctcccagctgaagcctttcgctgactagattacctgggggaaaatgacttaacctcttcgaacccccagaaggtcagaagctttgcttttgggggagaaaatggtgtgcaaacgagacgcgaaggaaacgcaaaccctcgggcgtcggcgcagcctcttccccgagcctgggtctgtctaatggcccagagggagaggtcgcacccccgacccctggcacctgcgaaaccaagcgcccggtcggctggcagaaacgaaacctcaacaccctccagcctcccccgcttggttcccggaaccggcgagccaggcttcgcggaaacttgcccggcggcagccgcctagggccccgggatcgccctgaccgcagcccgcagctccgggccgggaggtgcgggccggcgcggtcgggcccgagcagcagcgcgacgcgcgcttccgccccgctcggctccggcggcggccgcggcggccccacaatccccttctggctccggggacgggcggggcggggcgagcgggcggaaataattttctgtttggtcgtctctgccccagtcccttcgccgcgggacgcgcgagacgggagaaggtgcgggaagcgggaagcaggagcgggagcgcgcggccctggcacgcatagggcggcggagagggcacgagcagggattgagcacctactgtgtgccttcacgctttacaaaaggattttcgttcgatgttcactacagcccctgcccgggggtactgatgccccatttacagagggacaagccggatttcggagaggtgaagtcactcgccgaaagtcgcaccgccagggtctgcgtgacaccctaaagcagtgttcagttaccccggggagagcgcgatgaacttgaaccacttgttggctggttcctgctcttgctcgttttttgcggatcgacacatagtgggcgctcaggaaaataaatgttggaagcttgagattgaacttgacagctcgaccctaggtacccgccacgaatccagcccagcccgcggggcaccgggtttctccagacctcgcagggaacatttgcggatgggctggtagaggaggctcggacatcccagttccgcacccgcactcgaccaacgcgtggtagcggaacccctgtcgtagcgaggcacagactgggttcaagtcccgactctgccgatttcagcctgagtgactttgagcgagtcactttttcccgtcgaaacctcagttgctccatccacaaaatgggaaatatgaacagccaccctaaaacggtgtggggaggattaaacgaaacaacgttcccaaaactctaaacttacaaatgttgtctcccgtccatcccataaacttaggcgacaaacctggcgcagggtgacctgagacaaaggcttcccggcccctgtctccaagtcgtccatccctggggcgtaggcacgttttagtgagccctgtccggcgaaacccgaaactgcggccaccttggcagcggtgggccccaaaaggaaatattcaaatattctgaaactcgtgcatgatttaggactgacatttttacgtttaattttcttgcagttttattcttgctagtaaaggtaattcgttagaaacccttaagtgcagtttctcctctgtgtcttgtttaacttttcgtgttagcgaaattcacaaatttgaccaaggaaccggagcgcggccgtcctcgccgggattccggtcatcgcaataatctggctctcggcccctactcccaggcacggaggtcgaagagacgggcttcccctacaccgccctgtgtagatgtagcctcttcgtcccggcagccctccgagattccctgtgtccaccggagcgaggagaggtgtggggctgcagcccagaactcagcttcctggacctccccaaactcccgcctctccgggattaagggagtaaatccctgacgccaaagaccaggtcaaggacaagttctcccccgccctactcccccctcctgggcggggattcatctcccttccggatgaaaggtactaaagagccgacggggggccgcggcgggccccaggcccttgatgttccggttgaacaggtgctggtgaaaaggaggcggacccggcggaagagtctgccagggggcagtgcgccgaaggggaggcggcctcctccacccccagtcccccggcccgtcttcccttctcctctctgtttgcccctcccccgcaggaagcgttcccggccgcgaggtctttgaagtgtcgttgaagcccccagggctgccttctcccctacgccacccgaactcccgctgtggggggcgggtgacctttagtccccacgagtcgtccccctttaggaagtttttgggggtcagatctcacccccccttgcccacacaggttgggaagaagactttgggccgacgcccctcacttctcccccagacccaattgcagggactttagtcctctggagtgctgcgtgtgagttaccttgtgtgtctgtgtgcgtgcctagaggtcaagtgtaactggtgttcgtgagcacctcgtggttgcgggtctctaactctcgtgggtctctaagcgcacccgcggggctggagcggaggttcgtgtctctgggagggtcagtggtgtgactgaagctgggagttagctcgtgtctgtgggtgcctcggtgtgtgtctctggggctctgagtccctgtgcgtgcgtgtgtgtctgtgaacccgacaggaagctccccgagggcaggaatatgttttgctctctactcgatcccagcgactggcaacgagcgtttaataaatatctgttgaatgaataaatgtctgcgtgtgagagcgtctaccctccagagtggcctcggaggaaagggcccgagggcggccatccaaaaagacccccagacacggggtggggcgggggcgaacggcccgcgtcgctcccattcctcctagcgccccttcccccggtctccactccaaagtttccctggggctgaagaatccacccagagacgaagacttggcggagggggctggagactcggggacccggggcccgagacgggagtgcgggcagagggagggctcgggagcgacgacccagagccgtgaaacgaaaaagaaagcaggcaaagcagcacggagcgaaagagcgaaaagctccctaccaagccaggctttgttccctgaacctaagactttacccggcggctggcggcgggcgggccgggagcgagcgagcggaggcgcgcggccatggctgccgcggccgggcaggggggccgggggggcggcgcgtgagcgggtggcgcggggcggcgcggggcgggcgggcgcccgcgatgtgccactcggcgcctcccccgccgggctcgggctacgcggcggcggggcggccctaggagccgggcgagcggcgcggagggggcgagcccggcgtgcgagtctcattgttgtggggggggcccgtcggggcatgagggcgagagcacggcggggggggcggccagacagagcgagcgaggaggaggaggaggaggacgcggaggaggaggaaggaggaggcaaagaaaagaagcggcggcggcggagggagaggaggagggggcgaggaggcgcgcggccccccgctccctccctcccccctgacccccgacccccgccggccggccccccgccccagccccggagggagctcatgggagtatgaaggagatggtaggaggctgctgcgtatgttcggacgagaggggctgggccgagaacccgctggtctactgcgatgggcacgcgtgcagcgtggtcgtccaccaaggtacgggggtggcccgcggggggcggcgggaccccgggggcggcgtgcgcggggcgcccccggccgcgccctccggagacctcctggggctcgcgcgcccctcccccaccccacctgaagggaagggaggcgtagggggagctccccccgcccggtcctggaagaccgggtcaggcattgttttcttgcctattgttccagttccgcgccccccaccctaagttgagggagtttggggagagtctagggagcaatgagtgaactccccacgccccacaccgcgggtgtcggggctgcctggggaatgtttacctgcgaggtgtcccctcccgcccggttattttggtcccggctcctggaggaagaggtcaaggggggggcgtcatcccccctcgcttccggataatgggaggagcggacttggaaagggaagagaagggtcccaggggagaagggactcctaaaatccgccggggaagagctaaggataggagagaggttgtgcagggggccggaatcgagaagagggaggcttggagtttcccccagcagcacatggttcgggagttaactccttgaggaatcttgccgagggcgcaggctggcatctcccgcctgcctggcacaggcagccgggcccccccttcctgggacatccctgaatgctgtggcccggggctcttcccgccacgctcctctcggttcccagcaccgcacctgccctcagccttgacttttaacctgattctggaatacttagaggtagaagatgaggtccctagaccccctacttctccgcctcgtccctcactggccctttaagaaatccccccgcccacaacaacaaaacgtgtttgacggtcgtgactgttgtcccctctggttttctctatttctgatgctgatggctggtccgaggaagaagctgggaaacaagtccagaaagggcgtggggggaggatcttctagaagtttaaggtcaaagactcagacttcccgccctgtttgaagtgcttaattgtgtggttgaaggctggtgttgggcggttgggcagtcctgctgtagagtgagtgacccgtagactggggagcagcccccactgctggaactggctctagtcctttggagtcaccgccttcccccagttaccctgggaaaaagccactggctgacagctttgctcagcgactgtcctccccaccctcagcttgctatggcatcgttcaggtgccaacgggaccctggttctgccggaaatgtgaatctcaggagcgagcagccagggtggtgagttccagactgcccctctccactcccctgcccctcccacacacctgagcgtctcaggttgagctaggggactctgaggccgaggctagggtgggatttagctctgtcacacagacttcctgtttcctgcacacctacctccaacctcatctctgcctcacgctcatccctccctctgccccacctcaggcatggggctttggtttttgtctgtttgaacttttttattatgggaagtttcctactcatatgaaagtaaagggaaaactataatgaatctcatgtccccttcctcattttcaacagttaccaactcatggccaatcctgtttccactgtagccccatccatccaccctagagcttagcatttcagcctgggaccccttgaacgtgttcagggagggtccagctcagcagatcccccaacccctgtgcactcttgcattggcagaggtgtgagctgtgcccacacaaagacggggcattgaagaggactgataatggaggtgaggcgggctcatctgctgaggtcagcagggccccctgagcagggtctgggaaggcaggaatggactgagttggggtggaggccgggtttcctttccctggctggcgctggaatctgatgggaaggctgtggaggagggaacagtctgcagcgtggggtcataaggggtggagtctccggcttgccatctgcagctgaggctacccccacactgccccaggctgggcacacgtggtgtgtgccctctacatccccgaggtgcaatttgccaacgtgctcaccatggagcccatcgtgctgcagtacgtgcctcatgatcgcttcaacaaggtcagcggccccccgccgtgtcccctaccagttccctcccatctatgggttcctccaacgctctcttcatccggtgtaatttgattctgtccaacgagcactgaaagggaacttgggaggtgggtaggtacctaccagtgaaccacccttctgttgacagacacactcatgctctggcactcaggtgaaatagtaggctcccctgcagtagttctgccagagggtagaccttcgcagttacttcattcattcattcgctggacacattttattaagtgcctactatgtgccagacctggtgcaaggtagctggcacacgctgttcggtgctgatcaagacaggtgtgctgcccgctcaatggaacgcaagttcttgcatgcgaagactataaatatcagtaaaaaggcaaagtaaatgcaatttgtgataaatgctgtgaagaaaataagacactaaaataaagacctggtgggggcttactttagaccagatggtaaaggaaggagacatttaggctgagacctggggcgtgagaaggagccagcttccaggagggtaagggcccccaggttccaggcagaagaaagcctgggcagaggcacagaggtgggcataagctccctagtgagcaagacagacaaaggccttggcctttcagagctaaccatccaaggactgtgctacccagcatagtagccatcggccacacgtggctacataaattaatcaaaattaaaagcaggctgggtgtggtggctcacacctgtaatcccagactttgggaggctgaggggggtggatcacctaaggtcaggagtttgagaccggcctggtcaacatgatgagaccccatctctagaaaaatacaaaaattagctgggcatggtggtgggcacctgcagtcccagctactcgggaggttgaggcaggagaatccctggaacccaggaggcggaggaggttgcagtgagccgagatcgtgccactgcactccaacctgggcgacagagggagactccgtctcaaataaataaataaaaataaacaacaattaaatacagtttagaatctagttcctcagtcacgctagccatagttcaagtgcttatagcccatgtgactggtggcatttgtcttggacggcgcagaccatagagcgttttcatcactgcagacagttctgtgggatagcactgatctaagactgtagagagcaaatggaatggagggggtggcctaaggaccatcagtagaacaggggctccctggaggaggggacgattgcgctgtgtcctgcagacctgttacatctgcgaggagcagggccgggagagcaaggcggcctcgggagcctgcatgacctgtaaccgccatggatgtcgacaagctttccacgtcacctggtgagacccctgtcccacccccctgccccccgggtttgtcctggatggccactgatcaggctcatcctagctgctgtccctttgatggtggtggcaatgctttggatggtcttggcttcgcctcagcagggggccaggagggtgagaggaaggtggctcatgtgatctgtggcctcagccgtctcaggctgccttctctggttagtgcccaaatggcaggcttgctgtgtgaggaagaagtgctggaggtggacaacgtcaagtactgcggctactgcaaataccacttcagcaagatggtgagtcctggcgaccagcgcatgagcgggtcagtcagctgtggtaagatggttagagggcatgggctctgggccaggccagtgcctggtgctaggaggacagagagggaaaaaacccagtccctgcccaagaggagctcttcattcgatgaggaataaagtacagcttcaggtgtgtggatcagagctagaccaagcagtctgtcccaaaagacaaagctcagaccctgcctgtcagagtctaggaggcttcaaggaagaggtagcatttaagctgagtggaggtggaaatcaaagtaagagccaacatttgtgtgggaggcagcatttactacgcctccgccttaggacaaagttcctgccatgtgttattttgtgtggtccccccaccaaccctaagaactaggtgtgctatattttccccattttacagatgagtaaactaaggctcactgaggtcatataacttatcttgcagctggtagatgggatttagaacgggcagcctaatttgaaaactcctcaggagcctgccaaacagagaaacgagtcccaggcagagggactagcgtggacaaagtcctgagaggaggaagggcatgggtgagcagcgggagaatggggtgtttggtggggaagaggcaggagatgaagtgagaaagcagagcccgagctgggcttgcctctgccccaggcttcaggggtccagggggaggctggaaagggtgctactctgtgtctgtgtttgtggagagacgtgtgtcccagaagctgtgaggtattctggagcagttggctgcagcttggatctacccccgagccacaggcttgtcaggcctgtaagcgggagagtaacatgatcagatttgttttttaggaagattaccctggcagccgctgtgaggctagatcagaagggctgaggctggtggccgggagacagctgcaagaagggggatggaggggtgaggctggatgctagaaccatttctagggagacttgcctaatcgtgggagtggctgagaagtaggagttgggggtgacatttaggatctaggctctagacactgggtaaatggagcttgaatacctggggggtgccatgaacaaggggtacagctggcttctgtagggggaacacatgtcctgatttgccccagacagtcccagtttatacctgttgccctggtgtaattattattagttcccctgtttcatttttgaaagtgtccaggtttggatcataagttacgtggtcaccgtggtttcagggtttgatgatagcttaggacaaggtagcgagcttggcttggtttgcaggagacaccatgtggagacatttagatttggtggatgtcagactcctgggcagggtgtagtggcagctccaggcttataaggctggggccgtaatcccaggttgtccacaaggatggatcaggcgggccacgaaagagggggccttgcagggtatggggctctgcaggtaggagctgtgtccaacactggggagctgcccactggtcagataaggcctgaaattagcccttgggtttggcagttgggaggtagctggtgaccttagagggagcagctataaccccggggagggtggagccatcaggctgggtctgtagtgaaggggatgggggaggcaggccctggctgggaggagacgcagcatgtgggttgtttgggttgtgttgatgtttaacttcccccctttcttcaagttaagggcagcatatcctttgggacaggagcaaccactgtgtttggtggaggggaggggccaggataaaggagaagagggtgatagctgagccaagtgtctggagggaggattggatatggagtgcaggggagcactggctccccacgagggtcccctgcacgccctctgctccagggaaggaggtagaaacgggccgtggctcagtcagccaagagggcaccatggagagaatgaaagacccgggccccagtctcacctccacctgggccttgctggggcccagacgcatccttgcctcttctgggcctcagtggttgactctgcacattgggcgagccagctggaacactctaggattttcaggctggggaacacccttctgctgagcagagcatcatagaggacatgaggtcctcttagtgacagacggggcacatggggctgacccccaggatcaggatcctctaaccttctggaagcgttccctaagcccgtgagaagagggtttgcaatttctctcaaatctctcccgcagaagacatcccggcacagcagcgggggaggcggaggaggcgctggaggaggaggtggcagcatggggggaggtggcagtggtttcatctctgggaggagaagccggtcagcctcaccatccacgcagcaggagaagcaccccacccaccacgagaggggccagaagaaggtagaagtcctcccccacctgccatcactcccacacggggacttggagactcacaaacatggctcaaaaagccatcatgaggtgcccttaaggtcttggccctgccttcttccttcctctgaggccactgagggcaggagggggctgaaatgaaacggtgggggggtgaggcgggagcttggcttccctgtggctgtgttagtggttcctctgggtcctccccatgacatcacagtgtcccccaggccccagacacatggctctgcacgttgcacacgtctccgcagtccagccatgtgccgcctagtaagtgctcatgcctgcattccctcgcgccacatagcacagcgtgcccagctcctgtccctctgtgcagctgtgtcccaggtggacacccttgcaggtgttatgttcacgcgcgtggtgctctatagcactggcgtgataatgggacaggctatttttagcaggcggggccgggggaagggctgttggctctcataggaacttgcctgaatcgctcctgcccagcccattatccagccctcctcagggagagatggtgcccacaaaaccccatccctaagggggtgtcagctccccatacccacatgtcatgtttgtcctcgcccagacagccccccagcacaatatctagtcacctctccctctccagagtcgaaaggacaaagaacgccttaagcagaagcacaagaagcggcctgagtcgccccccagcatcctcaccccgcccgtggtccccactgctgacaaggtactgctgcccaccttcaggagggatggtgtgtgggtctggggtggcagagggagggaggcgggggcgagaggttggtgagtcagggacctgggcaccctccccacagcttcaagttaatgccactcccctcctaccccataccctctactccttcttccagcctagaaggggccaccaatcaccgaccaaccatgggattgggagtttggggtgctgtctgccagatactcccatctgcctctgtccagagggcctcagccctgggctcttgtctgcagagagtgggggacggcactcaggcctgctctccaagttctagggcccctgtccccagagatcggtagaggacatcccctacgccccatcaggaggacacccaaagcttgtcacccaacccaaatcccactctgtgcaggttggaggggctgaaagttctgaccaaggtggcatggggggcaggcccctggacagtatcccgaaactcccactcatcccaccattcccagcagggcatggtatgtcaggcctgtctccagaaatgggcaacatctggctgagcgataggcaggccctaccctaggccagggaattgctaatccaagctggaacagccctccctgctccctacaacctgccctccccatgggaggagaacctggtagggtggggggagatggagaaactgctccctcctgtcaccattattgcccattcacctccaccccatctcagacggttggcagagttctgggcaccttagcaggaggttcaggtatcaggtttccagggtgatgttgctgtggcaactgccccagtaaacctctcccctgcttcccagggctcacctggagaccttgtcattcatgccctctgacctttccaggggcctgcaggcaggtggcaagaaatggccaggggtctgggagtttttccagtaactggatgtcccttggacatgccagagaactctgcccatcctcctccactcgccccagcacttcggctacccttccccccagcccctctcttcccttgctctcagaaccacatctggctcccttcagaactccagctgttgaaaagaacaaagaggaagacagagaccaggactccgcccgggaggggcagtgcagggtggctctcgtttctggtccagcctgcattcagcatttatctgttcagcacgattaactgaatacctggtcgctactaggaggaaaagggccttccctggcagcagcctgaagcacgaacgaactcacggcatgccaggctgtgttctagaaccaggagatggaggggcatatggagattagtccatttaatactcaaaataatccaattaggttggaaatttataaaccccatttaatatatgaagatgatggggcacagggaggttaagtaatttgcctaaaagcacacagctagtaaagtggtagacctgagattccaatgcagtctggcttgaaggcttgtgctcttcacctgcccacagcactgtctctgcagctgctgccactggacgtctcatcatttattgaccctataccatgtatctggcatcatgctgcttccaactcaccacatatgcatagtgctccctgtaaagacactgacacttatcgacgttgagactttgcacagtataacatggcagtgaggccaggcgtggtggctcacgcctgtagtcccagcactttgggagtccgaggcaggtggatcacctgaggtcaggggttcgagatcagcctggccaacatggtgaaaccctgcctctattaaaaatacacaaaattagccgggtgtggtggctggtgcctgtaatcccagctacttgggaggctgaggcaggagaatcacttgaacctgggaggtgattgaaggttgcagtgagccgagatcgcaccattgcactccagcctgtgcaacaagagtgaaactccatctcaaaaataaattaagaaaaaacaaaaacatggcggtgaagggcagaacccatcaggctcataccttgctctgcccgacttagagcccacgctccttcaaccaccaccctgccgctctctttggtttctggtgcctcagataggacagaacatttcagtgcagagtggcagctgttgacatgtggtcatgtgtgcacagttctctggaaataaggggacagaatgtcttgttccacctgaggtatttagggaggcttcagggaagagggacttccaagctggattttaaaggatgagagatttcccaggaagagtaaggataggctgtcctggcaaacgcttagtgtgtgcaatcaggttgtctaggaagagcatggggtggtcagagaatgggtggaaagccagggggccgaagtttggggtagtagctggagggctccaggatggcaccagagaagcccattctcctgtgggtcctcttctctgcctcgccacttccagcataggtcccgccttcttagacgccctaagtattcagtgaatgaatggaccaatgagtaaatctcttcagactctgggactgttttcatctccctcttggcttccatcttccctgcctaaggtgaaagacagacaccttcttgggttcagtgaattcccctctgccttacacccaggagtgccacagctgcctccccatatccctggtctaggagctcctggccactccctgcccggaagtccttcatgaaactagctgtgggctctcccagttgagctaggtcctgtgccctcctgcttcactcccacatcaggatcagcacaggcccaggcacctggtgttgaaccttcctctctcctctccttcaggtctcctcctcggcttcctcttcctcccaccacgaggccagcacgcaggagacctctgagagcagcagggagtcaaaggggaaaaagtcttccagccatagcctgagtcataaagggaagaaactgagcagtgggaaaggtgtgagcagttttacctccgcctcctcttcttcctcctcctcttcctcctcctctggggggcccttccagcctgcaggtgagtgtgggcatccgggaggaagctgggagcagggaaagccttttgtcctgagcttttctggcaagggactttgcatattggttttgcatctcatttacttctccattggttcaggataaagatggggaatcccctcctctccaaacctgcccccaaacccttccttcttgaaccagaactctcctctccccttcaggggccaccccaccaacctcataacagtattccttatcccctacatttgtgctgcaaggtacaatttttcaagaacccccattaacattttctcctataatcgctacagtcatctggtgaggccagtagggtgcgagttactctcccccattttattacaggtgggaaagctggaggggtcgggggtactcatcccaggacacagacagtggcagagctgagacaggaaaccaggcatccccattcgtggaccagagctctctcccgccagtacacgcgggagtgggagggagtgcggggatctggggtccagctgtaactgtttcccctctgtgcacagtctcgtccctgcagagctcccctgacttctctgcattccccaagctggagcagccagaggaggacaagtactccaagcccacagcccccgccccttcagcccctccttctccctcagctcccgagccccccaaggctgacctttttgagcagaaggtggtcttctctggctttgggcccatcatgcgcttctccaccaccacctccagctcaggccgggcccgggcgccctcccctggggactataagtctccccacgtcacggggtctggggcctcggcaggcacccacaaacggatgcccgcactgagtgccacccctgtgcctgctgatgagacccctgagacaggcctgaaggagaagaagcacaaagccagcaagaggagccgccatgggccaggccgtcccaagggcagccggaacaaggagggcactgggggcccagctgccccatccttgcccagtgcccagctggctggctttaccgccactgctgcctcacccttctctggaggttccctggtcagctccggcctgggaggtctgtcctcccgaacctttgggccttctgggagcttgcccagcttgagcctggagtcccccttactaggggcaggttagtgacccctggggacagagggcatttcagggcccagccagtctagtgaggaacagagcttacacatgcacttagaaggaaatgggatggataccactccaaaagatagagcacggaggagacagtcaccttcaggacatccccctctgcatgcgtggagtagaaaggattggggacagattgtcagaaggttttaccaagttttgggagggagattagaaaagctaggaattctgtagccctcggcagggcagtttaacaagcaggcgcagcaagcagatgtcacccaggcaggaagtgacatctttgcagcaagagggttagactggggcatgtagccagatcccggggagcactcgagctggggaggggctgtcagccacctggctgagcaggagtctggggtggagagtaaccacgtgcttccctctgtccttgtgcctgcaggcatctacaccagtaataaggaccccatctcccacagtggcgggatgctgcgggctgtctgcagcacccctctctcctccagcctcctggggcccccagggacctcggccctgccccgcctcagccgctccccgttcaccagcaccctcccctcctcttctgcttctatctccaccactcaggtgagacctgactcctgggctcctccttccctgggcaggttggggacagactgacagaggaccccagccttccatgggaattggagcaactgggctgagttgccatcagaccaccctccgggctctggacccctctgctccccagcacacccggccccctgcaccccggtacacacagttgtgctctagatccaagaataaccgccaggggattctacctccctcccttaggtgttttctctggctggctctacctttagcctcccttctacccacatctttggaacccccatgggtgccgttaatcccctcctctcccaagctgagagcagccacacaggtatgtgaatatctgatcccctctcccctttcttcccaaaggtcggacacccatcacctgcatgtgaccccagaaagaatgggagagctttctggctgccccctccctctggccattgccctccctgcaaaaacaaacaggccgggtgtggtggctcacgcctgtaatcccagcactttgggaggccgaggcgggtggatcacctgagatcaggagtttgagaccagcctggccaacatggtgaaaccccgtctctactaaaaatacaaaaagtagctgggcgtggtggtgggcgcctgtaatcccagctactcaggaggctgaggcaggagaattgcttgaacgtgggaggcggaggttgcagtgagccgagatcgctccattgcactccagcctgggcgataagagcaaaactccgtctcaaaacaaacaaaatcccagcgtagtggctcccgcctgtaatcccagctactcaggagactagcctgggcaacacagggagaacctgtctcttaaaaaaaaaaaaaatccacacacagcaaaccagggtacactttcaagttagaacccagcgagaaggcagggcagggaagttactgctccatctcacagaagaaaaaggcagagatggaagacttgctcaaggcaggaaatggcagacctaaagctcagattctgttctcctgactccaagcccagtgctttcaccggtgtagcgtgcttccccttggcttcgtagtgtgtcttgggatcagcgcttacggaggtctcaacctctccgggtatttacgagttaagggggcgggtcacaagcgccccgccctctccctggagagtcagcccagccccagaaagctaattggtgcagggagaccacctgtcaggctgggaggcggggcctacagccaggctgccgactcaggtaagccttaaaggggacaaatatgattccacgtttaagaacgacagagtagggtgatatatttgttaaaactcagatcaggattctgtggcccaaggaagagttttagttttgcctcctgataagggatctgatgaatgtaaaaagtcatacagagctaattatgataatagctgcagtcattaagggcttgctacatgctagctaaacccttcaggtaaacacttcacatttattaccttcttttaatcttaataacagtcacttcggagaggctggttaggagcccaaggtcacaaaagttgatgtcaggtttaagttcaatccaggtctgtcttgacctcaaatttctataactctgaagatcccaggaaaggaattgggcggtggatctgaaagaagccagacagtggagccttcagcccagaggaggaagagagcagatgcccggggtttgcctcccaggggcagggtttccaagccagggccctcagcgctggccttgaactgccagtgtggggttggggattcctggggaaagggatctgcggtgaggtcccaatcccatatccatctgggggcggggaccctgaggcagctaccactcctccacgctgatcccagccttcccttcttccaagagccagacctggaggactgcagcttccggtgtcgggggacctcccctcaggagagtctgtcttccatgtgagggaaggggcagcctggaggaggggctgggggcaggagggacacccgagggaggagggacggagagaccggcgtgggctggaacccctgggggatacgggagaagggccagaggagcctggagtggtcgggtcgactgaacccaggttccctctggccgcaggtcccccatcagcagcctccccgcactcttcgaccagacagcctctgcaccctgtgggggcggccagttagacccggcggccccagggacgactaacatggagcagcttctggagaagcagggcgacggggaggccggcgtcaacagtgaggaggggtggcgccggtcgggacgcctgccctagggccctaacagtcacctttctccccgaggtccccaagcttctttaaggttccgcccttaggccccgccccagccttgactctcggccaccccgggcctcacctcccatccctgccaggccacacgaccggccctggtccctcagcgccccacctttggccttcgtggcctccgggccccgaccttaccaaaccgcaacttccgcccttctctcctgacccgtgtggcctcgaccccagcctcaggctccgccccaggtcttcacacctgtggctccccaagtcccgcctctcttctcagagctcacctgtgtccctccttaggatggcgccgccttttcaagggctgagcactggctcccctccaggccccgcccccggtcccctggccccgcctccgccccctcgcccctccctcaggttcctcgctctctccgcagtcgtggagatgctgaaggcgctgcacgcgctgcagaaggagaaccagcggctgcaagagcagatcctgagcctgacggccaaaaaggagcggctgcagattctcaacgtgcagctctctgtgcccttccctgccctgcctgctgccctgcctgccgccaacggccctgtccctgggccctatggcctgcctccccaaggtgaggggatcctgcccagcccgggagagaggcccgtgccctgaagtccggactggccctgactgcagcctgtgacatccctcccacagccggcagcagcgactccttgagcaccagcaagagccctccgggaaagagcagcctcggcctggacaactcgctgtccacttcttctgaggtgggcgctacgaggagtggggcaggaaggagggggagactcaaggctctcctggtcccatctcttccccgcagctattggaggctgggcaatgaagtgactgactgagcaattgattgatccattcagtcctcccttaatcaagtaatatttatgaggtgcccacttagtgccagccattggctaagcaatcagtgagcaaaaccggcacagcgctgcttcttaagataggctaccccaagcaaagaaggagtaatcacaaactgggagatatgttagtgtggagagaaattgagggctgtgagagagagaacgggggagggctgcttctgtggatagaaagtggttagggaaggcctctttgagaagtatttgtgaagggtttattatagcgcctcacacaaaataattcctgtgtaactggtggcggttcgaatagcagttgctattgtgttgtggttattactggaatccaacaaactgggttcttgttctctctctgccatttattaactgtgtgacttgggcagtaataatcataataataaccagcattaattgcacacttgccctttgtcatgccctatgcaaaaattttttaaagcattcatttagtcttcatagtaagcctatggaataggtactactgttaccccccagcttacgagtgagtaaactaagacaggttgaacccaaggtcacccaagccattggattgtggacataggatttgaacctgagcctttcactttagctgtagtgcttttgcctgcagagttacttaacctgtgcaagaatcaatggcttcacccataaaatgagaatagcaagatagcacaggtcaagccctcagcccaggatctggttcaccagatggtcaccaccatcatcattgtccattattaaatgaggatgatgaggggcgctggactcccaggaaggggtcaggaaacatgattcgtgaagacaatttggattcttagccctcatccccggaccttgcttcttccagggtgcctgggggtgaagtgggggttgctgtgctctgtgagaatgctggtgggtgctgggccaggggccagaaaagtcatgctggccctctgacccctcccttccccctccctccccaggacccacactcaggctgcccgagccgcagcagctcgtcgctgtccttccacagcacgcccccaccgctgcccctcctccagcagagccctgccactctgcccctggccctgcctggggcccctgccccactcccgccccagccgcagaacgggttgggccgggcacccggggcagcggggctgggggccatgcccatggctgaggggctgttgggggggctggcaggcagtgggggcctgcccctcaatgggctccttggggggttgaatggggccgctgcccccaaccccgcaagcttgagccaggctggcggggcccccacgctgcagctgccaggctgtctcaacaggtgagggagagctcagccctgggaaggggaacagggtggggggctggctctgggaagggagggattttccccaaaacacccacaatccctaaaaggaaaaatggcctctggtctcacagggtatataatcctagtcacctcttggcctctaaggactccacagactgttagacatgtgtgtcctctggacggtagctccccagggacaaaagaattgttgacttcctgtcctgcactctaggatttccttctgggacagttcttctaaatcagacctgtatccctcttgctgcaccctatgagcacggtgctctaagatcgcacatccctgccttgcttcccctgggtctgagggagtctaggggcttgggattaggagcaggagtgtttccctggccctcccccatggtctgtgtgttgtcccccccccaccccccacccccacctcagccttacagagcagcagagacatctccttcagcagcaagagcagcagctccagcaactccagcagctcctggcctccccgcagctgaccccggtaatgcccctcccttccctgcctcaggtgccccttggtctgcctggaagggcacatctcagaggatcagggccagccaggagagggcaggagcaggcagagtgaggggaagctctaggctgggcctgtgggactggggctgggccctgtggagcatccatggcaggtaagggggataagatcatgcccaggatcccctgggcattgagaaagggctgctgtaatagccccaggtcgcatcctggtgaaagactctggagggcagcaagtcctcagttattcagcatttcagtcccagccccaaaggcattcaggggaaactccagggtctgagtggctgtgcaggtgacaccaccctcaaccacagcagcttctttgggtctgtctcctgttgggtcggctgaaactacctttggagaaaaggagttttactttttaaaaatgagggaagcagccgggtgtggtggctcatgtctgtaatccaagcacggaagactgaggcaggcagatcgcttgagctcaggagtttgagatcagcctgggcaacttggtgaaactgagtctctacaaaaaattagctgggcgtggtggtgcacgcctgtagtcccagctacttgggagcctgaggcaggagaatcgcttgaactggggaggtggaggctgcagtgagctgagatggcgccaatacactccagcctgggtgacagaatgagaccctgtctcaaaaacaaaacagggagttgaaaaaataagaaaaatcaacattttcatataaagaaatattagacaggaaaccaattcagctggctgcctgtagggaccagatgggagcaagaggagtaagttcttaaggtaaactttgatatattattttggtttctgggacattaagaatgctttgcctattcaaagcaaaataaatgaatcttaaatgatagaagcaaacaaaacaaaagagaaagggaattgaaaactttttttttttttttttgagacagagtttcactcttgttgcccaggctggagtgcaatggcatgatatcggctcactgcaacctccgcctcccgggttcaagggattctcttgcctcagcctcccaagtagctgggattacaggtgcatgccaccatgcccagctaatttttgtatctttagtagagatggggtttcaccatgttggccaggctggtctcaaactcctgacctcaagtgatccaccggcctcagcctcccaaagtgctgggattataggcgtgagccaccgtgtccggcgaattgaaaactattgacctagtcagtagttttggcgaaaccccgtctctactaaaaatacaaaaattagccggatgtggtggcaggcccctgtaatccagctacctgggaggctgaggcaggagaatcgcttgaacccaggaggtggaggttgcagtcagccaatatcgcaccactgtactccagcctgggtgacagagcaagactccgtctcacaaaaagaaaagaaaagaaaagaaaactattgacctagtttagtgtttttcaacttgggggcgtctgtggttgtcttaggagctgaggggtgattctgtgggcagggccagagatattaaataccctgctgttggccggcagtgctgcagctggcaaataccaatggcgtgcaaccattttcttgtctagatggggagacccaggctaagtgggaaatgcgagacagtaccttgactgtctcacaggcctcttgcctcctgattccagtgtgatggggtggggcctggccaggcagggcaggcaggcagcagggaagagacccccgggactgttggccaacaagcggtctggcccccttgcaggaacaccagactgttgtctaccagatgatccagcagatccagcagaaacgggagctgcagcgcctgcagatggctgggggctcccagctgcccatggccagcctgctggcaggaagctccaccccgctgctgtctgcgggtacccctggcctgctgcccacagcgtctgctccacccctgctgcccgctggagccctagtggctccctcgcttggcaacaacacaagtctcatggccgcagcagctgcagctgcagcagtagcagcagcaggcggacctccagtcctcactgcccagaccaaccccttcctcagcctgtcgggagcagagggcagtggcggtggccccaaaggaggggtgagtaaggggcccggggccttcctgcctcccctctgagggatgggtagagatggattgtcagaaggcttatcatcaggtacctcagcagggggaaggaagcaacccctaggtcagcaaagtaccctgcctcagaccccagggcctctgcttgcacatgggtgccctcctgcacggccaagaaagatccgatctgagcatgggctcagaggaaaaggaccaattagaaaacagccttcctccgggaggaccaattagaaaaagccattttgtttctcatccgaccaattagaaaaagatgaccctctgggtaggccaatgtcagaaaggccctctccctctcctgagggcacacggccttagcttgcacatgcccacgcagcccggtgctcttctgcagggtggtttcacacccctgcgcatcggccctggtgcacacccctcagagcccaggccagaggcttccattggccccgtttcagtaccccacagcagctttcttggcctaggaagctgttcttatctgggggttaggacctgacactttccacacccccggcctccctccctctctttccagaccgctgacaaaggagcctcagccaaccaggaaaaaggctaaatccacccttacccctcctgacccccccaagtggagggaacagatcctggcctgaggggtcctagcctggagcaggcgcctgcgcccagaccctggagagccttgacccagagcctgtgctgaggtccagggagtgtggagagctcctggtgtcgaggactgagactgagaggggagccccctccatctggcccccttccctttccgcactgtccgctttgtgaggctcagaggaaggacagtctgcaagcccgcctaggaggtccatccccagcaaatgttttggaggtccccccagagagcagagtgggccatggcagaagtagggggttggttggacctgtcacatgaaatggatcagcacttgaatggggagaagtggagggagaggccctgggcctgtccctgcggggaaatcttttatggaagaagggctggacccactttacctgcagtttcttcccagctcgggcagatggcagaagggaccccttggactttttctcgccatccctccccccagcgcaggggcacaagctgagcttgtaaaagcccacagatgttgggggctggagaaggggcaggagagcatcacactcagccccagcctcctcaacctcttggggccccgtgatggggaggagagggcaggtgcggggaggctctggccttccttggtgccccgccctttgtttgcactattggacttaggagtgccgagggtggggagatggagctgcccgtctcagtgtgtgagtgtgtgtgtgcgtgcatgtgtgtgtgtgtgtgtgtgtgtgtgtgtgtctgtctgcctgtctctctcctcctggacccagggcagccaagggcagggataggcgcagtggtcagatgaagcagcgccagagaggggacctcccagctcttatttgcaccctccccacctcaccaactttggtccctctctgggggcatgaatggttaacaaacaccagagcagtactccaatattggagagtcgctgggggcacagggctttgaatcagggtagtatcctgccttccctcccctgaccccacatggtctcagggcccccttagggccccctaccccactgatagcttcctccttctctggcacaaggggagccccagggcttgggggagggcgtaaggtggggggaaatgccactgcttttagcaaaagcctccctcccagaattagccagcttgcctcctgcaccccacccccaccaaccaggggagccactaagctgactaacaactgtcccctcacccaccagctatttccccagggtagagtgggcaattctcaccttcaaagagtccccgcctgcccaggcctttggcacagaggctgagtggacagtcaggagagaggcgagaggcaaggcgaagcctgtgtccctgtttcagttgcactggggttggagcccagggtaggggtttccagcttccccaggctccggccttgtcagtctctttgcatgtgtggatttttctgtgtgtgtttctgtttgggtttttgttgttgggttttttttttttttttaataaagaaaagaagatgtgtatatttttggcaacgacagaaacgtagtgcagatatatttttgcctgtgctgctcaactgttttttttttctgatactgaaaataatattaatattcctgttgataagactttgtaagatgttagggagctgataatggaggggggtgggaatccttcaaaggcaatttcttaggcacttgcaagggcttgggggagggggaggcagttgtgatgacctcagaaatactcactttttattaatgctaaatatgttagaaagaaatgatagcattcagcattttattcttcttaatctattaagctgtgtaactccctgccccaaaccactgaaaagaaaagtaaccttcaggccaggcgcggtggctcacgcctgtaatcccaacactttgggaggctgaggcgggcggatcacttaaggtcaggagttcaagaccagcctggccaacatggtgaaaccccgtctctatcaaaaattagccgggcatggtggcacgtgcctgtaatcccagctacttgggaggctgaggcacgagaattgcttgaacccaggaggctgaggctgcagtgagccaagattgtgccactgcactccagcctgtgtgagagagtgagactctgtctcaaaagagaaaaaaaaagaaaagtaaccttcagagattcttagaagagttgctcattcacacccacgcccttgcccaaggctggcccacttagagcgaaacttaacttttgtctggatgggaagagaagtaagtctaccccgaggttgccatgttgaagagtgagaggtccaagtgattctgtgcattgaaaccaagacaccccacccagaacacttcttccctccctcagcccaaaccaaaggctggggttctcatctccaagtggctgttctccaactttcccaagccgcttgcattccccagactggactactgtggcggttaggttagatttgaagacggggcccaggctgggtatgaacgggtgcagccctcttctcctcttcccccccacatctctcatgagagaggtagtggcatttccttctcagggagcttcaatgggaaaggtctcgaaagcttcaggaggagcagaataccaacgcagggggatggctgtaacgatctcaccgtctcctaacctcagtcccttttttgagagtgaatggtggagggtgggaagggacccagatttgtagatctctttgtctgggggaggggaaggatgtggtttgcagagcggaagcagagtttggaaacgcatgagagcagagcttcgtgtgttcccaccctcagtgaggaggtgtgagtgggtgagcatgtggagttgggtgttcccaccctcagtgaggaggtgtgagtgggggtgcatatagaggcagtgcctgctgtggggtcacaactggtgcatgccagcgccaaagggacctgtctttaggggtcatttcagccagctcctcccatcacagatgacagctccaagcctagaaggggctcagtgacagggccaggacaagccctcaggactgtggcctcctggcccttggttcccctgccccacaacatggtctccacatggctggctggctggctgtccctgtgtgtgtgtgacacacggtgtgagtgcagggctgtgcccggggtgggagggtgtctatgtggcactgactgtcttagctcagagctggtggatcctctccatggacaatgacactttaaggattgtcttggtttgtttttcctatttgtggggtattttccccctcaggctcctgggtctgctgctgcctcaaggtgtcctgaccttgaggctgatgaggggacccctgcctgtttcccccatactgagttctagggaggtgctcaccccagactcttaggaagggtctagagaaatgagaggagcccaagccaggggccagctccgagaaagggtaacctccacgcttctctctcccaaattggaaatgaagacaggttttcaaaggcacaggctccccctgccagcttctaggatcttccttggtgtgcaatgggccagttaggggtaggcagcttgcacccagttctcctttatctcaacttattttcctggggagaggtgcctagagggattgaggtaacttcaactgggaattccaaggaaggtgggcaagtagccttggctctctcccaccatgtccatcaggattgagagtgtgtctagctcccgaccactttgtcttgacctactgaaaagttgggaactgaggggtgccttcattcccctttgttcactttctccagctcaacttgggacttgggtggtgggactggagacctcacccctgctcccgtcccgccccctttctatcccaacctgtttccatgtagcagacccttcctagggagcagggaggggaagccacagattgcaaacccaggggctcctttttcattctttctaaaaccttgatatcctcagcccaaaggcgatgcccccctgccacctccaagcctggaattgtgcataacccggatcttgtatctttgtataacggatgttatttgtacgaagggcagttcgtaaacagcacttgttcttttaataaaagaatgttttgcaaaaaaaaaaaaaaaaatccgaagagcccctgcgtagtctcgctttatggaaggggacaggaggtgggtgccaactgcgggggtgtaggagggcgtgggctgcggcccttctgtccgcactcagcggcagagagcgcacagacgctcagcacacccgggcccaccacgcagggtgcatcagtccgtgggccccggccgtcgggaccctgacccgtcccgaggtgacgcgacgcccgcgcgcttgctcccagaagcgcggcctaggctcggccagcaacagcgactcctgggagggtcctgcgccctcgggggtgccccaggcgccgaggctgcgcgcggggcgttccaccgccaggcccgcccggcagggggcgccgggaccgaccgctcacgcccggcgtgctgaggaggccgctgggcgggcgccgtggtcgggcttccgtaccccgcccgcccctggcctccgccctcgcagaacgccgcggcgtcttccggggcctggcgggccggggaccgagggggcggggaggtgacccggcgggggcggagccagcgggcgggcgcggcgcgggaggcgaccatgcgcggcgcgggggcgatcctgcggccggcggcgcgtggtgcccgggtgagcacccccgccctgcaccagcccccgtcccgaaccccagccgggcccctgccagcccccactccagccccggcccggccgagcatcccggagctcccggcccgtcccgccggtgtctggcttgcctcagctcacaggcttttcccgagcgccagtccctgccaggacctccgcagccagcaccttctcttgcgacctttttcttaccctctcattcctccctcgccccttcagccctgtcacctcctccttcctagatggcctcccgtgtccttccctttccactgattttatttttccgtttccaaaccaccgtcttgtgatgcctgccatgcttgcgtaccttgcaggacctgaacccgcggcgggacatctcctcctggctggtgagtccccccatcctcccctcctcctcgcacaagacccccaggcacggagatctcaaaggcagaaacaggaaatggagctaggaagagtacaggcctattccctggagttagcccgtggctctcagggaggtggggcggaccagagggcactgggcagggcgccagtcttctgtactgaggacagcagcacctaatgaaccaagccccagtgtgggtggccctgccgtaggctggaaggatcccagcccgccttccctagcacgcaggtgggagccagcgtttgagggaaggcagctggaccctgaaacctgagtgcctgcatggctttgaaatctccctgtccaaagctcacggtcctatggtgtcctggggaacggtcttgttgggtggcatcagatcagcctcttgtagaggaaacctgccacacacacaggccagtgggaaactaggaagggtcgcaggccggacggtgcttccagggcttgagctaaccctgagcccctcatcttccctggccacaggcccagtggttccctagaaccccagccaggtccgtggtggccctgaagacccccatcaaggtggagctggtggcagggaaaacctacaggtggtgtgtgtgtggccgcagcaagaagcaggtgagacccctgtctgccttcctactgatacctctggctaggaacagcctggtgtctccagtgagttcccacccaggatgatcttattcttcccacacatacctgagggacaccaagggggcttgggaacaaaaggccagtgccaccagcaaccttaagctcactgcatctaccccttgcaatgaagccagagagacagaaactcagtcacgcagccagcctggtgtggccaggcttccagtgggctcttctggagctgtttgtttctcagaggtgcactgcatggcgaagctcacctggcccttccctgtctccttccaggaagcgcctgggccacagattcccaggccttgaaccccaaaagcctacagcacctggtatttcctggcggtcttccatccaagtactaaccaggcctgaccctgcttagcttccgagatcagatgagattgggcgcattcagggtggtatggccatagacacattgggaagagattctgctcaggctctcctgcctccaaagcctcccagccttcccctgtgcccctctctactcttcttccagaaaactcttccttctcagtttatgggacttcctggccgcttgccacagtttgctgtcttctcagcttcactgcctgccccacttgcttccccttctgcccaggagcctttcgtcccagcaggaacctgcccatattgtttgcctccctggcccctttccttcctgagcagagctctgactggtattccttcaagctatgtggcatggtgtcagcagcccagggtccttgagtcccacttaggtccatgcacctcaagccctctaagacaagttgctggtttctatttgcacgcttctctcatctcctttccatcccaccctaactccaatgtcaagaggccttggttcagccaggcgaggtggctcacctgtaatcccagcactttgcgaggccaaggcaggaggctcttttgagtccaggagttcaagaacagtctgggcaacaaagttgagaccccgcttctacaaatgcctctacccccaccaaagactagcatggaggcaggcctgtgttcccagccatactggaggctgaggaaggaggaccgcttgaccccaggaggttgaggctacagtgagccgtgtttgcatcactgcactccagcctgggcaacagagtgagaccctgtcaaaaaaaaaggccttggcaccagctctgccttcagctagcaaggcatgtcacctttctgggcctgtttccattacccagtctctgcttgagcggcttctgggatggggagtacacttctgtgccagccagccagtttgctatggggcatcccctcctccttgtaaccttcactccctgtcacgtgcccagttattccctggagccaaacaaaattgctaccacagtgtactctccagcccaaagaagttttaacccaggaacatgggaagtaaatgaatttcatgatccagtggagactcagagacacacacacacacacacacacacacacactcacactctattagtgtcctggccctctgggtgtcccagagactaatgctataaagactctgtaaatacttaccagacacttactataggcaaagtgcatcacgatcatattttatttcctcatacaactctactcttatcacccccacattacagataagagaggtcactcagtgagccttggcagtcttgctctggagcctgtaccctaaccactgtgctccactccccctgagctcctgcagcctgccctgccctgccccagcaggtggggtcaggtctttgactcctgtctttcccccaccagcccttctgtgacggctcccacttcttccaacgcactggcctatctccactcaagttcaaggcccaagagacccgcatggtggcactctgtacctgcaaggccactcagaggcccccgtactgcgatggcacccacaggagtgagcgcgtgcagaaggcagaagtgggctccccactctgagggggctgctgctgtccagccacaggtggccttggctccaggcctctgacaggcacccccttctgtgggaaaggaaacaggtgctgagcccaagagactctggtacccactgctggctcatgaaggaagaattattccttataacctaaaagtctccagtctggggcaggcgggagtgggccctggttcaatgtttgctgatggggaagatggcaaaaacaagcctgcccaaccagactggtagtcctgcagtcactgctatgaggcccacgtgctgcctcctgctccagattttaacctctctgtgggctgggggcacctgaccagccacaggagagggcagttcagattcattctgtatggggtccccaagccaggctaaacccagagatgagaggcacccttcccttcttccctccaccccaaagaactacaggctccagaaagtatgcagcatttattacaaagccaagagatacagatgtcccagggcaaaggagggtacagtcacaggacctcagacacaggacaaggtgcaaacacagacaagcccatcagggggctcccaaccccacacacctacgctatgatggaatctcgagtctcgactcccgactcctctcagatctatgcacacttgaggaaatctcggtgggcagcgacctgccagggtctgtccctaaggaggtggtccgctgacctctcaaggggtgggggtggggtcagagcttacaggtttctgtcttcttgtgcttttagatgcagttgctctgtcctgaccaggtgaccgggcctcagctgggggtggaggggcaattggaaggctgtttgcctctggcaaagtctgggatctgtgcttgtgtgaggttaacccacccccacttccactctaggccccaggtgagactccaccaccagtcctgctagtgagggttccccggtgagggtaaggttggtgggggtgcagcgcttcacaatgctaaagccttagccctcctccaagagctgagacctctcagggcctgaatcttcttttccacaagataaatgatgcaaaggccacacacacaggaaaaaaaaaaaaagaggcagaactatctattctttgcacaaagtttccactgcaagaggaggaggtgatgcaggtgccacctccaccctgcacttgctcctcagaaccagggataaactgcatttgtaaaaggcactgttcttagcaatttctggacattcaacaacgtggggggcggccactggtcagaggcaggacagcagccaagatggggagagaaacggggagagaaagaaacgattctaactgactcctatatgcagccagttggaatcatgcctaaagctttgggtctgaaggggcccccaacacaccacctgccttgggaaacagcgaggatggtgcagagctttattgagactccagtggcccatccagttcatctccaggcacccccaaaaacagcaaattacacaagaccccccccaaaaaaaatgaacaccattttccacacatacacacacacataaagtttgtttcctgtggcatttaaattaatctggttggtccatagaaaataagtatgtatatttggtttttcctatgtacatatatatatatatttatttataaaacccgccccccacccccaaggtgggaagagctggggaaagtagaagaggtggaaaaaagggcccagaaaaagtggaaggagtggagaggcttggctggaagaagggagagggtccctggcctcaagttaaggggggcacgggagcgccgttgacagtcatcttgcgccccctgctggtggaggatggtgtctgcaggcagttcaagctacccccgttggcagctgtggtggccccactggctgtcgaagggggagtgggggaggtagggtgggtggctggaggcccatgggaactgggagagccatgggatggggtggctgggctgggcagggaggaggaggtggctggcagggtggcagggctgggagccttgtcgctgactgactcacactcggacgccccgctggtgttggtgccctcggagggggtgggcaccgtggctagggtgagccgcttgcaggctggctggacacggtacttgagggggagaggcccgttctgcggggagagtggggaggagagacacagggaaggggaaggtatcaggagacagagtccaactaaagggccaccatctccaccccacagtgtccaaactcgaaaaaagggatgggatggggccttggagaggagagagacaaggatacagggtgcatgaagacccagagagggaaaaggtctaagagcagagactccgtcagagaggagacgggagagagggaggcaaacacacggcagctgccagcacctatttctgcccccaaatctggggacaccgtctgcccagggagccttgtctcctgagcggaaagtcatccgcaagagatggcccagaggctgacctgctgtagcaagccaccctggacatgcagctcatgggataagggacagactgtctctgattacagaagggtggcccatgtggccacagacctatgccagaccctgtgggagtctgctccctgcccgccccactcgctggctcacccgccgccaggggtagatgtaggcgatgtccatgagggtgtagtattccttcagtggctcgtcctcgtacagaacctccacctgggggagggaagcggaggacaccatgaccctggccagctcggggctccaggctgggaatgtgggggactgggaggcggggcaatgggaagggtggatttacagatggtcccttatttctctgggatttcactgtggatttgacttccctgtcagagttgttccaacataactcctgaccaccaggcaggaagggttccagagaagtttcccctattgttagcagcctctggtcccaccatgcacacagctgtctgggtctcctatctctggcaggtcgcccagaggagctgaaaaggctcagggggatctcctggaactctggctctcacccccagctgcaaaatggaatcacccagggagctttaaaaaacaccaatgtggccgggtgcggtggctcatgcctgtaatcccagcactttgggaggccaaggcgggcggatcacaaggtcaggagatcgagaccatcctggctaacgtggtgaaaccccgtctctactaaaaatacaaaaaattagctgggcgtggtggcgggtgtctgtagtcccagctactcgggaggctgaggcaggagaatggcgtgaacccgggaggcggagcttgcagtgagcggagatagtgcccctgaactccagcctgggcgacagagcgagactccgtctcaaaaaaaacaaaacaaaacaaaaaacaaacaccaatgcctaggccaagtgcggtggctcaagcctataatcccagagctttgggaggccgagaattcaagaccagccaaaccaacatggagaaaccccgtctctactaaaaaaacagaattagccgggtgtggtgccacatgcctgtatcccagctactcgggaggctaaggtgggagaatcgcttgagcccggggggtcagcagaggttgcggtgagccaagatcctgccattgcactccagcctgggcaacaagagcaagactctgtctcaaaaaacaaacaaacaaacaaaaaaccaaaaacccaccaatgcctggctaggtgcggtggctcacacctgtaatcccagagctttgggaggctgaagcgggtgggtcacttgaggccaggagttggagaccagcctggccaacatggtgaaaccctgtctatactgaaagtacaaaaattagccacgtgtggtggcatgtacctgtagtcccagctacttgggaggctgaggcacaagaatcactttaaaccaggaggtggagattgcagtgagccaagatgatgccactgcactccagcctgcgtgacaaaggggaaacaaaaaaagcaaaaacaaaaaatcaatgcctgcatcttacccccagaaattctgacttaactggtaagatgtgagttaactcatgagatttaacaggcaacagtttaggatccactgtcctagagtgtgatccatggaccttcagtacctaggagcttgttagaaatatggaatctggccgggtgccgtggctcatgcctgtaatcccagcactttgggaggccaaggtggggtggatcacgaggtcaggagtttaagaccagcctggccaacatggtgaaaccctgtctctactaaaactacaaaaattagccaggtgtggtggcaggcgcctgtaatcccagctactcgggaggctgaggcaggagaatcgcttgaatccggtaggcggaggttgcagtgagccgagatcgctccactgcactctagcctggtgacagagcaagactccatctcaaaaaaaaaaaaaaaaaaggaaatatggaatctactaaataaatcagaatctgcattttaacaagatctccaggggacacatatacattcaagcttgaaaagctatgtcctggagctccgttggaatttcagactagccttcccacagccaaccagcctgaggaggccctgcgttttttgcactcacctctgccacagttccgagtgtgcaacatgcacacatacacaccgtcttggtcccatgcaccactgcacactgacttcaacacccctagactgcccccaatcttggtttcaaccacccttctgttaacgcatgggctcagttaaccgcgcaagccctgggtgacacctagccagctctgaccaatggctgggctgcacagactgtctgacacacccatacacagacactcattttttgaaaggcccagggacccaccttgtacttgctgggcacatccatcttgttgcggagaaacttggcaagatgcatgacggtcatggctgctgggcatcgcaggaagcgcacccctgtctgctggggcacaggcacccatggtaggggatccaccccaggccactccctcccagcccacattccagtcctgggcaggccccagcactcactttctctttgtccccatccccattctccagggggcccttcttctcgtcccggtccctggggacggagaaagaatgaagctaggaagacccaggaagaaccaggagacccaggaggatgatccctcaatggacacatccagagagggtcctgggtgggagaaggggttacccagactaggaacccagaaggggccagcctgggccagacttgcctggcaccttcgtagaattcgatggagaggctgacaatctcatcatcactcagagcccccttctcctgctccaagacctcgccgcggtcctcattggagccgttggggactgcagaaggaaagagctctcgggttggcggaggatgtaggaagggagcccgccaaggacccagagatcatgaactcagccaggtgagcccagccaccttctggagaggtgtgcgcggaggaggtcagagggtgaggggtagcgctacacacctacatggtcccaggcaagactgtgcacacacaaacagacgcgagcacactcaccctccgtcagggggtacgctgcatagaaatcccgccgccgtttcatctcatctggaagaaggcagcaggatgaggacagggccatgggttgggaaatggggtcagtggaggaggaatggagtgcagatacctttaaaaagcccagggaccaatttgtagacaatgtcttgaagtgttttgtcagacctggggaaaaatggacagggcttatcagcaatgccttctccagagcgctccgacctcgccctgctctcccagccagggtacccctcttcccacccccttcctgagaccggtgcccaggcattaggatccctgtgggtctggtctttgcccctctagtatgcctcaccctgtgatgagccaaatgtaaccccaaggtcggggagtagcccaggtccacaccccatgcttctcctacacctgccgccttggctgaaggaagcacggagcgtgggagggatgggggaggctgacccagaggatcgcggggacaggaggtgccgtgccaagcccacctgatgctcagcagcggccgggttttatggacctgcacgtcacacatggggcagtatttgttggtctccaggtagcgcacgatgcaggttttgcagacttgggggtgtggagagagagaggagagtcagagccaacttccaactccaggaccagcctccccgccctctgctcagactcagatatccctcctcctccaccctgtccctgctccgaggcccaatgtggcgatgtgtgttctgcacgtgtggtacctgtccttgtgcactgttgagggaagctggatcttgtgtgagacaggccagtgtcatgtacaatgcagaaggtcagccctgagtcccaagctccccgatggagtgggggacaaaagccagcgtgttcaagatgcctctgagtcccacccccctgctgccaagcccacagtgcaaacaaggggtgtccgcgtcttcagggcataaaatttcagccatttcaagaaagaactgagatttcagatgtgagtccttgaaatgaacttctgggctgatgccccgcgcccagtcgcccctgcgaggtaggccctctgtgacctaaggattcccagcagacacgtgggcgcgttggctctttagggcaagggtttgcgtgctaccttcctcaggccgtgcccgccccaatctgggcacagaggctgcccaccctgagcagctcccctccccccaactcacaggaatgcaggcactccacgatagtggtggcgtcgatgaagtaccccccgcagagggcacacatgaggtgggggttcagctctgtgattttgatccgtgtagtccgatgcatgattccggggtcgggggtggggggactggggagcgttgccctgggaaacggaagtggaatcagaaacccagagttggccgggcgcggtggttcacgcctgtaatcccagcactttgggaggccaaggcgggcggatcacgaggtcaggagattgagaccatcttgactaacatggtgaaaccccatctctactaaaaatacggaaaatcagccaggcatggtggtgggcacctgtagtcccagctgcttgggaggctgaggcaggagaatgtcgtgaacccgggaggcggagcttgcagtgagccgagatcatgccactgcactccagcctgggcgacagagtgagagtctgtctcaaaaaagaaaagaaaaaagaaacccagagcctcggcagcccctcttacgcttcactccacacctccccccaccagcacatctctccctgagcccaagacccttctctgccttcagggtgggctgggggtgtacatgtggctggttctttctggccacctctgagagttcattgggtgcccaggctctggagagtcacacagccttgagcaacaaggttaggcttcctctgagaagcaggaggaaagactgaagttaggccacaggatgtactgcccaactccccagagaatgtgaggaggcaggaaaatggaaaagaagagggtttttaaaactctttccaatcccaagtcgggcacagtggctcatgtctgtaatcccagcattttgggaggctgtggcaggaggatcctcctgcctcacgtgatcccttgagtctgggtggtcgaggctacagtgagccgtgattatgccactgcactcaagcctgggcgacagagcgagactctgtctaaaaaagaaaaacaaaaacaaaactctccaatcccaatccgtattcactcacatggtccacatttaaagcatcctaggaactaggaggaaacttagataaagcagccactggcctgaaacttcaaggaatagaagaagggaaaaataagttatccttactccctcaacccctccacccaggtgcagggcctcagacttgatccttccactacgtcccagcctcctatctactccatccattcactcctcctccaggaagtcttccctggaaacaccatggacacaggctaccctaagttagaaggccgcagccatcacttgtgcttctggctctgcatccagcctaagctttggagcacctccctcctctaaagtctgccaaatataggctgctcccagaaaatccaccatacgctaatcatttggcttccaggcctgagactcaggcagggaacagagagggtccttacatgcctgaagttgggaacgtgcagctccagccctagccctggactcaaagagtttaggcaaaaaggctatacccctgccacaggaatccctgccagtgtccctgatggacagccgcctgcatgagtgctccctgtccacaagcacacagggtccaggaacccccctttcatacacaatgcaggaatcccccccacatggtcactgttactctcccactgtctcctgccctggtgacgcctctgccacctgttcacaggctgtccagtgacaaaccacaggctctcacagatgcctgccaaagctgggcagaaagtgctctgtccccagaccgcctgctcgacaccagccaggcccgggcagggtccagagaggtgaaaagtccggctctggattggccaccgtgcttccttcttggtaaagaaatcaaaccaaacctgcacctggaagggacagcagccctccctcctctttcccagagtaaaagcccaggggtggggcttgggagggtggccaagccccaacagctcctttacaacatactcacacccttctctcctttccagaaagatttctaaagccaccacactgagttttctaggacaagaaattcacagccgggatcagcagtttctatagagaccccaggatgagtctggccaggacccagacagccaacagaggctcagggaacctggccagagaccgaaagagatgcagagacacaaaggccacatgtgggagagacaccaggttacagggcagacagaggggcacaagccagtcctacagcaagcccagagacatggcggagaggtggcggccccggggatctgagaagggagaggggttcccaccccacgcagggtggcctcggccagccctccctgcatgggtcccccctttgcaattacgcagaaagctgctggatactccactgtttggtcgtttccatagtaaccctgtccctggcaagatgcccaaatattattacaaccatccagaggagagaacaatccaagtggctgtctctctgagcgtgtgtaatatccatcctgtgtacgtgccatctgggcctccaaaggtacttcctgtgactgcctgtcagtcatatgtgtgtccagatgcatctatgtgtgtgtgcagagccaccaacaaacatgctgatgctgagctctgataatgcctggggtctctgttgctggggtaaatcgcatgccctcatctatctcccgttcaccctcatatacacatgcacgcgtacacacacatacacatgtaggctccgcacacttcacatcgtgcccgagccacctcattcacacactcgctgtgttttcaaagcagacacttgctcttttttttttttttttgagatagtcttgctctgttgcccaggctgaagtacagtggtgcgatctcggctcactgcagcctccgcctaccgggttcaagtgattcttgtgcctcagccttctgagtagctggaatcacaggtgcatgccaccacactggctaattttttttttttttttttaaacagagatggggtttcaccatgtcagccagccttgaactcctggcctcaagtgatctgcccgcctccacctcccaaagtgttgggattacaggtgtgagccaccacacccggctgacacttgcttttaagaagaaccccacagccgagagccccacactgcgaatggctgtacccctcacccagtcacttccccgagcatttctgagaattcagccccagcctgttcctctggaccctttctagacacgaggcccaaggtggtgctgactgaatgaaacgctgctccttctccagtttaagaaaataagccccttgccacactccctgctcccctcattccatccccacaggttctgactgttacctctggggctgggggtggggagaagcactgattggctcctcacctgattgccatggttacctgcagggccctgccagcaggtgccaagagcaatgtaaacaggagctctgactccctagagcaccctctccccatctccccaccccaggaggccccaggccgcgaattcctgatacccagttcctcccccgctgcactggctggtgtgctgtgagaaggtgagggaaaaaggggtgatgggtgactggaaatccagctgtcattactttgaggaagaggctgggagatgggaagaactcgagggagaaagagtgggagacacagatcccaagaaacagaaaggggaggccaagcaccattggaagtggcctctgcagagctcaggtgctttaacaggtcagtcccaactgtgtgtccacccctccctggacttgagcactgcctccacctctaacaccacttttccccaagcagaagccaagcccttcagtgtcttctgccattgtctttgcaagggtgtgtgtgacccttaggcagcccacattctgggccctgaggccctgggtctggctattgctaatgtggcaggaagggagcttgctcagcacccagcatccaaccccgacccctctttgccattcaagcctggcacttgtctttcccaatccttaaagacccctgctaagaaaacaccaccatctctttctctctctctcttttttttttctttttgagacggagtctcactctgtctcctaggctggagtgcagtggcaagatatcggctcactgcaacctccgcctcctggattgaagcgattctcctgcctcaacctcccaagtagctgggaatacaggcgtgtgccaccacacctggctaatttttgtatttttagtagagacagggtttcaccatgttggccaggctggtttccaactcctggcctcaagtgatctgcccgcctcggcctcccaaactgctgggattacaggcatgagccaccacacccagacccatctctccattttaaccagtgtctttctggaagccaccctgcaatttaggcctctctcacttcttcatggtcccctgtggaaacagtgggtctcccagccccaaggcccctgtgcttctctgatgccatagctctctctgctctccctgcctccaaatgaaatcagccccactccctcactagaatgtctccaggtcttgggaaaagtcactcaaggtcacatccagatgtctagaactgcagaggtgaaagggcttttagaaagcaccttgttcagctgggcgtggtggctcacacctgtaatcccaacactttgggaggccaaggcggatggatcatgaggtcaggagttcaaaaccaggctggcaaagatggtgaaaccccatctctactaaaaatacatggtggctcacgtccgtaatcccagcacttcgggaggccaagacgggcggatcatgaggtcaggagatcgagaccatcctggctaacatggtgaaaccccgtctctactaaaaatacaaaacattagttgggtgtggtggcacgcgcctctagtcccagctactcgggaggctgaggcaggagaatcgcttgaatccaggaggcagaggttgcagtgagccgagattgcgccactgcactccagcctgggcaacagagcgagactctgtctcaaacaaacaaacaaaaatacaaaaattagcggagcatggtggcaggcgcctgtaatcccagctactcaggaggctgagccagagaattgcttgaacctgggaggcagaggttgcagtgagtggagatcgtgccactgcactccaagctgggccacagagtgaaagaaactccatctcaaaaaaagagaaaaagaaaaagaagcacctgttcaatcctttcattttacagatgagcacactcagatgtgacttgtctaaggtcacaaagcaaagcagtggcagtcctgtgacaagaaagtgcctgactcccaccccagtgcttttaacatcctggcacctggccaggctcctcactcatctaaagcagtaatgcccggcttcatcccagcaggtgggaggggaaaagagcagctccctggagtggcgggaaaaccactcagtgggccgccgtctgggagggagtcagtctggcccaaacatgaccatcagcatggactcctgccttgaggcaggaagaggaggcacatgttaattgccttaccccacttcctacacatagggaaacagaggctgcagggaagcacagccagccagagtacagcatcaagactcagaccaggggttttatgactctgttcctctcccagcttcgtgggtccaactgcgcaagccccttgtatttgtgtttggggccgtgagggtctgcctagggacactgtgaacctcccaactttccccaatccttgacaatggcacaaagatctgctcccctgtccccaccatgcattgaaaagggcctcctgaagctgggcttactcaaccctcccttcctccctctcccacctctcaactccctaagatcaaacaaaggcaaaaccccaaaatatacacattgccagatacacacacatacagcaagacacacccccctccacctctcacactcactacacacaaggccagatagacacgccacaaccctcccccaccctgcgccacacacacacacaatcacagccagaccagagccaggcccaccctcgctacatgcagaagccatccacatccaccccccacctagaagcacacagcctgacatccctgcctggaaacagaccctgcaaacacacactaaccttttgtacgaccctggtccacccagggtaaattataacataagtcttccagcaacaaaagcagttcagcttccaaagtccgctctggggaccagaggctggagggctgcagtgggcatgtgacctgcacaaagctgtaccctcttcctgttcgggctctctccattcccatgacaacagctccatcaaccaagatctctcaggcaaggccaggggcagcagagtcccccttcctgcccaacccccaagacttcaacttgaaccctacctagctacacatggtctggatcctggggttggtttcctgcttcattccaaagtcagttctaaagcctcaatcccccaacccccaaccaggggagcccgtgggaaaaccttcccaccaaaaagctgcaacagagctggctttatgctcccagtaataacaccttggaccagagtgaaggggggagggaggagagaaattaaagagtttcaggaacagaaactgccagaggtcccagaggaggaggcatcagaacagagcggggaggggacaaccaggagacagccctcccctcgagacagacctctggggagactgaggcagcatgggggacactgagggacaaagatctcgggaagcgctgggtaacacttccacaatattcactggcaaatccacccgcctccatgccgcctcctcccacctcaagccaaccggagcgattatgggcagacaggggcagtgggggagggcgaggggcagcccgggcccaccgtggagacaggcagggggtgtctgcttgcccgggggtcccacgccctcagagctagcagtaggagggcgtgcgcagggtggggtggctgggcgtcccaggggaaggggggccagtttagcagatccccctgcttccgctggcgatgggaaatattgcgataaatttccctccatccccattctacccccagcgcccgggcttccccaggagcccatgtccaaggatcagggaccccagttaccgggtggccgctcccaccttccctagagccaaactttctgcggggccccgggaggggtgttccggagggaggctctgctgaggtggttcggggagggggcggggcgccggcgccgggacggggagcggggaccggcggggggaggtgcccgagaggacccggaccccggcggggaagggcgccctcccccggcctcgcggccgccccaaagcacatccccttctgccggccccaagtccccgcgcgtccacggcgcccctgtgcccacgggagagcgacccccgcccagatggaaaagggggtagaccgggcagagcgagaggcggctttggctcgtggggagcggcgacccaacccagcgcgcatcccgcaagccctcccggctgccccggaccttccccctcgctacctcggaacagggtctgcccgggggctgctgcacaaagaggtggtggtcgagggagacgccaaatcgttaagacggggagcccgtttcggccatcttggaagagaggaaagggaaaaagggacagaaaaaagggagaaagaaaggcggacggggcaagctgggctagggactgacggggcgcggggggtgcgaaggcaggatcggctcagagcctccccctcccatcggggcttgcgaagaacggccggcccccatcccaatccccagagggttacaggccaggagagggaaaggcagggggagtccgctccgcttacctgggttcggggtccggtgggtctcggggagggggggatgggagggagggagggaagggaggggaggggggccgcagccgtgtcgctcgcccgggcggcgggaggggagaaacctacggtaagaaaggagtttgtgaaagcggcttggggtgggagggagaggggaggggaggggaccgaggggggaggggagggaccggagtgtgggggggagacaaaatggcttttttcctccagacaagagtaggtcccgcccaccactcacccacgtgacctcattccttcaggatgctggcagagacgggaagaggagggggaggctggcgcggccgctccccgccaccggctgccgggtccctagccaggacgagacccctcccttcccatgcggccgccccgaccccggaggatggattctcttatgttaccttccgcagttagcccccctcccttcaaaatatgggttccccccactgacactgtgatgcccatccctaactggggcgcctggaaaatggtgaaatggggactgggctgaaaggtggctcgtggtcctccacgccccggcctagaccaaagggcgcggggctccggcgggggacgcgacgccttcagccaggcgtccgagcgattttcattcactccaagtgacactcccttaaaattaataactgcatctgggagggcgagcgtgtcctccccactccccttgccccctcggcggcaggggcgctggccccgaaaagcggcgcaccaggatccagcctgggcgcctggcagggagcaatcgcgagaggggagtggaggtgcggggtgaggccgggtggggggcctcgccgcggggggatcgggtagctctggcggaggctgcgcccccggcgtgctcgggcagagaagaacggaggcccgctgaggatgggaactcaggctccgggtctgggacacaataatccggccgaaggcgagcggccacactggactaggaaacgaggcgccgggctgtaaggtgggcccgcgccttttctcctgcctggcgctgattcccgcatttttcgctcgcgccctgcgctgcgcgctgcctgtgcgcctccctgggcgcgcgggcgggagagtcgggcgagcgccaagacggctgggcccgactcccactggcgccccggctccacctggcgctggggctccggtccgcagtggctccggcaggagggagagaacgaggagggaggcttggaaacgccgggagtagcggtgaggccgacgccggggaagcgaatcgatactgcgttactggacgcccgtgggcctcatgaggatggtcgattccctcattcgttattcacgatttattagggatggcggccgcgtctgtccctccagagagctcgattatccatccggccagcagcgccattaagcgcactgacggtgggaggctcgagttagaaattaggataggaatcttcgcccagttttggagcgcctgcctcctcttccctcgttgctcgcagccaaggcagccgcgaagctgggggcctcgggtgaatgctttcgccctctggccggcgaccaggagacctgcgcacactggccgccgagtgaccccagctcgagcctgcagccacaccagcgggacgggggcggggaggaagaggaagggcggagagacttccttccagagggagtggtccgagaaccggcgggagaagggccaagggaagatccggtcacctgctccggagcctgcaggcggagaggcgagtagttcaccggccccggaggaaaggggaccctcccactgttcccaggcaaatgtgtcgccggcatcctgcactctgccggggaagacgcgcatccactcgctctgcagggaggggaacgcgggaaggactcccagtcagccgcccctctctggctacaagaccccgaacaagagaaacctgtaacaggggctctgcggagatctggatcccacccaccaaccacatgggcacctggggggctgcccctcggggcattatcagccagtgggaagggggttgacgttcctctgcggcccatgaatcctggagggctgcccgaggggccaccggggtccatccacttattcttcggttgttaagcgccagacaggagagaaccgctagagaggagtgtgctaagaccctattacccactaaaactccattttcatcttttgcgtcctggatgactagtctccacattcctggcctttctggtttctcaggagaaccttctgacccaactcttcccacatcgaaagagtttcctagtcttttgttctactactagccgacatagaaagcacctgtcatgtgccagtgtcaaatactgcgctaggaactgggaactcaaggcacaggagcctggcttttgcgcagggcgctcacaggccggtgggtgcaaaccctgaaggacacacagcctgtccctttagcgcccatcgcttctggtgtgagctcccgctaagggtgggtgagtactggggtgggcttccagaagaggcctcctttgagccgaatctgcagagaccaagtgtctatgagaactgctcaagagtgctttgcacattctcctccacaaaggtcgaggctcccactgcgcccaggaatgcgcctcgtcagacattaggcgccccttgattttgtgtttgcatctcacgcggtcctctagctgacaagtgcatcagaagagtcacagtggctgtcacaagccagagactcgcagaggacaggaacgcgggaaatctaggcaattacctccagcatataccaagagctattgcgaggatcagatccctttaaaaatggtgacgagacaggagagggcggctcctctagagctttccggaacgtctttacctctgtgtcctttataccttttatctcccccaaacaaggtccttagtcagtttctccttctatttccccatcttcctcccccacctccctgtgtagttctagggggaaaaaatgtgttgttttcctttttttctgatgcttctaatattaaatgcgtctattttcccactctccattgtcttgaggtcttcccctacccaccctgcctagttctgtcacgtcccttctttccctgtatcacaacaatgttctccctttctcacctttgtttctcttcatacttgtttctctctctgtgtctctctcattctcttcccttccaaatgtagtatttggagactgtaatatcgattgaggcagacaatagaaaactgtcgaacctccactgtaaattcattcttaatcctatgaaaaaatgcatcctgaaacgtgttgcatgcacagtgagacaaaaacctgtgtctttaggtttcctgcgatctagcttggaggcgggttgggggggtgtggagggaagtgctggagaaattatcccattattgactgagcagcaaagaattttcaagaacagtgattctcctagaaaaagtattgctgctgccatttcaatgcaaaatttggcttttgagtaaaaggcttaggtttttatcttccggggagaaaaaaaaaacccaaaagacaaaaaaaaaaaaaaaaaaggtcatagcgtccctgggtgggctcgaaccaccaacctttcggttaacagccgaacgcgctaaccgattgcgccacagagaccgagtcgactaccggcgtagtagtgagccgagtcaatgggagcgagcctggacggcgcagacgccgtaagagatgccgccatcgggcgaaataagtggaacccgggggagaaagggaaggatcctgatgggggagggaggcgaaagagcttgggaggagaggacgcgggacgtgcacgcccttcctccattggaacggcgagaggtcgactctggctatcctcaggttctacctcaaacgtggagaggcgcggaacgtccctttttagggtgacctgagattgaggatacgtgaagtcgggccgcaggaagtcccccaaatcagaacaagcttcggcttccaaactccctttcacagctgaacccctgcagccgcaaaatacccgcgacgcctacacgcgacgccttccccttcccacctgcatcattaaatttccatttaatgggcgcctcctatatactaggcactgttgtgggccagtgaatattccgagcctaggcaagtgcctggtacacagtaaacgcaggatttctggagtgaataaataagctagcacgactaatacgacgaactcatacatcacgttgataagcgtcacggtgccccttcagctggggccgcagcttcctaaacccagtttcaccagcccacgtgcgcgcaggctccgcccccagtccctgaggtcccgagtccaggtccgccgagatcccactatgcaccgtgtcgcaagtctcttccgcagccacagtgacttttcacttccgcttttcccgcctccgttttgactttgcaaccaaactacctgtactggtgaccgacagggacgtgtgaccaatagaaagcccagatgtccaggaagagtccgcctatcagccaatgaagagacagcagtgagagcggttgcgcagtgaaggctagacccggtttactggaattgctctggcgatcgagggatcctagtacaccgcaatcatggtgagatggggagttaaagcaaaggggcatggggaaggattgagaagcggagggggtcaggagaggcttggggacgaaaagggcctagggtcgatggaaggaagcggtttcagttcgaggggagcgggccccggtgaggaccaagagggtgagtgcggctcattgccgccacacagtgctcatcccagctggagaaccaggggttcagacgcctccggaatggagaacgggcgtacaggagcctccgcatcaggagctgggccgggggctgtggcagcgtttgaccccccgcgctgacccctccgctctgtctgtcctagtctattatgtcctataacggaggggccgtcatggccatgaaggggaagaactgtgtggccatcgctgcagacaggcgcttcgggatccaggcccagatggtgaccacggacttccagaagatctttcccatgggtgaccggctgtacatcggtctggccgggctcgccactgacgtccagacagtgtaagtttcaagggtccccgcccacacccaggcctcttcttggaccatccaaccccggcgtcttgaccggccaaggtgtcagtcatctaccacacaccaccagtgagtttgagactttgccgcctccaaaaaacatgtccttccctttcttttttttttttttagacagggacttgctctgtcacccaggctggagctcagtggcatgatctcagctcactgcaacctccacctcccaggctcaagcgattctcgtgcctcagcctcctaagtagctgggactacaggcgcgcaccaccatgcctggctaatttttgtatttttagtagagacagggtttcaccatgttggccaggctagtttcgaactcctgacctcaagtgatccacctgcctcagcctcccaaagtgctgggattacaggcatgagccaccacacctggcctgactttgattttgacaacaattttgagcagacaagacaagcccaatagaaacatcttgcaagcagttggggttttgttattacatctcagggttggggaagcattggcaatgtgccaaatctatgggagcagattctggagagacaaagtctgtagggagggaaataatgagcggcagtttgagagctgaacgttacatttagcagtgaggggcgaagagaagccagagaagaataagagaggaaaagaacggtgataggttttcaggagggaatacgtggtcacagggggcaggtcctgcagggtactggtgcctgaggagcagcaggtcctggatttgtttcctagaaggtggagagactagctcacaagcgtgggtggatgcctgtcagaaaatgttctcatttcggctgggcgcggtggctcacacctgtaatcccaacactttgggaggctgaggtgggcggatatcttgagatcaggagttccagaccagcctggccaacatggtgaaacgctgtctctactaaaaatacaaaaattagccaggctgggtggtgggcacctgtaatcccagctactcgggaggctgaggctggagaattgcttgaacctgacagacggacgttgcagtgagctgaaattgtgccactgcactctagcctgggcaacagagcgagactctgtctcaaacaaaataaaaaaagaaagaataaaagaaaatgttctcatttctcttaaaactccctgagtctcaagaacataacacttactgagatctcacccagcctgcccttttttcctgtctggtagagtcagagaatgacatcctggggttcctgtcagtgaagtctcccgtgagccttcccttctgcagtcactgctgttctcacaccatttccttttcttcagagggcttttctcactgcgtttgcttccttctgggcaatgactgctcatttcactaggcctcagtttccttacctggaagatgaagctcaagtcatttctaagtctctttgctctggtgtcctgagactcattgcttttcctccagcaggtgtggcattggtctgctctatgcaggggcctatcctggggctctgagatggaactggcaagctgtgaccttttttccttttttcaccagagctgccaaatggcctttttctaaggcatctttcaagtctgttagcacatagcacagcagttggtgctgcccccttttttttttttttgtcacccaggctggtgacataaacttaactcactgcaacctccgcctccaaggctcaagtgatcctcccacctcaccctcccaagtagctgggactacaggtgtgtgccaccatgcccagctaatttttgtagttattgtaagaggcaaggtttcgctatgttgcccacagctgaactcctgagctcaagcaatccttccgcctcagtctcccaaagtgctgggattacaggtgtgacccactgcgcccagcctaaacatttttaatatggaacgcttcacaaatttgcatgtcatccttctgctaatcttccctgtattattccagttttaatatatgtgctgctggccaggcgtagtggctcacgcctgtaatcccagcactttgggaggccaaggtgggcagatcacgaagtcaggagatcgagaccatcctggctaacaccgtgaaaccccatctctactaaaaatacaaaaagttagccgggagtggtggcgggcgcctgtagtcccagctacttgagaggctgaggcaggagaatagcgtgaacccgggtggcggagcttgcagtgagccgagactgactgcgccactgcactccagcctgggcgacgagtgagactccgtctaaaaaaaaaaaaaatatatatatatatatatatatatgtgtgtgtgtgtgtgtgtgtgtgtgtgtgtgtgctgccaaagcaagcaccagttgctacttcctaacacatgtaagactacagttttccctgggcagggactgagatgagatgtctccttatgtttccctgacctcaacagggtagacactcaggaatattcaataatgacttactaactcacttttctcctacctcagtgcccagcgcctcaagttccggctgaacctgtatgagttgaaggaaggtcggcagatcaaaccttataccctcatgagcatggtggccaacctcttgtatgagaaacggtgagtgcaagtgtagctagcactgagggaatgcagacatctttgaatgtagtatggagtaggtactgaggaagaggactctccttgtttttccatctcttatttgcaggataatatccttattttatgggtgtgttttctttgggcctgtctggcaaccagataggaaagaaaatacttatgttggaagaaggcaaggaatgcacatagcagataaatttgcatctaggcaaaagagttagtcccaccagagtgttctggggtctcccagcaggagccactcttgccctagagctattctgtcagcactggcttcttgggaatagcagggagcctaggaatggggtgttcattttcgtcagttctccttgagggctttatggtgagaaacaaggggcctaactgtagaatttagtgcagaaatctaggatggaattgaaaggaaaccctgtgggtgctttctacctctgggcaaacctgggtggccagaatataagttgagctctctttttcttttttttttgagacggagtcttgctctgtcacccaggctggagtgcagtggcgtgatctcggctcactgcaacctccacctcccaggttcaatcgattcttctgcctcagcctgccatgtagctgggaccacaggtccatatcaccacacccggctaatttttgtattttcagtagagacagagtttcaacatgtgggtcaggctggtctcgaactcctgacctcaggtgatccacctaccttggcctcccaaagtcctattataggcatgagccaccatgcctggcctgatctctttttttttcttttcttttaactttttattttgaagtaatttttgtaatttgtaaaaataccctttagctttcaaaaactttttctttttttttttttgagatggtgtcttgctctgtcgccctggtgtgcaatcacggctcactgcaatctccacctcccgggtccaagtgattttcctgcctcagcctcctgagtagctgggattacaggtgtgtgccatcacacctggctaatttttttttttttttttttttttttttagtagagacaaggtttcaccacgctggtcgggctggtcttgaactcctgacctcaactgatctactgcctccgcttctcaaagtgctgggattacaggcatgagccactgcgccctgcaaaaagtcttataaagttgtaacaattaactcatatttggatgtatattaaatggcttgctgggcgtggtggctcatgcctgtaatcccagtactttgggaggccaaggaaggtggatcacttgaggtcaggagttcgagaccagcctggtcaacatggtgaaacctcatctctactaaaaatacaaaaattagctgggtgtggtggtgcacgcctgtaatcccagccactcgggaagctgaagcatgagaattgttgaacttgggaggcagaggttgtagtgagccaagatcatgccactgtactccagccttggtgacagagtgagacttagtctcaaaagaaataaaaaataggtcgggcgtggtggctcatgcctgtaatcccagcactttgggaggccaaggtgggcggatcacgaggtcaggagatcaagaccatcctggtcaacatggtgaaaccccatctctaataaaaatgcaaaaattagctgggcgtggtggcacacaccggtaatcccagctacttgggaagctgaggcaggagaatcgcttgaacctgggtggtggaggttgctgtgagcaacttgcctcagcctcctgagtagctgggattataggcgcctgccactgcacctggctaattttttaatttttagtagagacaaggtttcatcatgttggccaggctggtctcaaactcatgacctcatgatccgcccacctcagcctcccaaagtgctgggattacaagcatgaaccactgcgcccagccaacgaaaaaaaaagttaataatatctgggattatctggataagaaccttaaaaccaaatactataacacagctcagggcctgtgtttgaacttcctattatgctgatgccgagttaccatctgaagtaacttttactgcagtgtttcagacagaggtgcgtagatggtatctctggggtccagattttaaaaagggtctggacattgctcaggtttgcagttcaatgcctcagcctgtcctgccagaaaaatcactgatttcagatgggctcatagaggaagctcccgtcaatagtagctaagaatccagaatttttcaggtcacctaatgtattttttttcttttcaataagagtaagacatttattttattatttttattttttattttattattattatttttttgagagtttcactctttcgcccaggctggagtgcagtggtgcgatcatggctcactgcaacctttgcctcctgggtgcaagcaatcctcctgcctcagcctcccaagtagctgggaccataggtgcatgccaccatgcctggctaatttttaaatttttttgtagagacaggggtctcactttgttgcccaggttggtcttgaatgcctaggctcaagcagtcctccagccttggcctcctccctaagtgctgagattacaaacgtcagccatcatgcctggcctaaaaaagttattttcatggtggctcatgcctgtaatcttgaactgtgcgtgtgtatgtgtgtgtgtttctatttagagctataactgaagatcatgcccttagaaatgactgtgatccaggcctggagcattggctcacgcctgtaatcccagcactttgggaggccgaggtgggtggatcacaaggtcaggagattgagaccatcctggctaacacggtgaaaccccgtctgtactaaaaatacaaaacattagctgggcatggtggcgggcacctgtagtcccagctactcaggaggctgaggcaggagaatggctcgaacccaggaggcagagcttgcagtgagccaagatcgcaccactgcactccagcctgggcgacagagcaagactgtctcaaaaaaagaaagaaagaaagaaatgactgtgatccaataagacatatggataacgtctcttttactgactctttctactgaggatattggccatttgttatttggtattttatagatattccttaccttataaactgttataagtttaaaatattgtaagttgaaatgggtattttgtagacataggatgcaaatacacaaaacactatatccaaaaattgctcacagcagaacagtgtaaagtatctgttgtttcctctggtgattgtgtggctgactgggagctgcggctcattgtcactgcccagcatcaggagtgggtttggtaccacaaattgctagcctgggaaaagatcaaatttcaaagcatagtttccactgaatgcctgttgcttttgcaccatcataaagttgaaaaattttaagttgaaccatcataagtcagggaccatcatctgtacataaagatccctaagactgatttttcttttttttttttcttttcttttctttttttctgagatggagtctcgctctgtcgctcaggctggagtgcagtggcgcgatctcggctcactgcaagctccgcctcccgggttcatgccattctcctgcctcagcctcctgagtagctgggactatagtcacccgccaccatgcccagctaatttttttttgtatatttagtagagagggggtttcaccgtgttagccaggaaggtctcgatctcctgacctggtgatccacccacctcggcctcccaaagtgctgagattacaggtgtgagccaccgcgcctggcccaagactgatttttcttaaagatcagtgtctagaacaagtttctgatgagctgccatttccttttgacaatgagagtaacccagccactgagtatccctctttgccttgcctgctagggggctcaaaacaaaactttgtgttcagtctgagttatcttgtattatgttttaatggtttagttttatttttcagtgtttttcatataaactgcctccaatcttttctctaaaggagtagaggtataaacatacacatagaggactgagtgatggtaggaccttgggtgaggagagggaggattagaagaaaacaattctgaaagaaagaaggagcacaagagggtcagaggtgagaaggatagaaaggtaagtgttgaagaaaagaaagtggaaaagtcttagaatatttctagctggcaggagaagggagagggagctggcctcagggaaaggtgatcttcctaaacaggtcctccatttccctttgggtctgggtctaggccggggccttgtctgaataggcttaaacatgaaagcgagcgttcttgagttctggtttctctctctgatgctggcccccacaggtttggcccttactacactgagccagtcattgccgggttggacccgaagacctttaagcccttcatttgctctctagacctcatcggctgccccatggtgactgatgactttgtggtcagtggcacctgcgccgaacaaatgtacggaatgtgtgagtccctctgggagcccaacatggtacgttggtggcatggagaggggctgggctctgagttacccacccttggtcattaggaaaaaagtgtgtttatgtggcaggtaatggggagaatggtgcaggtgggagagaaagccacagctgctgctccttggaagggtatccagaaattccatctgccaggctggctggctggctccagaggagagcatcttctgttaggagaccacagttagatatttgccacagcagtaagaattccttacattgggtttacagggttctcgcatccattcactgagcaaacatttaactcagtgtagggttagaggcagctcaacaggttgtctgggttggcaacctggatccacccaccaccttagttattgttcttggagaagccagtttccctctctgcctccactaccttgactgtaaaatgaggataaaaaagtctgccttagaagtggtgctgaggaagccgggcgcggtggctcacgcctgtaatcccagcactttgggaggctgaggcaagcagatcacctgaggtttggagctcaggaccagcctgaccaacatggagaaaccccgtctctactaaaaaaaaagttaaattagccgggcatggtggtgcatgcctgtaatcccagctactcgggaggctgaggagaatcgcttgagcctgggaggcggaggttgcggtgaacaaagatcgtgccattgcactccagcctgggcaacaagagctaaactccgtctcaaaaaaaaaaaaaaaaaagtggtgctgaggaaaacaaatgagtatatgtgctgccgaagcgagcacaaaaacaagtgagaagagatgagatagtgcttgacggcgagggtcggctgtcgttattaagtgccagctcttccggccactggggaaagcaggtacagtctgctttcaagggcccactgcagtccagtgaagcaagacacatccaaatacctgttgaactgcagtttgttgggaagaggaggaaagaaagggtctgggggcaaaggtacaggaaggggcaggtatgctcagtgactggagagctgagcctggctggagtgtgggttaaacatggggagaaatgatgctggagactgagatgagacctcaaagggccttgaatgccatgccaaggagtttgaactctgtcctctgccataggaacctagggaatcaggtgcctttaggtggacgtgacaggctgttaccgcctgcaggaggcgctgaggtcctgagcaaagacagtggcagtggggaggcaggaaggcagctgtcaaggggacttagtcacttaaaacagaagcgaaggatgtagagacagaggatggctgggttctccagctaggctagccaagacagaatgtagaaggaacaggtttgggggaagtgggtttgtggttggacaggttgggttttgaggtacctgttaagatatccaggatcagagcccatcagacagctgctaaagcacactggagctaaatagggattcttctccctattttacagagaaactgaggctcagtgaagagagacatactatttgcccaatgtcacactgctgattagtaaaagaaattcagggcttgaagtctctttcactttcctttacataattctgcttccttccaaggaaggagctgagaggggcttcccacatcctgggaatcatcccttacttcaggcatgtcttggggccagagctgggaatcttgagcctagaaaaaagagagttaagggaccagaccaaatcagagccagaggctgtggtttgaaggggttccactctgttggcaggatccggatcacctgtttgaaaccatctcccaagccatgctgaatgctgtggaccgggatgcagtgtcaggcatgggagtcattgtccacatcatgtgagtatgggctgggagaagtctagaagctctgcagacaccctgcctctctcccttctccacgagcatacaccccattttcccagccccctggtcaggtgtgagataagaaaggtgcttttggcagtcctgggtgagcaaaagtccatgcctccctatggctggtaactggcagcctacccagcttcctctggcctcttgtcaggtgaggttctgtgaccccgtgctcacaagagacatttcttccttaacaatgtctccgaagtctcagggatccgtgttggggtgagccacaacaaagctactgcagatggattgaaattctaggtggctcgcatcctctctccagcccagatctgtgtgatgttctgagctctagagaccaatttccaagcctcagccaactccctaagtgccatcctccttgtccttttacttgtttggggccatcaccaggaacctgattggatagagtaggaggtatccttccaaccactttcctacattgcaggataagcatttggacccttttgggggatagcctgcttaattaccgtgaaatagtatttggccaggcgcgttggctcacgcctgtaatcccagcactttgggaggctgaggtgggcagatcacttgaggtcaggagtctgagaccagcctaacatggcgaaaccccgtttctactaaagatacataaaattagccagacgtggtgtcacgtgcctgtaatcccagctactagggaggctgaggaaggagaattgcttgaacctgggaggcagaggttgcagttagtcaagatcacgccattgcactccagcctgggcaacacagtgagactctgtctcaaaaaaaacaaaaacaaaaacaaaaaacccaaaaaacagaatttaccaccgacggtttttttttatgttctttggggtgaaacacaccacaccttctccttcctaagtggcttgttctctaggcttggaggagcttcttcccccttttttttttttttttttttttgagatggagtctcattctgtcgcccaggctggagtgcaatggcactatctcagctcactgcaaacctctgcctcctgggttcaagtgattctcctgcctcagcctcctgagtagctgggattacaggcacgtgccaccatgcccagctaatttttgtatttttagtagagacggggtttcaccatgttggtcaggctggtcttgaactcctgacctcgtgatccgcctgcctcaggcctcccaaagtgctgggattgcaagcatgagccaccgcgcccggccaagctccttcccttcttttgagagctgtgaagtctggccctgaatcattttctgggaaagcctccctgaggtggttccacctgtggaaagtcggcccaggtctctgttcctatccctccttcctcaccacaggcggaggagatgagctagcaggaatgaactagagcaggatagttacacctagaggcagcgggcagctatttgttctgctcccttgccgcagggcttgagggcttggtgctgagggccaggagagctagtcacagtcacggtccagatgggtagagatgttttcttgtgattttctccctctgcagcgagaaggacaaaatcaccaccaggacactgaaggcccgaatggactaaccctgttcccagagcccacttttttttctttttttgaaataaaatagcctgtctttcactcctgcttttgtctttgatgctttcctgcagatctctgccctagctgggcagctacagccagccactcaagtgtgtgtggcctggccctcggcttgctttctggctcgtgctctactccatcagtgcgtgccagtggggacaatccacatgtcacttgctgcatgctccctgtgtgctaggccccacacaagtgctttacacgatctagaatttattcatcataatgactcaaggtagttgagattatccttgtttggagaagaaggacagttaaataacttaccc

SEQ ID NO: 39 - DNA, 179892 bp, Homo sapiens
gagggaaaaaggggtgatgggtgactggaaatccagctgtcattactttgaggaagaggctgggagatgggaagaactcgagggagaaagagtgggagacacagatcccaagaaacagaaaggggaggccaagcaccattggaagtggcctctgcagagctcaggtgctttaacaggtcagtcccaactgtgtgtccacccctccctggacttgagcactgcctccacctctaacaccacttttccccaagcagaagccaagcccttcagtgtcttctgccattgtctttgcaagggtgtgtgtgacccttaggcagcccacattctgggccctgaggccctgggtctggctattgctaatgtggcaggaagggagcttgctcagcacccagcatccaaccccgacccctctttgccattcaagcctggcacttgtctttcccaatccttaaagacccctgctaagaaaacaccaccatctctttctctctctctcttttttttttctttttgagacggagtctcactctgtctcctaggctggagtgcagtggcaagatatcggctcactgcaacctccgcctcctggattgaagcgattctcctgcctcaacctcccaagtagctgggaatacaggcgtgtgccaccacacctggctaatttttgtatttttagtagagacagggtttcaccatgttggccaggctggtttccaactcctggcctcaagtgatctgcccgcctcggcctcccaaactgctgggattacaggcatgagccaccacacccagacccatctctccattttaaccagtgtctttctggaagccaccctgcaatttaggcctctctcacttcttcatggtcccctgtggaaacagtgggtctcccagccccaaggcccctgtgcttctctgatgccatagctctctctgctctccctgcctccaaatgaaatcagccccactccctcactagaatgtctccaggtcttgggaaaagtcactcaaggtcacatccagatgtctagaactgcagaggtgaaagggcttttagaaagcaccttgttcagctgggcgtggtggctcacacctgtaatcccaacactttgggaggccaaggcggatggatcatgaggtcaggagttcaaaaccaggctggcaaagatggtgaaaccccatctctactaaaaatacatggtggctcacgtccgtaatcccagcacttcgggaggccaagacgggcggatcatgaggtcaggagatcgagaccatcctggctaacatggtgaaaccccgtctctactaaaaatacaaaacattagttgggtgtggtggcacgcgcctctagtcccagctactcgggaggctgaggcaggagaatcgcttgaatccaggaggcagaggttgcagtgagccgagattgcgccactgcactccagcctgggcaacagagcgagactctgtctcaaacaaacaaacaaaaatacaaaaattagcggagcatggtggcaggcgcctgtaatcccagctactcaggaggctgagccagagaattgcttgaacctgggaggcagaggttgcagtgagtggagatcgtgccactgcactccaagctgggccacagagtgaaagaaactccatctcaaaaaaagagaaaaagaaaaagaagcacctgttcaatcctttcattttacagatgagcacactcagatgtgacttgtctaaggtcacaaagcaaagcagtggcagtcctgtgacaagaaagtgcctgactcccaccccagtgcttttaacatcctggcacctggccaggctcctcactcatctaaagcagtaatgcccggcttcatcccagcaggtgggaggggaaaagagcagctccctggagtggcgggaaaaccactcagtgggccgccgtctgggagggagtcagtctggcccaaacatgaccatcagcatggactcctgccttgaggcaggaagaggaggcacatgttaattgccttaccccacttcctacacatagggaaacagaggctgcagggaagcacagccagccagagtacagcatcaagactcagaccaggggttttatgactctgttcctctcccagcttcgtgggtccaactgcgcaagccccttgtatttgtgtttggggccgtgagggtctgcctagggacactgtgaacctcccaactttccccaatccttgacaatggcacaaagatctgctcccctgtccccaccatgcattgaaaagggcctcctgaagctgggcttactcaaccctcccttcctccctctcccacctctcaactccctaagatcaaacaaaggcaaaaccccaaaatatacacattgccagatacacacacatacagcaagacacacccccctccacctctcacactcactacacacaaggccagatagacacgccacaaccctcccccaccctgcgccacacacacacacaatcacagccagaccagagccaggcccaccctcgctacatgcagaagccatccacatccaccccccacctagaagcacacagcctgacatccctgcctggaaacagaccctgcaaacacacactaaccttttgtacgaccctggtccacccagggtaaattataacataagtcttccagcaacaaaagcagttcagcttccaaagtccgctctggggaccagaggctggagggctgcagtgggcatgtgacctgcacaaagctgtaccctcttcctgttcgggctctctccattcccatgacaacagctccatcaaccaagatctctcaggcaaggccaggggcagcagagtcccccttcctgcccaacccccaagacttcaacttgaaccctacctagctacacatggtctggatcctggggttggtttcctgcttcattccaaagtcagttctaaagcctcaatcccccaacccccaaccaggggagcccgtgggaaaaccttcccaccaaaaagctgcaacagagctggctttatgctcccagtaataacaccttggaccagagtgaaggggggagggaggagagaaattaaagagtttcaggaacagaaactgccagaggtcccagaggaggaggcatcagaacagagcggggaggggacaaccaggagacagccctcccctcgagacagacctctggggagactgaggcagcatgggggacactgagggacaaagatctcgggaagcgctgggtaacacttccacaatattcactggcaaatccacccgcctccatgccgcctcctcccacctcaagccaaccggagcgattatgggcagacaggggcagtgggggagggcgaggggcagcccgggcccaccgtggagacaggcagggggtgtctgcttgcccgggggtcccacgccctcagagctagcagtaggagggcgtgcgcagggtggggtggctgggcgtcccaggggaaggggggccagtttagcagatccccctgcttccgctggcgatgggaaatattgcgataaatttccctccatccccattctacccccagcgcccgggcttccccaggagcccatgtccaaggatcagggaccccagttaccgggtggccgctcccaccttccctagagccaaactttctgcggggccccgggaggggtgttccggagggaggctctgctgaggtggttcggggagggggcggggcgccggcgccgggacggggagcggggaccggcggggggaggtgcccgagaggacccggaccccggcggggaagggcgccctcccccggcctcgcggccgccccaaagcacatccccttctgccggccccaagtccccgcgcgtccacggcgcccctgtgcccacgggagagcgacccccgcccagatggaaaagggggtagaccgggcagagcgagaggcggctttggctcgtggggagcggcgacccaacccagcgcgcatcccgcaagccctcccggctgccccggaccttccccctcgctacctcggaacagggtctgcccgggggctgctgcacaaagaggtggtggtcgagggagacgccaaatcgttaagacggggagcccgtttcggccatcttggaagagaggaaagggaaaaagggacagaaaaaagggagaaagaaaggcggacggggcaagctgggctagggactgacggggcgcggggggtgcgaaggcaggatcggctcagagcctccccctcccatcggggcttgcgaagaacggccggcccccatcccaatccccagagggttacaggccaggagagggaaaggcagggggagtccgctccgcttacctgggttcggggtccggtgggtctcggggagggggggatgggagggagggagggaagggaggggaggggggccgcagccgtgtcgctcgcccgggcggcgggaggggagaaacctacggtaagaaaggagtttgtgaaagcggcttggggtgggagggagaggggaggggaggggaccgaggggggaggggagggaccggagtgtgggggggagacaaaatggcttttttcctccagacaagagtaggtcccgcccaccactcacccacgtgacctcattccttcaggatgctggcagagacgggaagaggagggggaggctggcgcggccgctccccgccaccggctgccgggtccctagccaggacgagacccctcccttcccatgcggccgccccgaccccggaggatggattctcttatgttaccttccgcagttagcccccctcccttcaaaatatgggttccccccactgacactgtgatgcccatccctaactggggcgcctggaaaatggtgaaatggggactgggctgaaaggtggctcgtggtcctccacgccccggcctagaccaaagggcgcggggctccggcgggggacgcgacgccttcagccaggcgtccgagcgattttcattcactccaagtgacactcccttaaaattaataactgcatctgggagggcgagcgtgtcctccccactccccttgccccctcggcggcaggggcgctggccccgaaaagcggcgcaccaggatccagcctgggcgcctggcagggagcaatcgcgagaggggagtggaggtgcggggtgaggccgggtggggggcctcgccgcggggggatcgggtagctctggcggaggctgcgcccccggcgtgctcgggcagagaagaacggaggcccgctgaggatgggaactcaggctccgggtctgggacacaataatccggccgaaggcgagcggccacactggactaggaaacgaggcgccgggctgtaaggtgggcccgcgccttttctcctgcctggcgctgattcccgcatttttcgctcgcgccctgcgctgcgcgctgcctgtgcgcctccctgggcgcgcgggcgggagagtcgggcgagcgccaagacggctgggcccgactcccactggcgccccggctccacctggcgctggggctccggtccgcagtggctccggcaggagggagagaacgaggagggaggcttggaaacgccgggagtagcggtgaggccgacgccggggaagcgaatcgatactgcgttactggacgcccgtgggcctcatgaggatggtcgattccctcattcgttattcacgatttattagggatggcggccgcgtctgtccctccagagagctcgattatccatccggccagcagcgccattaagcgcactgacggtgggaggctcgagttagaaattaggataggaatcttcgcccagttttggagcgcctgcctcctcttccctcgttgctcgcagccaaggcagccgcgaagctgggggcctcgggtgaatgctttcgccctctggccggcgaccaggagacctgcgcacactggccgccgagtgaccccagctcgagcctgcagccacaccagcgggacgggggcggggaggaagaggaagggcggagagacttccttccagagggagtggtccgagaaccggcgggagaagggccaagggaagatccggtcacctgctccggagcctgcaggcggagaggcgagtagttcaccggccccggaggaaaggggaccctcccactgttcccaggcaaatgtgtcgccggcatcctgcactctgccggggaagacgcgcatccactcgctctgcagggaggggaacgcgggaaggactcccagtcagccgcccctctctggctacaagaccccgaacaagagaaacctgtaacaggggctctgcggagatctggatcccacccaccaaccacatgggcacctggggggctgcccctcggggcattatcagccagtgggaagggggttgacgttcctctgcggcccatgaatcctggagggctgcccgaggggccaccggggtccatccacttattcttcggttgttaagcgccagacaggagagaaccgctagagaggagtgtgctaagaccctattacccactaaaactccattttcatcttttgcgtcctggatgactagtctccacattcctggcctttctggtttctcaggagaaccttctgacccaactcttcccacatcgaaagagtttcctagtcttttgttctactactagccgacatagaaagcacctgtcatgtgccagtgtcaaatactgcgctaggaactgggaactcaaggcacaggagcctggcttttgcgcagggcgctcacaggccggtgggtgcaaaccctgaaggacacacagcctgtccctttagcgcccatcgcttctggtgtgagctcccgctaagggtgggtgagtactggggtgggcttccagaagaggcctcctttgagccgaatctgcagagaccaagtgtctatgagaactgctcaagagtgctttgcacattctcctccacaaaggtcgaggctcccactgcgcccaggaatgcgcctcgtcagacattaggcgccccttgattttgtgtttgcatctcacgcggtcctctagctgacaagtgcatcagaagagtcacagtggctgtcacaagccagagactcgcagaggacaggaacgcgggaaatctaggcaattacctccagcatataccaagagctattgcgaggatcagatccctttaaaaatggtgacgagacaggagagggcggctcctctagagctttccggaacgtctttacctctgtgtcctttataccttttatctcccccaaacaaggtccttagtcagtttctccttctatttccccatcttcctcccccacctccctgtgtagttctagggggaaaaaatgtgttgttttcctttttttctgatgcttctaatattaaatgcgtctattttcccactctccattgtcttgaggtcttcccctacccaccctgcctagttctgtcacgtcccttctttccctgtatcacaacaatgttctccctttctcacctttgtttctcttcatacttgtttctctctctgtgtctctctcattctcttcccttccaaatgtagtatttggagactgtaatatcgattgaggcagacaatagaaaactgtcgaacctccactgtaaattcattcttaatcctatgaaaaaatgcatcctgaaacgtgttgcatgcacagtgagacaaaaacctgtgtctttaggtttcctgcgatctagcttggaggcgggttgggggggtgtggagggaagtgctggagaaattatcccattattgactgagcagcaaagaattttcaagaacagtgattctcctagaaaaagtattgctgctgccatttcaatgcaaaatttggcttttgagtaaaaggcttaggtttttatcttccggggagaaaaaaaaaacccaaaagacaaaaaaaaaaaaaaaaaaggtcatagcgtccctgggtgggctcgaaccaccaacctttcggttaacagccgaacgcgctaaccgattgcgccacagagaccgagtcgactaccggcgtagtagtgagccgagtcaatgggagcgagcctggacggcgcagacgccgtaagagatgccgccatcgggcgaaataagtggaacccgggggagaaagggaaggatcctgatgggggagggaggcgaaagagcttgggaggagaggacgcgggacgtgcacgcccttcctccattggaacggcgagaggtcgactctggctatcctcaggttctacctcaaacgtggagaggcgcggaacgtccctttttagggtgacctgagattgaggatacgtgaagtcgggccgcaggaagtcccccaaatcagaacaagcttcggcttccaaactccctttcacagctgaacccctgcagccgcaaaatacccgcgacgcctacacgcgacgccttccccttcccacctgcatcattaaatttccatttaatgggcgcctcctatatactaggcactgttgtgggccagtgaatattccgagcctaggcaagtgcctggtacacagtaaacgcaggatttctggagtgaataaataagctagcacgactaatacgacgaactcatacatcacgttgataagcgtcacggtgccccttcagctggggccgcagcttcctaaacccagtttcaccagcccacgtgcgcgcaggctccgcccccagtccctgaggtcccgagtccaggtccgccgagatcccactatgcaccgtgtcgcaagtctcttccgcagccacagtgacttttcacttccgcttttcccgcctccgttttgactttgcaaccaaactacctgtactggtgaccgacagggacgtgtgaccaatagaaagcccagatgtccaggaagagtccgcctatcagccaatgaagagacagcagtgagagcggttgcgcagtgaaggctagacccggtttactggaattgctctggcgatcgagggatcctagtacaccgcaatcatggtgagatggggagttaaagcaaaggggcatggggaaggattgagaagcggagggggtcaggagaggcttggggacgaaaagggcctagggtcgatggaaggaagcggtttcagttcgaggggagcgggccccggtgaggaccaagagggtgagtgcggctcattgccgccacacagtgctcatcccagctggagaaccaggggttcagacgcctccggaatggagaacgggcgtacaggagcctccgcatcaggagctgggccgggggctgtggcagcgtttgaccccccgcgctgacccctccgctctgtctgtcctagtctattatgtcctataacggaggggccgtcatggccatgaaggggaagaactgtgtggccatcgctgcagacaggcgcttcgggatccaggcccagatggtgaccacggacttccagaagatctttcccatgggtgaccggctgtacatcggtctggccgggctcgccactgacgtccagacagtgtaagtttcaagggtccccgcccacacccaggcctcttcttggaccatccaaccccggcgtcttgaccggccaaggtgtcagtcatctaccacacaccaccagtgagtttgagactttgccgcctccaaaaaacatgtccttccctttcttttttttttttttagacagggacttgctctgtcacccaggctggagctcagtggcatgatctcagctcactgcaacctccacctcccaggctcaagcgattctcgtgcctcagcctcctaagtagctgggactacaggcgcgcaccaccatgcctggctaatttttgtatttttagtagagacagggtttcaccatgttggccaggctagtttcgaactcctgacctcaagtgatccacctgcctcagcctcccaaagtgctgggattacaggcatgagccaccacacctggcctgactttgattttgacaacaattttgagcagacaagacaagcccaatagaaacatcttgcaagcagttggggttttgttattacatctcagggttggggaagcattggcaatgtgccaaatctatgggagcagattctggagagacaaagtctgtagggagggaaataatgagcggcagtttgagagctgaacgttacatttagcagtgaggggcgaagagaagccagagaagaataagagaggaaaagaacggtgataggttttcaggagggaatacgtggtcacagggggcaggtcctgcagggtactggtgcctgaggagcagcaggtcctggatttgtttcctagaaggtggagagactagctcacaagcgtgggtggatgcctgtcagaaaatgttctcatttcggctgggcgcggtggctcacacctgtaatcccaacactttgggaggctgaggtgggcggatatcttgagatcaggagttccagaccagcctggccaacatggtgaaacgctgtctctactaaaaatacaaaaattagccaggctgggtggtgggcacctgtaatcccagctactcgggaggctgaggctggagaattgcttgaacctgacagacggacgttgcagtgagctgaaattgtgccactgcactctagcctgggcaacagagcgagactctgtctcaaacaaaataaaaaaagaaagaataaaagaaaatgttctcatttctcttaaaactccctgagtctcaagaacataacacttactgagatctcacccagcctgcccttttttcctgtctggtagagtcagagaatgacatcctggggttcctgtcagtgaagtctcccgtgagccttcccttctgcagtcactgctgttctcacaccatttccttttcttcagagggcttttctcactgcgtttgcttccttctgggcaatgactgctcatttcactaggcctcagtttccttacctggaagatgaagctcaagtcatttctaagtctctttgctctggtgtcctgagactcattgcttttcctccagcaggtgtggcattggtctgctctatgcaggggcctatcctggggctctgagatggaactggcaagctgtgaccttttttccttttttcaccagagctgccaaatggcctttttctaaggcatctttcaagtctgttagcacatagcacagcagttggtgctgcccccttttttttttttttgtcacccaggctggtgacataaacttaactcactgcaacctccgcctccaaggctcaagtgatcctcccacctcaccctcccaagtagctgggactacaggtgtgtgccaccatgcccagctaatttttgtagttattgtaagaggcaaggtttcgctatgttgcccacagctgaactcctgagctcaagcaatccttccgcctcagtctcccaaagtgctgggattacaggtgtgacccactgcgcccagcctaaacatttttaatatggaacgcttcacaaatttgcatgtcatccttctgctaatcttccctgtattattccagttttaatatatgtgctgctggccaggcgtagtggctcacgcctgtaatcccagcactttgggaggccaaggtgggcagatcacgaagtcaggagatcgagaccatcctggctaacaccgtgaaaccccatctctactaaaaatacaaaaagttagccgggagtggtggcgggcgcctgtagtcccagctacttgagaggctgaggcaggagaatagcgtgaacccgggtggcggagcttgcagtgagccgagactgactgcgccactgcactccagcctgggcgacgagtgagactccgtctaaaaaaaaaaaaaatatatatatatatatatatatatgtgtgtgtgtgtgtgtgtgtgtgtgtgtgtgtgctgccaaagcaagcaccagttgctacttcctaacacatgtaagactacagttttccctgggcagggactgagatgagatgtctccttatgtttccctgacctcaacagggtagacactcaggaatattcaataatgacttactaactcacttttctcctacctcagtgcccagcgcctcaagttccggctgaacctgtatgagttgaaggaaggtcggcagatcaaaccttataccctcatgagcatggtggccaacctcttgtatgagaaacggtgagtgcaagtgtagctagcactgagggaatgcagacatctttgaatgtagtatggagtaggtactgaggaagaggactctccttgtttttccatctcttatttgcaggataatatccttattttatgggtgtgttttctttgggcctgtctggcaaccagataggaaagaaaatacttatgttggaagaaggcaaggaatgcacatagcagataaatttgcatctaggcaaaagagttagtcccaccagagtgttctggggtctcccagcaggagccactcttgccctagagctattctgtcagcactggcttcttgggaatagcagggagcctaggaatggggtgttcattttcgtcagttctccttgagggctttatggtgagaaacaaggggcctaactgtagaatttagtgcagaaatctaggatggaattgaaaggaaaccctgtgggtgctttctacctctgggcaaacctgggtggccagaatataagttgagctctctttttcttttttttttgagacggagtcttgctctgtcacccaggctggagtgcagtggcgtgatctcggctcactgcaacctccacctcccaggttcaatcgattcttctgcctcagcctgccatgtagctgggaccacaggtccatatcaccacacccggctaatttttgtattttcagtagagacagagtttcaacatgtgggtcaggctggtctcgaactcctgacctcaggtgatccacctaccttggcctcccaaagtcctattataggcatgagccaccatgcctggcctgatctctttttttttcttttcttttaactttttattttgaagtaatttttgtaatttgtaaaaataccctttagctttcaaaaactttttctttttttttttttgagatggtgtcttgctctgtcgccctggtgtgcaatcacggctcactgcaatctccacctcccgggtccaagtgattttcctgcctcagcctcctgagtagctgggattacaggtgtgtgccatcacacctggctaatttttttttttttttttttttttttttagtagagacaaggtttcaccacgctggtcgggctggtcttgaactcctgacctcaactgatctactgcctccgcttctcaaagtgctgggattacaggcatgagccactgcgccctgcaaaaagtcttataaagttgtaacaattaactcatatttggatgtatattaaatggcttgctgggcgtggtggctcatgcctgtaatcccagtactttgggaggccaaggaaggtggatcacttgaggtcaggagttcgagaccagcctggtcaacatggtgaaacctcatctctactaaaaatacaaaaattagctgggtgtggtggtgcacgcctgtaatcccagccactcgggaagctgaagcatgagaattgttgaacttgggaggcagaggttgtagtgagccaagatcatgccactgtactccagccttggtgacagagtgagacttagtctcaaaagaaataaaaaataggtcgggcgtggtggctcatgcctgtaatcccagcactttgggaggccaaggtgggcggatcacgaggtcaggagatcaagaccatcctggtcaacatggtgaaaccccatctctaataaaaatgcaaaaattagctgggcgtggtggcacacaccggtaatcccagctacttgggaagctgaggcaggagaatcgcttgaacctgggtggtggaggttgctgtgagcaacttgcctcagcctcctgagtagctgggattataggcgcctgccactgcacctggctaattttttaatttttagtagagacaaggtttcatcatgttggccaggctggtctcaaactcatgacctcatgatccgcccacctcagcctcccaaagtgctgggattacaagcatgaaccactgcgcccagccaacgaaaaaaaaagttaataatatctgggattatctggataagaaccttaaaaccaaatactataacacagctcagggcctgtgtttgaacttcctattatgctgatgccgagttaccatctgaagtaacttttactgcagtgtttcagacagaggtgcgtagatggtatctctggggtccagattttaaaaagggtctggacattgctcaggtttgcagttcaatgcctcagcctgtcctgccagaaaaatcactgatttcagatgggctcatagaggaagctcccgtcaatagtagctaagaatccagaatttttcaggtcacctaatgtattttttttcttttcaataagagtaagacatttattttattatttttattttttattttattattattatttttttgagagtttcactctttcgcccaggctggagtgcagtggtgcgatcatggctcactgcaacctttgcctcctgggtgcaagcaatcctcctgcctcagcctcccaagtagctgggaccataggtgcatgccaccatgcctggctaatttttaaatttttttgtagagacaggggtctcactttgttgcccaggttggtcttgaatgcctaggctcaagcagtcctccagccttggcctcctccctaagtgctgagattacaaacgtcagccatcatgcctggcctaaaaaagttattttcatggtggctcatgcctgtaatcttgaactgtgcgtgtgtatgtgtgtgtgtttctatttagagctataactgaagatcatgcccttagaaatgactgtgatccaggcctggagcattggctcacgcctgtaatcccagcactttgggaggccgaggtgggtggatcacaaggtcaggagattgagaccatcctggctaacacggtgaaaccccgtctgtactaaaaatacaaaacattagctgggcatggtggcgggcacctgtagtcccagctactcaggaggctgaggcaggagaatggctcgaacccaggaggcagagcttgcagtgagccaagatcgcaccactgcactccagcctgggcgacagagcaagactgtctcaaaaaaagaaagaaagaaagaaatgactgtgatccaataagacatatggataacgtctcttttactgactctttctactgaggatattggccatttgttatttggtattttatagatattccttaccttataaactgttataagtttaaaatattgtaagttgaaatgggtattttgtagacataggatgcaaatacacaaaacactatatccaaaaattgctcacagcagaacagtgtaaagtatctgttgtttcctctggtgattgtgtggctgactgggagctgcggctcattgtcactgcccagcatcaggagtgggtttggtaccacaaattgctagcctgggaaaagatcaaatttcaaagcatagtttccactgaatgcctgttgcttttgcaccatcataaagttgaaaaattttaagttgaaccatcataagtcagggaccatcatctgtacataaagatccctaagactgatttttcttttttttttttcttttcttttctttttttctgagatggagtctcgctctgtcgctcaggctggagtgcagtggcgcgatctcggctcactgcaagctccgcctcccgggttcatgccattctcctgcctcagcctcctgagtagctgggactatagtcacccgccaccatgcccagctaatttttttttgtatatttagtagagagggggtttcaccgtgttagccaggaaggtctcgatctcctgacctggtgatccacccacctcggcctcccaaagtgctgagattacaggtgtgagccaccgcgcctggcccaagactgatttttcttaaagatcagtgtctagaacaagtttctgatgagctgccatttccttttgacaatgagagtaacccagccactgagtatccctctttgccttgcctgctagggggctcaaaacaaaactttgtgttcagtctgagttatcttgtattatgttttaatggtttagttttatttttcagtgtttttcatataaactgcctccaatcttttctctaaaggagtagaggtataaacatacacatagaggactgagtgatggtaggaccttgggtgaggagagggaggattagaagaaaacaattctgaaagaaagaaggagcacaagagggtcagaggtgagaaggatagaaaggtaagtgttgaagaaaagaaagtggaaaagtcttagaatatttctagctggcaggagaagggagagggagctggcctcagggaaaggtgatcttcctaaacaggtcctccatttccctttgggtctgggtctaggccggggccttgtctgaataggcttaaacatgaaagcgagcgttcttgagttctggtttctctctctgatgctggcccccacaggtttggcccttactacactgagccagtcattgccgggttggacccgaagacctttaagcccttcatttgctctctagacctcatcggctgccccatggtgactgatgactttgtggtcagtggcacctgcgccgaacaaatgtacggaatgtgtgagtccctctgggagcccaacatggtacgttggtggcatggagaggggctgggctctgagttacccacccttggtcattaggaaaaaagtgtgtttatgtggcaggtaatggggagaatggtgcaggtgggagagaaagccacagctgctgctccttggaagggtatccagaaattccatctgccaggctggctggctggctccagaggagagcatcttctgttaggagaccacagttagatatttgccacagcagtaagaattccttacattgggtttacagggttctcgcatccattcactgagcaaacatttaactcagtgtagggttagaggcagctcaacaggttgtctgggttggcaacctggatccacccaccaccttagttattgttcttggagaagccagtttccctctctgcctccactaccttgactgtaaaatgaggataaaaaagtctgccttagaagtggtgctgaggaagccgggcgcggtggctcacgcctgtaatcccagcactttgggaggctgaggcaagcagatcacctgaggtttggagctcaggaccagcctgaccaacatggagaaaccccgtctctactaaaaaaaaagttaaattagccgggcatggtggtgcatgcctgtaatcccagctactcgggaggctgaggagaatcgcttgagcctgggaggcggaggttgcggtgaacaaagatcgtgccattgcactccagcctgggcaacaagagctaaactccgtctcaaaaaaaaaaaaaaaaaagtggtgctgaggaaaacaaatgagtatatgtgctgccgaagcgagcacaaaaacaagtgagaagagatgagatagtgcttgacggcgagggtcggctgtcgttattaagtgccagctcttccggccactggggaaagcaggtacagtctgctttcaagggcccactgcagtccagtgaagcaagacacatccaaatacctgttgaactgcagtttgttgggaagaggaggaaagaaagggtctgggggcaaaggtacaggaaggggcaggtatgctcagtgactggagagctgagcctggctggagtgtgggttaaacatggggagaaatgatgctggagactgagatgagacctcaaagggccttgaatgccatgccaaggagtttgaactctgtcctctgccataggaacctagggaatcaggtgcctttaggtggacgtgacaggctgttaccgcctgcaggaggcgctgaggtcctgagcaaagacagtggcagtggggaggcaggaaggcagctgtcaaggggacttagtcacttaaaacagaagcgaaggatgtagagacagaggatggctgggttctccagctaggctagccaagacagaatgtagaaggaacaggtttgggggaagtgggtttgtggttggacaggttgggttttgaggtacctgttaagatatccaggatcagagcccatcagacagctgctaaagcacactggagctaaatagggattcttctccctattttacagagaaactgaggctcagtgaagagagacatactatttgcccaatgtcacactgctgattagtaaaagaaattcagggcttgaagtctctttcactttcctttacataattctgcttccttccaaggaaggagctgagaggggcttcccacatcctgggaatcatcccttacttcaggcatgtcttggggccagagctgggaatcttgagcctagaaaaaagagagttaagggaccagaccaaatcagagccagaggctgtggtttgaaggggttccactctgttggcaggatccggatcacctgtttgaaaccatctcccaagccatgctgaatgctgtggaccgggatgcagtgtcaggcatgggagtcattgtccacatcatgtgagtatgggctgggagaagtctagaagctctgcagacaccctgcctctctcccttctccacgagcatacaccccattttcccagccccctggtcaggtgtgagataagaaaggtgcttttggcagtcctgggtgagcaaaagtccatgcctccctatggctggtaactggcagcctacccagcttcctctggcctcttgtcaggtgaggttctgtgaccccgtgctcacaagagacatttcttccttaacaatgtctccgaagtctcagggatccgtgttggggtgagccacaacaaagctactgcagatggattgaaattctaggtggctcgcatcctctctccagcccagatctgtgtgatgttctgagctctagagaccaatttccaagcctcagccaactccctaagtgccatcctccttgtccttttacttgtttggggccatcaccaggaacctgattggatagagtaggaggtatccttccaaccactttcctacattgcaggataagcatttggacccttttgggggatagcctgcttaattaccgtgaaatagtatttggccaggcgcgttggctcacgcctgtaatcccagcactttgggaggctgaggtgggcagatcacttgaggtcaggagtctgagaccagcctaacatggcgaaaccccgtttctactaaagatacataaaattagccagacgtggtgtcacgtgcctgtaatcccagctactagggaggctgaggaaggagaattgcttgaacctgggaggcagaggttgcagttagtcaagatcacgccattgcactccagcctgggcaacacagtgagactctgtctcaaaaaaaacaaaaacaaaaacaaaaaacccaaaaaacagaatttaccaccgacggtttttttttatgttctttggggtgaaacacaccacaccttctccttcctaagtggcttgttctctaggcttggaggagcttcttcccccttttttttttttttttttttttgagatggagtctcattctgtcgcccaggctggagtgcaatggcactatctcagctcactgcaaacctctgcctcctgggttcaagtgattctcctgcctcagcctcctgagtagctgggattacaggcacgtgccaccatgcccagctaatttttgtatttttagtagagacggggtttcaccatgttggtcaggctggtcttgaactcctgacctcgtgatccgcctgcctcaggcctcccaaagtgctgggattgcaagcatgagccaccgcgcccggccaagctccttcccttcttttgagagctgtgaagtctggccctgaatcattttctgggaaagcctccctgaggtggttccacctgtggaaagtcggcccaggtctctgttcctatccctccttcctcaccacaggcggaggagatgagctagcaggaatgaactagagcaggatagttacacctagaggcagcgggcagctatttgttctgctcccttgccgcagggcttgagggcttggtgctgagggccaggagagctagtcacagtcacggtccagatgggtagagatgttttcttgtgattttctccctctgcagcgagaaggacaaaatcaccaccaggacactgaaggcccgaatggactaaccctgttcccagagcccacttttttttctttttttgaaataaaatagcctgtctttcactcctgcttttgtctttgatgctttcctgcagatctctgccctagctgggcagctacagccagccactcaagtgtgtgtggcctggccctcggcttgctttctggctcgtgctctactccatcagtgcgtgccagtggggacaatccacatgtcacttgctgcatgctccctgtgtgctaggccccacacaagtgctttacacgatctagaatttattcatcataatgactcaaggtagttgagattatccttgtttggagaagaaggacagttaaataacttacccaagtctactttaataagtgataaagccaggacataaactcatgttccattgatgccagagcttagaatccttttcactcaaactctacgggaaaacccttacatcttttattgcttcaggtagaaatttggtcaagtacccataagtagtctagattagtgtttcttaacctggccagctcattagtcacctgtggaattcctaaaacacataccttgatcccaccccttgagattccaattggccttttaggggcctgggtacctgtcttttccagaattccccaagtgattccagcttgcaatctgcagtacatagatggcctaataagcaagtagaaagtttgcatagcagagtggttcccaaacgttagcccccatcacaatcacctggagggctcattaaaagtttgattcagtagatctgggttggaacctgagaatttacatttctgactcccaggtgctaatgacactgctggtccaagaccacactttgagaactactgggttttaagctaaatgcccagatgcagtagatgaggtgcacagaggtgacatgttcaaagttatgtcaggtgagtggctcctagccagagttcgttctacacagctggaggcgggggggcggggggggggttgtccattcttccatgtgcatggtagtaacagctaacaggcagattggctctggtgctgtggtgttttgtttgttttttccttaagagtctcattgttgctagggctggagtgctgtggtgcaatcatggctaactgcagcctcaacctcccaagctcaagtgatcctcctgcctcagcctcctgagtagctgggactacagacatgtgccatcacatccagctaattcttgttttgtagagacggggtctcactatgttacccagaccggtactgaacttctgggctcaagtgatcctcctgccttggcctccccaagtactgggcgtgagccaccaaacccagccagtggtgctgtgcttttaaccactgtttattaattgcatctgaaagcgggatgtcattgaccatattctttctccaaactcaagccatacattgatttagccgaagctgcctctaaagctaggaccaaaactttttaattctgggaagaaaaaaaaaaggttcatttcccaaggactcacacataacagatgtacacaaagctttttgagttttatttttttcctcaggttggagattcatcgtaacatgcatgcattttcaaacagtaacagggtctcaaactttttaaagcagacgttagacaagcacaggggattgaaaattcccatttaaaaaatggaaactgcagtgggatatggagaagtcacacacttggtggggtggtggtttgtcctgcttccccaaaaggtggatatgaacttaattcacattttttaatttcaatgatctgacctgatgctgggatgtgccgagcagtactgccccctcccccaagggtgttggctcccaccgcctctcacagtggctctgcgcaagggcaagaggctcctgtggaaacttctgccctgggatactggcacaagctgccaagggacagctgagtctccttttccccatggggcactcttcataagtggcacattctagaggagggagagggccacggtcactgacccctgcagatggctggtagattggggaacagttgtctgaatgggttttccctttcaggacctcctgcccgcatgactgccaggaagagatgaggctcctagacttggggggccacaggtttaaggccagagctctgagtgttgtttaaacgcactgtcccttctagcccccaacacctgagtaactcacatgctggggtgctgcagttttctctcccaccctgaattggtaaaaagacaactggggggtaggactggctactgcaaaaagtcctgggtctttggtccacctccccaaggtatgccctggcagaccatgaagacaggaaaggcagggcaggagtgtagcctcacgccctgagcgctaccagcaggcctgtttgaggccaaaagcacaggcaagagaaagagtcaagtagggagaggggataaagagctgcctgtggtgggaacttaagagactgccactgagaacagccacaggggccactcgtggcgcctgccacagaccagcaacccctgagctaaagaaggagaggtggagcactgcttcagtctgcgcccctcagctgtggcttcccggcatgccctgtgaccccaagccgcagggtacaggaaagaagtttgtgctgggggactcaaagacccagaggttaattaacaggaaccagggccaggggccttcatctagaggtcagtggagtctccagggcactcatcactgtggctgggagactacagtgtctcggctgcggacttgtggaagaagagggggaaggatgggagaaggggtgactggatgccagccaggaatcctggccttagccctatcctggcctcgcctaatcagccatgtcgttattcttacacctttcttcttgggagacccaacattattctgagatgccatgagactgtttagcttttcttcatggccccagggagtgaggctgagggcagtcacttcccctccaatgccctcgactgcccagtaaaagaatggcgggacccaaggaggaaagagtgggggcagacaacgcttgggggatcagtccactttctctacattcaaactgcagaccaaatagaataccatgacaaaaagaagagaaaggaaacttgtataaaccaagataaatagcttttaaacatttgaatgccaaaaattgggggccaaactcaaggttttgaagatagcacagcgaatgacctttaaaaaaaaaaattgaaaatccaccaaaccacagctcaaaatgttatgacccagtcaacaatactgtcagaaaaacaaaaagcatttgaaacagaatgctacctctcaaaatgtaaacaatatacaaaacacacaaacatacacacacacacacaaactcaatgttaaacaagttagatacctggtagtcgtctttaaccagtaagaatgtgttacactttccatacacattatggcaacatgatcagcagaccaaatgcagagaagccggtaggaacccgaggccacggaggctgctggaagacagctttccaagcttcagagatgctgcgcctgacgaggagcagatccaaacttccattcttcattatgacgtggggaaatcaagtccaaacattattcctacataatccctttcccaagtcaaatttgttttctccatgagccagttggtttcaagttccctaagtcatgtagtggtcttgcggcagttgttcagacctacctatggccccttcctggggccaaggcagtggtttgacccccatctgcctcttccagaaggtttcccatccaatccagcagccccagtgaagtccaagaatgccgtctccattctttcctgacctatatgctgtgagtcaggcacagagacagtgctggttcctgcttcggaagctgggcttggccaggtttggagggagccacaggaaaccaatctattcattcaaaatggtttcacaagcgatcttcacatctttggggttatctacaagtctgaccatatctcatcccaaatccccagttcctggttgagggggtgagaagatgcaggaatgtacctcccccaatgcagaacaacagagctgtttctctcctggccagagcagcctgtggctcagttctgagggcctgggtggcaggctccgaaggcaggtggaacacctgcaggaagccactccttccaaaaaagcctgtgggctgcagatctgctaaaagtctagagcggggcaacaaggaaaaacagccccaaggctgaggccaggtcaaaacccacatcaagcctccaaactggatttcctggatcacatcctcatgtaactaggaagccacctcacgtttggacaccacactctaagatgggggcaccttgctggctgtaactctccaggcacagggagacagatctcctacaaggtcatcccggagcttaacgaggtgtctctgctaaaaagcactccaggcgcttggagatctgcccagagctaagagttcggctagaagtaagagtgcctgggaggaggtcagaaggaagaaggaaatagatcgagggcacagggcctcatttgatacatcagtttctgaagttttcccaaagggaaataaccatttaaacatgagggtcctgataaatccaaaggtactctagttcctcttgacctagtgggaggcaggctttacagagaggacttctgaactccaggggctaagacagcctggggcttgggtgatcatcacagggttctctgagaaccaggtgtccaagagcccagccgctttcctgcccctcaccatcccatgaggatgaacttattcccctctgagatctctgattctgatctgagatctctggtgttgacctggtgtattccagacaggatggaggaataatgcaacagttttcacttgaatccaagggaaaggtggaggaagttgtgcacaatactccataaattacaaagttaatccagacaagagcaaatgcagcagggcgaggtgtctgacctctccaatctggcatccatagcacttggttctggaaggacccttgtgctgggtctaccgggtatctctttaattgaagggaactgagagctcagcaaagatggggagggtgggtaggctgatgaaatatgattataaatagcaaacctggagcaatgaaatttcagaaacaaaacccaaataaacccacgaagtcatctctagccccaaggtatcttaaaaggttacaaggtaccaaaaagggaacccctttttaacctgggtgtcaaatggggagaaaaaatcaagggtaagcagaaggtggggttacatcctgtgagcaggtgcacacacagcacatccccctcctcttcagctaaagtctctttcggtgtcacaggctgcagtctcattgctaaagccctcccaaacccgactctgctcccaccctcccatctagcccaaatacacccttctccctaactcccgatccccgaccccatatccagctctctggctctggctgaaggtagaagagaactacgtcaggatgttggacataaactcgttgaagcgtttggagtactgctcagggttcacagtcgagatctcggcccctgcctgtaatacacaagaggctgattcaggttgagttcctgtgccccaatcaggaggctgcacatggggggagccagggtattcagaagcctcttactcagtatcagagctgaataccacccccaaccccaccaagactgagcagaccacctcaggaagtggcatacaagtcctgaactgtcctggccccactcctgtgatttataaccccaggcctgcaccgaagtagaagaaaggcagtggggaggtggcaacgcggctctggatctctgtgggggccactacatggagaacagggcttcaggcccacagggaaacaggcctgtggggagcagtatgggcatggaaacaaagctattactcgcccttcaacaagatgcacaacaggcccagcaggccctggggaaagacactggcaggcttggccccgagggctggagaactgggggataaacaaattgggcccagcctggcagggagcaggtgggtgaaggcagggaacatggcaaggcaggcaggctgctcttccagtctgctctcctgggaagaaggagacaggagtgtgttccttggagcaggaggcctgagactgccctccctggggtctgagggtaagcacagatgcaccgacccagctgggccctggatgaagatggagaggactcaccccgtgtttcaccgttttggcagcatgtgcagctttcttctttgtatcgtatggcgtgaggatatcaatgatggccatgaaatacacctccttcttgggggaacctggagggacaaggagagcagggaagaaggaagagggggcaggagaagggcagacagcagctgggcactgctacaacccccagacacaaggctcagctccatccttatcatgttggggctgagaaaaggaccagtggagtcctttccagctgtcatagctcttatcttattggatcttcacagtcactctgtggggctgacaggacagtatgaataaagtttggttcatctcatgaaccagagcagaaccactcttcagtcagccaggacaagcagggaagtataggaaagcctggcagaggaggagccccaggttcaggtggtgaccctggatgggaatctggaggcagaaagaggtcaaaggcagcaatgaatgaggtggaggtccagatgcccctagaaggatctaaacaatgagctgagggggtaggatgagggcagggctgtgcagagcaggcgcaggctctgacttactttcatggcttttcatggcatagacgtcaacagaggggtcgaattccccaggaccaaagaaccgaggaaagctgaggaggttgccagggctgtccggaggtgtgccataggagcagagtaggttgccacccaccccatcattctcacactcctcgtcctctgcccgctcctccacctccatctcctcctgctctgcccggtccacgtcgtggatgcccaccagcaggctgtagtccatgatcttcagctgtgccaagaactaggaagggcaaggatggaaagatggaaggaagaagaggttacacaggacatcccagtgacatccagaaaggggggaaaggcattcctttcaactcaattctacaaacagttttgaaattcaacagagagtaaggcatcagagcacccgccctcgcgagctctctctaatggggaagacagtcattcagcaggggaaaggcaggaggtcgaggctgcagtgagctgtgatcacaccactgcactctagctgggtaacagagggagatggtctcaaaaaaaaaaaaaaaaaaaaaaaaagcaaggagctgtgggagtttacagtgaggggtgagcaagaccctccctgaagaaaggagttgaggccaaggatgaagaggagtcagtgaggcaagtactgcaggttaaagatagaacgagcactgcaggaagagggaacagcccatgacggtttgggatcaagagaggccatggtggctgggcacggtggctcatgcctgtaatcccagaactttgggaggccaattaaggaggatcacttgaggccaggagtttgagaccagcctcagcaacgtgatgagaccccatctctacaaaaaaatttaaaaattggctgggcgtggcagtgcacacctgtagtcctacctacttgggaggctcaagtgggaggatcgcgtgagcccaggaatttgaggctgcagtaagctatgacggcactattgcactcaagcctggggaacagagtgagaccctgtctcttgttttaaaaaaagaggccatggccaagtttgaggaaagaaataatgaaatgatatactatggaagaggatggagcgatggatatgacacaacaatatatttcagatcaaaatttcaacccattatgagtcctaaacccaatgtagtgggctggaactaggatttctttaaattaaatgcagtagtccacccttatccacaatggtttcagttacctgtggtcaactacagtccaaaaatattaaatggaaaattccagaaataattcataagtttttaaatagtgtaccattccgagtagcatgataaaatcttgctatgtcccattcagtgctgcccaggatgcagattatccctttgtgcagtatatccacactgtatgcactaacgtcccattagtctttcagtagctgtccgtagctgtcttggttatcagttcactatagttgtatcacagtgcttgtattcaagtaacccatatttgacttcattatgactccacagagcaagagtagtgatgttggcaattcagatatgccaaagagaagccataaagtgctttctttttttgagacagagtcttgctctgtcaccaggctagagtgcactggtgcaatctcggctcactgcaacctccacctcccaggttcaagtgattctcctgtctcagcctcccaagtagctgggacttcaggcatgcaccaccacactcagctaatttttgtatttttagtagagacagtttcatcatgttggccaggctggtctcgagctcctgacctcaagtgatccacctgcctcagcctcccaaaagtgctgggattacaggtgtgagccactgcacctggccagctttaagtgaaaaggtgaaagctcttgacttacaaagaaaataaattgcatgctgaggttgctaagatctcctgtaagaacaaatcttctatccgtgaaattgtgaagaaggaaaaaaaattcacgcatagtatatacagggttcagtactatctgtggcttcaggcgtccactggggatcttggaacatgtcccctgctgataaggggggactactgtataataaaatagaatagaaaatatcagaatacatgacagaaaataagggtagacagtgtttcagttgtgtgtatccattgggttgcaaggtaaaatatacttctaactggcctcagagacaaagtctgaaaaaactatgtcatcgacttttcagcccaggtaaaaatagaaaaaaaaggaaaagggaacacaaaaccatacaagaatggcagccagaaccaaccaatattctcaacccattccctgaaggtcaaaagaggctgtgtggtgctgggggaaagtcctcccctagcatcatgtgactccccttgccaagccttagttttctcatctgtataatgggtgctgtgagcagggtggtggttcaagtcttttatctaggatttcaagacaaagtatggaatgatacaggatggaaatggccagctagcattccagtttagctaataatgaggcaagagtgcagtcaccatcatacagtggtcactaggagactgttagactgaccaccatgttaggtcctaacagagaactaggaggagaatcatcatggaagcagagcagctctatgcacgagcccagaacacaactaaggacaaggagccctaaagatgggagcccagcaggatctccttggaagaggaagggagggagggatgccactctgagcacttccagacaaagccttctcaaggcccagggagaaggggctagggtcccaggaaaaagaaggtccatgcaccatgccctccacccacctgagaacatttataaagcaacatgcattgaaaacaaatgcactgagtaaactgcattaaattcttctcagaaccacagtagggggagagggtagaaaagggagaaggacaaagactcaggacaaataatgtcagatgatgaaaggcagaataaggaaagaacatagttgggggtgactaaggaaacgcttcctagcaaaacgaagtttatgacacccatgttcacagtagcattattcccaacagctacaaggtggaagcaacctaagtgtgatggctaattgtatatgccagctggactgggcctgagtgcccagacacttggtcaagcattattctgggtgtgtctgtgagggtttctgggtgaaatgagcattgaactggtggactgagtaaagcagatggccctccccagtgtggatgggcatcatccaatcagcagaaggcctgaagagaagaaaaagggtgaccctccggtgaggaagagggaactccttctgcctggtggcctgatggcctgtagaataaaaccacaccaccagctctcctgggcctccggcttgctgactgcagatctcgttggtatccataatcccatgaaacaattccttaaaataaatctcttagggccgggcgtggtggctcacacctgtaatcccagcactttgggaggccgaggcaggcagatcatgaggtcaggagatcaagaccatcctggctaacatggtgaaaccccatctctactaaaaatacaaaaaaaactagctgggcatggtggtgggcgcctgtagtcccagctactcgggaggctgaggcaggagaatggcgtgaacccgggaggcggagcttgcagtgagccaagatcgcgccactgtactccagcctgggtgacagagcaagactctgtctcaaaaaaaataaataaataaaataaaaaataaatatcttggtataaagagatttacaaaacatcctataggttttgtttctctggagaaccccaactgatataacaagtgtccattaactgatgaataaacaaaatgtaatacatccatacaatggaatattaatcagtttttgtgtgtgtgtgtgtgtgtgtgtttttgagatgaggtctcgttctgtcgcccaggctggagtgcagtggcacgatctcggctccctgcaagctccgtctcccgggttcatgccattctcctgcctcagcctcccgagtagctgggactacaggcgcccaccaccacacctggctaattttgtttttgcatttttagtagagacggggtttcaccgtgttagccaggatggtctcgatctcctgacctcgtgatccgcctgccttggcctcccaaagtgctgggattacaagcgtgagccaccgcgcctagcttttgttttgttttttaaagagatggggtcttaccctctagttcaggctgatgcacagtggcatgatcatagctcaccacaaccgtgaactcctaggcacaagggatcctcccacccagcctcctgaatagctaggactacaggcacatgtcaccacacccagctagtttttaattttttgtagagacaggatctcagtaaattgcccaggtctccaacttctggcctcaagcagtccttctgcctcagcctcctgagctgctgggattacaggtgttagccaccatgctcagccttattcagctttaaaaagaaagaaattctggccaggtgtggtggctcacgcctgtaatcccagcactctgggaggccgaggcaggcagatcacgaggtcaggagatcgaaaccatcctggtcaacatggtgaaaccccgtctccactaaaaaaatacaaaaattagctgggcgtggcagcacgcgcctgtagtcccagctacttgggaggctgaagcaggagaatcgcttgaacccgggaggcggaggttgcagtgagccgagatcgcaccactgcactccagcctggcaacagagcgagactctgtctcaaaacaaataaataaataataaaaagaaaaaaattctgacacatgatacagtatggatgaaccctgaagacattatgctaagcaaaataacagagtcacaaaaggacaactgctgtttgcttcctttttttttttttattttttgagatggagtttcattcataacatgttgcccaagctggagggtcaccgcaacctccgcctcctgggttcaagcgattctcttgcctcagcctcccaagtagctgggattacaggcgtgcaccaccatgcccggctaattttgtattttcagtagagactgggtttctccatgttggtcaggctggtctcaaactcctgacctcagaagatccgcccacctcagcctcccaaagtgctgggattacaggcatgagccacctcgcttggctgtttgcttcctcttatgtgaagttcctagagtagtcaacttcataggggcagaaaattgaacactgattgccaggggttagggagggggaattgggaattagtatttaatgggtatagagtttcagctgggaaagataaaagttcagagatgaatggtagtgctggttgcataacaatgtgaatatacttaatgccactcaactatatatcaaaatggttaaggtgcgtgcctatagtcccagctacttgggaggctgaggtaggagaatcacttgaacccaggaggcggaggttgcagtgagccgagatcgtgccactgcactgcactccagcctggggacagaacgagaatctcctaaaaaaaaacaaaacaaacaaacaaacaaaaaaaacacctattattatatgtattttaccacaattaaaaaaaattttttttcccaagtttgtttgtaggatttggttttaacgagcagcctctcaatttattaaaagagaaggagacgctgagttatcaagtggtccagataacattttcactatttagcacctgtcctccccagattacaaacagaagtttgctaggtaagtggagaatcagagccagagccagagaagaacctgattagtggatttttgttttttgagacagggtcttgctctgtcacccaggctggagcacagtggcatgatcacagctcatgttgccttgatctgccaggctccagtgatcctcctgcctcacccttccaaggtgctgggattacaagagtaagccaccatgcttagccaactttttcggtttttgttttgagacaatgtcttgctctgttgcccaggctggagtgtagtggtgagaccacagctcactgcagcctcatctcccgggctcaaacaatcctttcgcctcagcctcccaagtagctgggactacaggtgtgtgcccctacgcctggctaaattttttaatttttagtagagatgaggtcttgctatgttgcctaggctggtattgaactgctgagctcaagcgatcctcccacctcagcctcccaaaatgttggggttacaggaccttaatagctgggttcctacagctctgatggccagatgccctctccattgtagggacaacagcagaagggagtttgaaaaaggtgttggaatgaattagtgaaaagggaaaagcattctaaactaaattacaaaggtcctactggcgccaactatgctccgtcaggtggaatgatcatttgcacttgctttaggtgcccataagtgcccacgctgctcaaatcaccacccttttgtccatactcctggaaagtactgaattccattcttcttaaggtttaagaggcgcctactctaggtacagaaggagccttgcaggtgaaaatgaaggttagtaagtacctcaacgtcccgcttcagtttctccaggaagttctttttactctcctctcccacatgcagcttctgcccttcattgaggaagtcattgtctttgaatgttggcaagtccttggcctaggagagcaacagcagttaggctgggtaagcctgattaattcaccccagggacacccaactgttctgccgggagcaactatacagaaaggggaaggaggggttgtcagtgtaccgaccctcaacctgctaaatcagcagtgcaggagcctctagtcccaggctttgggtgggcagggagggcaaacacatgaaagatgaggaatgactaaaggattctttcctgttgagcctggaccagctcagggctcaggcagccactgactgactcaggctggactatgagatagaaatgtctgccatcccagcaggactatgaagaacgtagtgagggcagaggtaaaagaccagagaccaaggtctaggcctagcacaaggacagacaggtgattcatgacacacggcatttcatgttgacagacggcatgtctgggagctgggctaggggctggggtgggcgagggacaggatggccgacaggagttgtttctgactccaagcgacccttccattcctgctcagcaccagcataccttctccttgtcgctcgcttctctggcaaccgtagaaccctgaaaggataagagccatcaggggaagtcaagctgaggcaaagtcgactgcatgagcaaacatgggagagccagcaggtgaactcaagtaggcttgttagagtcctagaggggccaggaggcagcaccttgttcatttactgtgtcaagcccacttatagagctctatgtgcaagacactttttaggtgctcagcaaacaggactgcactggagaagctcagtccctgcccttgagctactttccttctaacaggggagacagatattcagcagtggttccacaagtcattagttcattcactaccacggtgctcagtggtacagggaggagcaggacactctgaaagcacataccacacgggcccggcctggggagggacagtggccagggcctacctacttcctggaagtagtatttgggctgagctcagaagggtaaggaggaagcaattaggtgggggaaggagtgggtggagagagagaaggagactattccagacagcagatgtgaaatcctgggaagaggagcacaggcactgcaggaacacagaggaaaccagcccagttgcagcacagagggaagggatggcggcataaggtgacagaagtcagaagccaggttcaagaacacggagcaccctagttcacagccacaagtgtgtccttctcagagtctagagatgcacttgtgctggcagtccatgggggcctgatggatgctaaagtgcatgcgtcagcacggcctccctcactgtgcacattccacagacaggaacatcaactgctgcataaatatggcacatttagggcttaaataatctcctgttactgtcacctggacttcaaactgcctttggtccacaagaatcaggcatatccactccagagttccctgtccatgccaacacataggctccagcttcccaattacatggaagttggagtagtggccccttcggggctcagatagaggggaggcacagctccggcaaacacagagccctttaccttgaggtcatacttgcgatgcacagtgagccgatggctgaacacgttcctggtaaccaccatgtaggtttccacaccatccacggtcaggcggtacatgcccaggaactgtggcaaaagcgtgttgccatgacactccactataaactagaatggaaaggaagaagagagaggactaaggaacaggcagtgccagggatggatggggctcaccccagactaaaatgctccctggctccctgggattctaacctctagaccagtagttctccagctgggttctatgaagtaataggggtttctcaggcttaaaatgggcaacagccacctccagcctcctgttggcatggcagagggagaggcaagctgagcaggtggctcagagcccctgtgggttcatattattagtatctcacctaagattttgtttaaagtaggattctaccacaggaaaatccctgatccacaccttgcatctcttctgccagcctgatatgggaatgccgcagggaagagacaggatgcagaggcaggccagggatccagccatctgggagaagagaacagctccatatccaaagctcttatccatgccatgccccagggtttctgccataactcctgaaagaccagaagctcccttcggcccttctcaggtgccccagaaatgaagacccaagtaggctgaggacagacacacagatggtgccacggggctccctgccttcctcatggacaggttccagatgagtggagagatgggacgggaaaagaaacaagcctgccgagctgagggggcctctttcagaagaaacggggcggatgccagtgcgtgaacactttccaactgggagtcagtcagcgatgagccttcatggctccttttttcttttttaaagtaggcatttcagctcacagaaatacggttgcaggagagtcccactgcttggtgatcagaagcagctgccattaccagagaggaccaacccctccctaagaagctcccccagggctctcttctccctcttccaacccatcctctgcagcccaggcttgggactcaccatacctggtggtatttctttaagatgttgtgcatctccgccacgtcctcgctggacacagtcttgatgacaaagcgccggtcgtaggtggtgaggaaacgcgtgccacaccgaccctggctgtcactgttgatgggggcgctgcgcgtcactgaattctgataatcgagacaaaagaaggctgggcttggcaggggaacagaattctgactttcgctgagtcttccctcaggggctggactgcttgaaagccaacaacactgagatagagggactcccagatgggagtttaccctccccttttctcacagggtgttcacatccctccctaagtcttcctccaaagtgacaagaattgttccttaccacctgctcttcatcccagtctaggatgggaagaggactgactgtgaaagtttccatcctgatcccagatagctatcctaccaactaaaattctgcctctgatggagggggctgagtctaatctggactctcacacgcactatgaccttgggtgagccatttaacttctctacccctgcatttcctcatcaggaacacaaagatgcagactgagctgattctcccagtctcttgggggtagcaaagatgaagcttagaaaatactgtcttcaaggggtctagcacaaagaagcaatgcccattcgtctcttgtccctggatctaccctaatgctgaaaaaccttccccaaagcaggaagctgatcctcatctctgagcctgacacctttccccttgcctcaacctcctgcttgtctatgcaaggctgggaggcagttttggggagctttcctggctgtatccctgctcctcctcaaggtcctactcccattaggatcagagagcagtagaagccttaagagggagggtgtgggaaggcgtgagtcaaccaaagggatatgttcaccaagcagatgccaagggacctctgggaagcaacggtgaggggagatcccaagtgtccctgttcccaagaaaacatacatggggatcatgtcacagaaatgtctcctctccaagatgtttccccatctcttaatgaggatcctgttattatttttgtagagacagggtctcactctgtcacccaagctggagtacagtggtgagatctcagctcactgcagcctctacctcctgggctcaagtgatcctcccgcctcagcctaccaagtagctgggactacaggtgtgcaccaacatgcccggcttatttttgtagcttttgtagagatgtagtttcgccatgtttcccaggctggtctagaactcctgagatcaagcaatcctcctgcctcagcctcccaaagtgctaggattacaggtgtgagctactgtgcccagcctttttttttttttttaaagatggtgttttgctgtcacccaaactggagtatagtggtgcgatcatagctcactgcagccttgaactcctgggctcaagggatcctctcgcctcggcctcctgagcagctgggactataggcatgcaccaccatgcccggctgatcaggatcctactctttactttcccctaatacctcctcagaaaaccctggtggagaagtgaggaccaccttcatggggaaaactaaagtcagaggtggtaagcagctctgggagttcctcagcaaaggtgctaaagtagcaccccaaaaaacaggctgttcccgttacagaaaggttgagtagactctgtgactgagcgcctcttcctcccagcctggcctctctaccataagacttacaggctgcaagcctagttgggaggtagaggcagcatcccctgactctctaagtggctggtagtccaagaatatagggtcccctccctgagcaccatcctccctgccctcatttcagtcttgagcacgggcatgcgcccacaaggctactaggggcaaaatgcagacactgagaggatgtggttagacagcccaggggagggaaaggaacccctcacttgcaacccctcaccaaggaacaatggagggaatctgtctgagcaacttggggttgcaatagtggcaagaagtttccagaaaacctccagccccagtcaagtcatgattgagttcagggttcaatcctaacagcaggctggaggaacctcccagtacctcttaggtgtaggcactcctgggcattcaagcccaaggcatctcctcctcctctcacaaaccctcaccctcttcttcgagatacttttctttgcatgcaagccctccagagaggaggagagaggggaggagactctaacccaaggccccttctgctgctgtgaactactctatcaaaggggtggggtgggaggaactacagtgttagaaaagatttgggcatccattctaggtttcactgtgctatacactaggtttcactgtgctatggggaaaagttttctccacagatgaatgaaagtcagctatatttcaggccaggtgcggtggctcacgcctgtaatcccagcactttgggaggccgaggcaggcagatcacaaggtcaggagatcgaaaccatcctggtcaacatggtgaaaccccgtctctactaaaaaaaaagaaatgcaaaaaattagccgggtgtggtggtgggcgcctgtaatcccagctactcgggaggctgaggcaggagaatcacttgaacctgggaggcagaggttgcagtgagccgagatcgcgccattgcactccagcctggatgacaggagtgaaactccatctcaaaaaaaaaaaaaaaaaaaaaaagtcagctatatttcttacagctgtaaaggtgaagtggaaaattcgcccaccttcaccacaaggctgtctgccaaggaagaagatccaaggagatgtgctaagaggagaagtgacagaaaccatggactgagtcagattctaatgtccctgacactgggattgattcctcccaacaggccaatggcctctacaacactgtcacgccctgaagggggcagttgccctggcagaccaactccccactcccaccaccaggatagggcacaagtttaggaggtgacactcatacctggcaagaggttacactacccttgaagtcttccttttctaatctatttcatctgctttaagaggcctcatctctcgctaacaacaattctctctctcttttttttttttgagactgagtttcactcttgtcgcccaggctggagtgcaatggcgtgatctcagctcgctgcaacctccgcctcccaggttcaagcgattctcctgcctcagcctccagagtaggtgggactataggcgcacatcaccatgcccatctaattttgtattttttagtagagacagggtttcaccatgttggccaggctggtctcaaactcctgacctcaggtgacctacctgccttggcctcccaaagtgctgggattacaggcataagccaccatgccccacccagttctctttgaagtcaaactacgaatgagaagggttcttcagcctagactgggaatgtcagactaaaataaaggtgcttccgcagacccctctccctcctgctgccctccctctgagggagaggaacctgagtgtgtgcagcatcctcagaagcatttctaaggccctcgccctgcaaggggcccccagtgctgggggagagaccgcctgggctggagcaaggcatgacagggagacacagcacaaaaacagccaacacgttttgattctctacctgtcctgtggcttcctgaccccattccattccctaatccactgatgttgccaggagcctccatacctggtaatcctgatcatcaattccaaacctctcccgaaggtttcggaacaccatggggcaatactccttaaacttaaagcggctgggcaggttctccctagggaaaagcagagatatgtctttgtgaactgccccttgctcatcttaattctattattattattattttttgtaatagagacagagtcttgctatgttgcccagactggtcttgaactcctggcttcaagcgatcctcccacctcagcctcccaaagtgctgggattacgggcatgagccaccacacccagcctcatctatattctgacttcagaactcttcaaagtgtggtccacagattgcctggatctgaacatctgccatacttaacatgtaggtttctaggctcttaggaattctggagttgagtcgaaaaacaaacactccaggtgattctgagcatgtaaaagtttaaaaactttacatcttgtattcactttgtaaaagtaatccagcagtataactggtatttgtgcgattttctatgtgtgtgctgcccttcaataaaacatacattaaagaaaaaaactctcacccgctgggccataagcctgagtgcaggctccacctcacaagcactgtgcttactacagtgggaacctgcatgtgaacatctgctgtgaggtgaaatcagcctgaatgctacaaggaaaaacctctctcatcagagggcccctctcctctggccatattcctgtggaagcatcctgaagatggtcacttacaggaagccctgccctgggcttccactgggacgtaggaaaagagtgcctgagttaaagaggtcttcagtcaactgagtgggaccacagagccctgtctgctggctgctggcaccaatctccaccctcccactccctcatcaatacagactcccaggaggaaagagaatcaccttgaaatgatgactcttaccaatcctccatctttacaacagctatcctgtttagggaccccctttcagaaatatgtcccagtgactactccaggatgacaggctttaaggaaatcaaaaggaatgtcttcttggaaaggaagtggcctatctgccttatctaccccgtcttctagtaaacagtgctagaatctaataaatagcacatacagggctgggcaaggtggctcctgcctgtaatcccagtactttgggaggccgaggcaggtggatcaccctgactgaggtcaggagttcgagaccagcctggccaacatggtgaaaccccatctctactaaaaatacaaaaaaattagccgggcgtggtggtgggtgcctgtaatcccagctactcaggagcctgaggcagcagaatcacttgaacccgggaggcagaggttgcagtgagccaagatcgtgccactgcactacagcctgggcaacaagagtgaaactgtctcaaaacaacaccaataacaacaacaaaaacacatacacagttgttggaaggacaaaaggaataaagatagaagaaaataagagattgggttctctgctttaggccaagatatcaaggaggtagcacctcaccagaggccatggaccctgaagggggtagtggtgcaatgcccacttcgagaacccggacctctgagtcagaacaaccttctttcttctgggtcagaacaaccttctttctggtctctgagttgagggctgcctctccctccttaggtggccacttaacaggtggcagctatggagacagacggcttctagaacaagatggtattacttactatggcagagggaggtcactaagggatgttctcaagtcaatcttctcctctggactaacagtctgggaatggtggggtgacagaacccagctagtgaggtggtggggactgtgagacaatgaagaatagaaccaggattcacatgcagaaaggagaaagtgtaagcagcaaatagtcctggggtggtccacagagggatggaaaatccaggccccaaagggcttaaagcaggcccaaaattgtgccaggtgtggcggccgctagtgtttccaacaatatctgagacaaccttcagacactggtgctaatccaagaagcgacagcagacaaaaatgggaagtgctactctggatagtgccctcgagccccatgctctgcctgttgctcatacaccagccagacagaaaagagcctggcggcatcccagaccaagaacatgcctggcaacctcctgcctcagactaagaccaagatggggccactgctacagcctcacactgaatacctcagctccagagcagctcactgccacctgagctggctctagatgaatcaccctgggcccagccacatgccccaagggccaccggaggtaggctgataatagagtgagacgacaatactaggatgagaggcacataacgaatgcattttcctagccagtttgtccgctctgagatccaggtgctgctgtcacaccctgccaggtgctgccttggctcccaccatgcatgaggcttcagaagcctctgacttgagggaaaggactgcccacaaaacctgagtccactcagtagacaacttacttattgaagagatgattgtccaccttgatcttgctgtaggctttgaagtcatctggcattagcatgacaggaacaggaacattgctcagctcattgatctgaaaagcaaggagaacgtaaggctctcagccaggaggccacctgcctcagagacactaagctacaatgtggatgccacaatcttgctaaaagcatgtccaagtttccctctctgtctttttttgtttttttgagacagggtctcattctgtcacccaggctgaagtgcagtggcatgacaatggctcattgcagccttcacctcctggactcaagcaatctgcccacaccagccccccaagtagctgggactacaggtgcacatcaccacgcccagctaatttttttgtattgtgtagagacaagttctcactgtcctgagctcaagcaatcctccagacttggcctcccaaattattgggattacaggtgtcagccaccacacctggcccctccctgcctttatttctgttcttctcttcaagtaagttcccaaccttgtcctattttacctattgaaactctccacctgataagggccagctcaaaaggcacctcctccatgaagttttccaagattctctagaccatcaataccctttcccatcttggaattcctgaagttttctttgtatctgtcttctggccatctcacagtctctcatattgtagttaatgcctataaacctcacctgctagagttaagctaggcaatactatattatttatctttctttttctttttctttgagacggagttttgctgttgttgcccaggctggagtgcaatggcacgatctcagctcactgcaatctccacctcctggcctcaagtgattctcctgcctcagcctcccaagtagctgggattacaggcatgcaccaccatgtccagctaatttttttttgtatttttagtagagacagggtttcatcatgttggtcaggctggtcttgaactcttgacctcaggtgatccacctgccctggcctcccaaagtgttgggattacaggcgtgagccaccacgctcggctttaattatatttctaagcaaagagcatcctactaatctttggggcaccacagtgcttggcaccattactagcatatatggcagatactcaataaatatttgtcatatgcaataataaatgatcaatagataaatgtctcccaacctaagtgggtattaattaaggcctttgaatatcttcatacaaattgtgggtcactcaagaaattagctcaaggaagaaaaaaagctggatgggtttgtgtggacttgtaactcatatccccaaggtaatagattaaatttatttatttatttatttatttatttatttatttatttatagacagagtctcactgtgtcgcccagactggagtacagtggtgcgatctcagctcactgcaagctccgcctcctgggttcacaccattctcctgcctcagcctccagagtagctgggactacaggtgcccgacaccacacctggctaattttttgtatttttagtagagacagggtttcaccatgttagcctggatagtctcgatctcctgagctcgtgatccacccacctcggcctcccaaagtgctgggattacaggcatgagccactgcgcccggctgtaatagattaaagtgagcagtagtaaatgtctggccactgccccacttggaccctcctgataaaagcagggccaggcctggcacagtggctcatgcctgtaatcccagtactttggaaggccaaggcaggaggatcacttgaggccaggagttctataccaccctgggcaacacagcaagaccctatctctaaaaaaaataattaaatgtgaagctgaggcaggcagatcacctgaggtaaggagttcaagaccagcctggccaatatggtgaaaccctatctctactaaaaatacaaaaaaattagctgggtgtggtggaagccacctgtaattccagctactcgggaggctgaggcaggagaatcgtttgaacccaggaggcataaggtatagtgggccgagatcgcgccactgcctgggcaacaagagtgagactctgtctcaaaaaaaaaaaaaaattaaacacattagccaggcatagtcgtgtacacctatcatcctagctactcaggaggctgaggtgggaggattgcttgaggccaggagtttgaggttacagtgagctgactgcaccactgcactgcactctagcctgggcaagagtgagatcttgtctcaaaaaagaaaataaaataaagcagggccagttcctgatgtcaagtcctgccatacactaaactaagggagatggggcaggatgccttgcctctactgcaaacaaaccttctgactttcatcccttcagggagctggatcctagacagagagctagctttccattggtgcagagatgagggcagatcctgcccttccccacctcgagtttagccagttagtggtctaattaaccacagatgtcctctcccatcacagcagagtatttgacatttgaccctcaacccagttgccactaatgcattcaggatttacagaggaaaccttagtcctgacttaatggactggggggagggggcacagccttgtgtctcccactttccttgcaaatcctgttatctcaatgaggccccaggtggcagtgaggggataacctagagtcattagaactcctccaggagcataaatgggggaaatggcatttaatttgctgctccttttatgttacaaaccttttttatttagaaatgtcagagaatggaggaagttcaagttaatgcagtaactgggctggggaaccatatcttcctagagttgggaaaaaacccaatttactcatggagaaatgaaggaagccataggaatgcacgtgctttgagagggatgctgggggcagggtagtttataagttggcagtggagcagacactaggtaaactgctggcaaaaactggcatagacacaagagtgtatcctgtataattccatttatatgaaattctacagcaggcatctataatgagagaaatgagatgagttgcctggccagggggcggggggtgctgagtgtaaagggacatgagaagtgtgattctacggtgacagaaatgttttatatgttgcttggggtgatggttacatgagcaaatacatttgctgaaattcatcaaattgtatacttaaaatacgcacacttaatatacataaattattcctcaataaagttgatttttaaattcccagcatcaagctctgtgatacccttcattggctaaaccctcccaatagccaaaaaaaaccccagaagagtcatgccagttcctattccagggggtgctcacaagagaatgtgactgtcaaatctgtgcctacagaggaaaccattccacttctttgtttttctgccaacagaaacaattcgtggtggctgtcccatttcctttttcctggcatatcaagcctggctccgagacttaaagggaaaacagagacaaagagttcagggctcggctgggcgcagtggctcacgcctataatcccaacactttgggaggcctaaggggacggatcacgaggtcagaagatcgagtcttgctctgttgcccaggctggagtgcagtggcagaatctccgctcactgcaacctctgcctcctgggttcaagcgattctcctgcctcagtctcctgagtagctgggattacaggcgcatgtcaccatgccctgctaatttttgtatttttagtaaagatggggtttcaccatgttggtcaggctggtctcgaattcctgacctcgtgatctgcctgcctcagcctcccaaaatgctgggattacagatgtgagctactgcacctggcccagcctaggaaatttttaactcagctaacattggtgaacaatccatatctcaactaggggagacttacccctcatttctactaggccacatgtagatgattcactgtagggattagccctattattattatttttttagttgtgtgaaattttatatcccagagagttctattccatttcaattgaactgttcctattgaaatatctgctacgtgcttcattctgttaggtaggtgtgtgggaggaggagaacacaaggggagaaagtgttgtacatgcaaaagaaacaggaggcttataatctcatcagggagatgaaaaaaaaccctgacaccctcaaagtcaaagcagtatgcaattaagtgagaatccagggatacagacatcaagaacagcagaggctcagagaaggatgaggctagcatggccagagggtcaggctcccagtcctcatacatcaggccagaaacaaggcacctaatgcctctcctggtattgcaccaagagcacttgacattaggagaatctacaagatcatgctacactcctgcttagaaatcttccatggctgctcctctcaacctcagggtaaagttttaactgcttagcctggcattcaaggcctttcctaatctggctcagactgccaatttttttttttttttttttttttttttgagatagagctttgctctggtttcccaggctggagtgcaatggcgtgctcaccgcaacttccgcctcccgggttcaagcaattctcctgcctcagcctcctgagtagctcggattataggcatgcaccaccatgcccggctaattttgtatttttagtagagatggggtttctccatgttggccaggctggtctcgaactcccgaccttaggagatccacctgcctcggcctcccaaagtgctaggattacaggcgtgagccaccgcgcccagccagactgccaaatttctattcaatttacttctactcagtgtattaagggccttactatatgctaggagctggggatacaaaaccaaaaagacatctgcagagctgggcgtagtggctcacgcctgtaattccagcactttgggaggccgaggcgggcggatcatgaggtcaggagatcaagaccatcctggctaacacagtgaaaccccgtctctactaaaaaaaaatacaaaaaaaaattaacggagcatgatggcgggcacctgtagtcccagctactcgggaggctgaggcaggagaatggcgtgaacccacaaggcggagcttgcagtgagccgagttcatgccactgtgctccagcctgggtgacagaaccagactccgtctcaaaaaaaaaaaagcaatgagttcactctatgctgatctactggagatgaaaattccttgattgattgattgagacagggtctcacttccataggccaggctagagtgcagtggtatgatctcagctcactgcagcctcaacttcctgagctcaggtgattctcccatctcagcctccctagtagatgggactacaggtgtgccatcatgcccagctaattttatttctagtagagacaagttttcgccatgttgcccaggctggtttcaaagccctgggctcaagcaatccatccacctcagtctctcaaagtgagaggtatgattctgttgtacatatacaacagaatactattcagcctttaaaaaaaagaagaaaattctgcaatatgcaacatggagatgaaaattcagcagctagttctagtctggtgaacttgtgtgtccagaagcctccacttccctgtgcgaccttcataggaattgttacctaggatgcctggactaggcatgcaggtttcctgacatgttccagtcctctgctgtcggttcagcagtgggctggccaccaccagcaatcacttgttacctgccaccatcagaaaacatgacatgctagaaatacactcacaggaccgaggaggtccaaagcaagaactgcaactccagagaggaagagagggccacaggagccaataaatctaccggtgtttactcctcctttccatatcttgctttctccttctcctgctgtttgagtcccactgctccctgtgaggtgggaaggcctgctaaaagaaacttcattcaaaggcctgagtaggaatgttctctaaagatttttttttttttgaaacggagtctcactctgtcgcccaggctggagtgcaatggcgcgatctctgctcactgcaacctccgcctcccggattcaagccattctcctgcctcagcctcttgggtagatgggattacaggcgcatgccaccacacccggcaaatttttgtatttttagtagagacagggtttcgccatgttggccaggctggtgtcaaactcctgacctcaagtgatccgcctgcctcggcctcccaaagtgctgggatcacaggcgtaagccactgctcccagccatctctgaagattttttcttttttttttttttttgagacggagttttgctcgtcacccaggctggagtgcaatgccgccatcttggctcaatgcaaccgccgtctcccaggttcaagtgattctcctgcctcagcctcccgagtagctgggattacaggcatgcgccaccatgcccgactaatttttgtatttttagtagagacggggtttcaccatgttggccaggctggtcttgaactcctgacctcaggtgatccgcccaccttggcctccctaactgctgggattacaggcgtgagccaccatgccaggcccctctgaagatttttaaagcagtagggcaagataaaaagacaggtaaaggaggtcagtggctcacgcctgtaatcctagcactttggaagaccgaggtgggcaaatcgcttgagcccaggatttcgagaccagcctgggcaacatggcaaaaccccgactcttcaaaaaatacaagtgttagtcgggtgtggtggcatgtgcctgtagtcccagctactcgggtggctaaggcaggagaatcacctgagcatggggaggtaggggcttcattgagccgtgattgtgccactgcacttcagcctgtgcaagagcgcgagaccctgcctcaaaaaaacaaacaaaaaaaaaaacaagaaagaaagaaaatgtatggacagaacagaactggggtggaatgtaggagagaaattgagcagactaaagaataaatctgtccctcacaccatacccaaaagtgaattcaaaatggattacagacttaaatgtaagaactaaaactatacatactccagcactattcacaagagctaaggtgtgaaaacaaatccatcaacagatgataaagaaaatgtggtatacatatacaacagaatactattcagccttaataaaagaaggaaattctgctatgtgcaacatggatgaaccttgagcaccttacgctgagatcagctagtcgcagaaaaacatatattgcatgattctccttatataaggtttcaaaacagtccaattcatagaaacaaagagtagaatggtggttgccaggggctgggggcgggggaaatggggagttaattggtaggcataaagtttcattcaagcgagatgaatacgctctacagagctgcactatgacactgttcccatggtcatcaataacataatcgtacacttaaaattttgtcatgagagtacatcttatgttaaatgttctgaccacaatacaattaaaaaaaaaaaaagaagaagaagaaagaaagagctaaaactctagttgggaggattgcttcaggccagaagtttgagaacatcctgggcaatacagagaaaccccaattcattaaaaaaaaaaaaaaaaaaaaaaagagctagaactataaaacttttagaagaaaacaaaggagtaaatcttcatgaccttgggttaggcaatgtcttcttagatataacaccaaaagcacacacaacaacaacaaaaaagataaactggactttattaaagttaaaaacttgaacttcaaaagataccataagaaaaatgaaaaaggcaggccaggtgcagtggctcacgcctgtaatcccaccactttgggaggccgaggcggggggattgcttgaggccaggagttcgagaccagtctggccaacatggcaaaaccctgtctctactaaaaatacaaaaattagcctggtgtggtggcgggcacctgtaatcccagttactcaggaggctgaggcaggagaatcgcttgaacccgggaggcagaggttgcagtgagccaagatcacaccgttgcactccagccagggcgacagagcaaaactccatctcaaaaaaaaaaaaaaaaaaaaaaaaagaaaaatgaaaaagacaactcaatgaataggataaaatatttgcaaatcatatatctgataagggacctgtatctagaatataaaaagaattcttgtaactcaataataagaagataacccaatttaataatgggcaaaaagatctttgtaaatgggcaaaaaatttaatagacattctccaaagaaaagataccaatgaaggctggggatgtggctcatgcctgcaatcccagtcctttgggaggccaaggcgggaggaccacttgaggccaggagttcaggaccagcctcggcaacaaagcgagaccctgtctctacaacaacaacaaaaagaaaatgtacaggccaggcacagtggctcacacctgtaatcccagcactctgggaagccaaggcaggtggatcacctgaggttaggagtttgagatcagcctggacaacatggtaaaactccatatctactaagaatacaaaagttagctgggtgtggtggcaggcacctgtaatccgaggtacttgggaggctgaggcaggagaatcgcttgaaccaaggaggcggaggttacagtgaactgagattgtggcactaaactccagcctgggcgacagagcaagactctgtctcaagaaaaaaaaaaaaagaaaagaatatgtacaaatggccagtaagtacatgaaaaaatgctcaacatcattagttatcacagaaatgccaatcaaagtcacaatgaggccgggtgcgatggctcatgcctgtaatcccagcactttgggaggccgaggcaggtggatcacctgaggtcaggagtttgagacaagcctggccgacatggtgaaaccttgtctctactaaaataaaaaaattagccacgtgtggtggcaggcatctgtaatcccagctactgaggaggctgaagcaggagaattgcttgaacccgggaggtggaggttgcggtgagccgagattgcaccactgcactccagcctgggtgacggagtgagactccatcacaaaaacaaacaaacaaacaaaatcacaatgagatacgaattcacacccaacagaatggctttaataactttaaaaagacaataacaagtgttgacaaggatgcagatactggaactcttatacactgctggtagacatgtaaaatggtacagccactttagagaacagtttggcagtttctcaaatggttaaatacagagtcaccatcaactgctcctgctcctctgatccctgtggtaaggcttcacacatacctggttcttaaaatggccaacaagtatcaagtcaggtctacctcccatggtctccatgctcctctctgaggccatctcttccctaattccaaaccctcggaactgtatttcatccactaaaacactggtttttgctcttcactagttcttccctgacaggtgcaaagtcttctgatttttctccttgtttcctacacattcttcctccacaaaatccatgggctcttgtccatgagagcagctcctgtgacaacaccaagttcaaagtcctctctttttccacctagaagtaaactaatcacctcatgaaagggtaactaacttctgctgtagataaagacatatccatccttcctatctgaaacaccattagccacagaccagcatgcctaaatgcctaaacaggtgagaaactaaagaaaaggtggtatctgaaatctcagatgacaaaatgttacaaagtaggctttttttgaagggaggaaatctccaaaaaagtgcagcagtccaccgagggcaatgtggtcctgatcccttagacgagtgcaagattacactcttcttctaggcagatgtctcagttcccaaatggggacactgaagtatcagaccttactgcagaccaggatgaagcaataaaacttacgactaactggcctctgaagcttagcctgtccagggcagtggtgggaagttcccatgagatgcctgttcattatgtccagaggcacggatcttgcttaaagtcaatgcctttccaactagcccctcaaacaaactttcaacttaaagttagcaaagaaaaaagatgaccactttgtccaacagagtaggactcacaggactcctgactcgtgatacctaaccatcagctattgagaaacttcataaccacatatggacagactcatgcctgcctatcggaacaccatgcatcacacacactcccaggacctgacatgcataggcgtataacccagagcatatattcaccttctctaaccggactatacttcgcatctatcctgagacttggctgagggagaggaaaagaaacaggaggcaaagaaaacaagaccagccactcaggcaccacccttggccgatacagtcccatggtgctagacaataagcgacatctcttgctgtaaccacaggcaagctaatcctccacctgaggcctccttttcttcatgtgtaaaataagggacccaaggttcattgcagctagctgtaatactcctgactctcaggcctctaccagttctctacagacaggttgctttctgtgagaaacagaaccagcagagagaggcctggtagagtgagaagcaggatgcagaacaaaatcaaggattgacttccagaaagggacatggggttcatattctgatcacccagtttccctagaaatgttgtcagatgacccctgggacagcaggaagaccgagtaacaaactgggctggattgttggcccgaagcagctcctagaggtctgggcattataccactggtactcgctatcctggcaggaccctcactaacaccagtgatgacagtgaaaacagtaacctgcccaagaccaagaaaccacagagacctcaatttacacatgcactttcctaaatgacaggtcaagatctaaaaccctagctcagattacggttcatcgatctccacccaaaggcaccttcagctcctctgccaaagcaatgcaaagtcttgctggccctctttgtcatcgcttggtcttgtgagcaatttcaagcactcacaagtgaacctaaagaactgaaatccacaggaaacccaagcttgatcctccttattccaaaattctagttagtgaagttggtgtttcgggtccttttacttcctctgctcattcctagtgtggggattcataaagaaatggtcagaaggcaaagagcaagtggttggaagagggagaataaagaccctgaacaaacaccacataaacagtcttccagcttaaactgtcaggatccaacttcctggcaggggctgttgaacaatctcaaagcaccctaaggacccaggggacctatctctcctatctaggaccataatcactatgcatcatcacaacattgcagccacacaacagataagtcaacatctttaaaatgatcaccttcaaaaactatgggaagacatattatttctactatgaatagtccctccttataaccaggcatcctcttctctcaaatggttaatagccattctttcttctccctaacccagagagacccaggtgaagtgtctggttcaaggaagcctgtgcttctccagttgatacatcttgttcaagagggaaaaaaaaggaaacccagggtggagttctacattcaaaggtaaggaggcctggaggatggaagaatttgagcagccacaacaaccaaacgatcagaaagagaggactatttgggcagaccactgctacttgacagagctggcagccggctgtaaggaacaagggggaatatacaccctcacaaacaggatgaggggggaggaggagaagcagggatgaaagcgactccactgcactgaggccttgcctttgcgctccatgggctgccccaagcgagcacgccacacgcaggaagccagaagggctggagggaaggggaggtggcgacggcagaccacagagacaccaggcctcgcgtggcgtgcggggagtgcacacggggccgaaaggcgtgcaagggtggggtgggcgtgcaagtggcttggcgaggggtggcaggcgtcaccggcagggcctgcggggcaagggcccagggctgcagggggcgtgggagcgcgcggggccgcgctcagaggggcgcgcaggagctggttaccgtgtggttcaccccccacatcaggacgctgaggatcggctcgctggcccggaatagcttcactttctggcacacgaaatgcttcttcttggtcttggtcttgctggcgctgagcggcgccaccgccaccgccgtggtgctggtgcagttggacgacatgcccggggcggcggcggcggcggcgaaagaggggggcggcggagacagcgcacaagccagcggcctcaggcctcccccggaccgatccccacccccgctccctcaccgcgccatggtcgcgcccgtcccgttacctcccaccccgccccggtggttccgtccgccccacgccccgccctcccgccccgccccggggagcccgccggcccgctccgcaccccgcccccgggcggtgcagccgccctgcagtcccctggccccgtcctccccgtccgcgtggtacggcccgtcccggggaggcagcggccgccccgcccgcccctcctccccgggcctgacagaaacccgcctggcctccgaacgcctcggggccccgtgccggagccggaaggggaggagggctgggcaggcgtcgctgtggaccgcgggaggggctccccgcccgggccccccaacgccagggtttggctctttcccgcaacccgaatgccaagatggcggcgatgccaccgctccggaagggaaggagggacgggaatgcgaggagggcgggacgtaccatgcccaccccgggggagaggagggacgcagcaaggggaagagaaagtccagcctagaaagccaaggaacgccccctcgctccacctaagcgtggatctgcccactctgctgggccccgggcgcgctccacccgcggggcacgccccttgcccccagggccaatgagagaagcaggccaggaacactggtttttatgaatgggccccgcgcccacccacctgctgcctgttctccccgcaaagggtcagagctcagaggccgccagcaccttcagacacctatcccactaatcgtcttactctggctcatttcgtaaaatctttgagtaaactgccccacgctttgttacataattctcagatgagggatctccatatattcgacacaaattacaggtcaacgttgttctttctgcatggaaattcgtaaacacggtactccacaggtggtcgctctttaaacagttacaaaaataaatgtggcctttattaccaattataaaataaacataattaaccccggcataatgaagtgattaaatgaataaaaacgtatgttacattctctagggaaagatcgggtttcaagcattacagtgcctggcatcataagtgttcaaaaacagaaatccaaatacattttaagcagaattaggaattagcagaacaaggaaatcgcccagctaatgtgcgggtcaagagggcctaggagttcactggtcaaatgagggcttctggtgaaagaatagagaagggaaaaggagtaaagacaggagagtggcccctcgagggttttgttttgttgctgttgttttttgagacggaatctcgctctgtcacccaggctggagtgcggtggcacaatctcggctcactgcaagctccgcctcctgggttcacgccattctcctgcctcagcctcccgagtagctgggactacaggcgcccgccaccacgcccggctaattttttgtatttttttagtagagacggggtttcaccgtgttcgccaggatggtctcgatctcctgacctcgtgatccgcccacctcagcctcccaaagtgctgagattacaggtgtgagccaccgcgcccagcctgttttttgttttttttttagtacctgactgaaagagactagcaaacaactcctgaaaatctgtaattgtagtaaggttactacacggtaagaagtgaagccgcaaaataaaaacttccattttattttcctttaggagccatggagcatattggcaatttggttctgactcctaaaatcattttactatacctttacactgcctacattggagactgcaagcagtggaaaagaatagatactccagatctcgtcgataaacccaggctcctcctaaaccagccagattcagagagaaaaacgagctggcctgccttattgtattacttgccatcaaggttcaatgtggttctattacccagtaaagtcattgaccaaacaaggtattttcacaaagctaaccttttttaaaagcatgtaaaaattgtacatttgtacatatacgcattacaattttacatccaaagatcaaatagttaacagttcatttagggctttttgtattgtttgattttccagattctgtcactcccttggctttgacctaacctgacatcattctgtcacattatcttctaaatcaagtaaacgttcatttgtctcagtaagcacaatctatctgggtgacaccagagaggtttctgaagggtctggtgtacgctgaggcagtgaaataggtctgttggcacaggtaagaaggaagtggcatgataaacatcacaaccccagggaacagccttccagagtggcacaagcactcccaccgagatggtccagtgcccacccgttaaagagtcaaaacccaaagttactgagtgtcccacaaagcaagtcacactagctctcaaaggaagtgagctgtttcaggactcaatgaagcagggtcactttgaacactggtggtttgacatctgtgaaagaagtcatttgaactcttataaagagaattaaggggtcagcagcttccctggaaaatgcaggaaaaccaataagagaggggacagttttcatcttttcataaagttcttctccagagctaccgaagttctctgtaaagagtagatattccgcttcacccgatcctccagggaggaagtagatgcactctccagcttcatgcggctaggaagagaagacaggcaaatgcaagtcaaaaacattttcaatcagtcaactattctggcagcttcagaagaaatgggttgttagccatagagcagctgtaaaaacacaacctcttttaagctcccatagataactttcgagtgactccacctggaaccaaatgtttttaaaccagtgtccataagggaaaatgtatctgttttggaaaataagtcaaagcctcattggaaaaaggcttcctgggccatgaattcttattaaaaaggaaggtcaaggaatttcaatgatttagaaaataccaaattcacttctcctcccctcaaatgaaaaacatcccactgtgtggtcagaaaggaagagtagtagccaaggtggtctgaaggctgggctccatgtgcaaacacagaaacactggaacgggaaccagctgccagcctgcctcttaagaccttccccatgaaagaccctggcaggaagaagatgcactcactggatgaacttcccatcccgggagtccagcttctctagcctctgctcccgttcctcatccttagcatgcctcttgaggatgttcagtctctcctcctccctccatttggcgttttccatcatctcttgccgttttcgctctaattcctctgcagagagttttctgttgagcacagaaaccatacgatcaggtctcttccagcaaaaaaaccagaagcagcacaagaagcacagaagccaggtgggaccccaagctctccagttcactgctctctccaagtgcaaggccagcctgagttcccttctaacgtcctggtcaggaggtttcatccaaatttcaaaggcttttagtaaagtattccataatctcactcagtaatctctagagtgattattctgaaatatgaaatatgaaataaattgggaactcatcaggaacctaaacttgtagcaattatatcccaatggtttgctcaacaattgacagaagaacagaagactaggttatccatgtaactgttaacatctaccatctaactacccattggagactagaaattcatgacacagcccatgagtacactactttaggactaagctagaagccagaagctgaaggaataacttagcctcagaaaataataaatagggccaggcatggtggctcacgcctgtaatcccagcactttgggaggccaaggcgggcagatcacctgacgtcaggagttcgagaccagcctggccaacatggggaaaccctgtctctactaaaattacaaaaataagctgggtgtggtggtgtgtgcctgtaatcccagctacttgggaggctgaggcaggagaatcgcttgaaccgaggaggcggaggttgcagtgagccaagatcgcaccactgcactccagcctgggtgacagagtgagtctctgtctcaaaaaaaaataaaaacctccaaacgaaaaacaatttactattaaaaatctgcttcagataataaatgaaagatattagagcattcaaatgagagtaggaggcttaaaaaaaaaaaacaaaaacgattgccaggcacagtggctctagcccgtaatcccagcactttgggaggcttaggcaggaggattgcttgagtccaagagttcaagaccagcctaggcaacaaagtgagacctcccatctctgcaaaaaaaaaatttttttttaattagttgggcatggtggcacccgtgtagccccaactatttggaaggctgaggtaggaggatcagttgaacctgggagtgtgaggctgcagtaagccatgatcgccccactgcactccaacctaggcaacagagtgagaccttgtagggagaagaaagaagttatcaaagaaataatacaagaaaatttcctagaactcaaagacatggtttagattgcaggaagcaaatactgacactaggaaaaaatatacaaatcatacaagaaaggaaatgtaacctccatattctgcttggcttaggaatgaaaagtatcagtaaacaatatttatatatcatacaagtatgaatccacatactcactgaaccaaaaattctgatgtaaccatattggaaagatagggatagaagaaacatgggactaggagtgtatgagagctcatttacactaacagattatttactataacagtaagaaaatatctaagatctggccgggcacggtggctcacacctgtaatcctaacactttgggaggccaaggcaggtggattgcctgagctcaggagttccagaccagcctggacaacacattgaaaccccatctatattaaaaatacaaaaattagggccaggtgctgtggctcatgcctgtaatccgaacactttgggaggctgaggcgggcagatcacctgacctcaggagttcaagaccagcctgaccaatatggtgaaaccccatctctactaaaatatacaaaaattagctgggcatggtggcatgcgcctgtagtcccagctactcgggaggctgaggcaggagaatcgctggaacccgggaggcagaggttgcagtgagccgagatcgtgccactgcgctgcagcctgggcgacagagcgagacaaaaaaaaaaaaaaaaaaaaaggaagcccgggcgtggtggctcacgcctgtaatcccagcactctgggaggccgaggcaggcagatcacctgaggttgggagttcgagaccagcctgaccaacatggagaaagcctgtctctactaaaaatacaaaaattagctgggtgtggtggcacatgcctgtaatcccagctacctaggaggctgaggcaggagaatcacttgggcccaggaggcggaagttgtggtgagccgagattgggccattgcactccagcctgggcaacaagaatgaaactccatctcagaaaaaaaaaaaaaaaattagctgggcgtgacaacatgtgcctgtagtcccagctactcgggaggctgggacaggagaatcacttgaaccccggaggcagaggttgtagtgagccaagattgtggcactgcactccagcctgggagatacaacaagatgctgtctccaaaaaaaacaaagaaagaaaaaagaaaatatctaatatctaaaattaatggatgaagaggcagcaacatatttgtatttttaggaatatgtagctatgaaaagaaactactgaaaaagctgaaagtagttgcctttgggtagcatgactaaaagtgggatcaggcagggcaaagaactactagcttttgtttttttaaatgtttttaaaataattttttgtagagatagtgtcttattatgttgctcagactggtctggaactcctggcctcaagcgatcctcctgccttggactctcaaactgctgggattacaggtatgagccaccacacccagagagaataattgaggggttttttaaagagggtttaatttaagagagggtctcgctctgtcgcccaagcaagaatgcagtggcttgatcgtagctcactgcaaccttaatcccttgaccttaagtgatcctccctgccttagcctcccaaagcgctgagattacaagcatggactgctgtgtctggcttggtttttgttaagagacttttttttttttttgagacaaagtcttgcactgtcgcctgggctgctgtgcagtggtgagatctcagctcactgtaacctccaacccctgggttcaagcagttctcctgtctcagcctcccaaataactgggattacaggcatgtgccaccatgaccaactaattttatatttttagtagagatggggtttcaccgtgttggttaggatggtctcgacctcctgacctcaggtgatccacccacctcagcctcccaaactgctgtgattacaggcgtgagccaccacgcccagccttacctcgtcctttcaatgtcctcacatggctggaggcaggggacgcagacccttacaggttggcaagataaataaaagttggttcgtcgaaaaggtaatgatggattatccatttgccatggtttgagccccttctagattcaggcctgcaaaatgtggttaatcaactgggctcctgactcacctggtgtatccgggagcatgtcgcctttggtagacctcttttttaggtgatgggctcctagtttggcctgtctctctcctgttcaccttagagttgtgcctgtagcagacacagaaggcaaagaggaaaaagcctttttggtccaggggcttacactgaatccctcaaacaatgcaagatgagctaatggtcttagaggtataatctaagtgtgagaaaaacaaaggtatagggtttgatgttagactcaccccagagctcccaaagcacagaatacacctacagatatgtggctttggatgcctgagctttacattgaggtggaaaaaaaaaatgatgtaaaggaaataccaaagcaaagacatttgggaaagtcaatggacggacatcaccaaaagcaaaaacaaatgcctgctgggaccaggcccccacagtcacaggttatttcccagtgaatcccacactcacagtttgctgggtcttggggaccgtgaccttctgcccagggatcgagacctcctgtcccgggaccctgcttccctggtgctcttcttgctggcatgtcttgggggtgagtgggaggagcttctggatctggaatggttcttcatcccatgccctctcttttgctctgctgtcagaggaccctgaagaccctggttacggtcagagttccggacctacatcattaaggaaaagagaagttattcacatggaaaatccagctattcaggagaaaacgcggccgggctcagtggctcacgcctgtaatcccagcactttgggaggccgaggcgggggggatcacctgaggtcaggagttcgagaccagcctggccaacatggtgaaaccctgtctctactgaaaattaaaaaattagctgggcgtggtggtgggcacctgtaatcccagctactcagaaggctgaggcaggagaattgcttgaactcaggaggtggaggttgcagtgagctgagatcgcaccactgcactccagcctggatgacagagcgagactccgtctcaaaaaaaaaaaaaaaaaaaagaaaaggcagtgaaacaggaaatgttacataaggagctcactgagcacaccaatatcatcacatagaattatcacagagaactgtataaacttagttatctgcagaatcccctaaaagaatctccttcggtcagccaggtgcagtcgctcacaccttgaatcccaacactttgggagacggaggcaggaggactgcctgagatcaagagtttgataccacccagagcaactagtgagaccttgtctctacaaaatatttaaaaattagctcggtgtggcagcacacgcctgtagtcccagctactcaggaggttgaggcagaaggatcccttgagcctaagaggtcaagacagcagtgagccaggatcacaccactgcactccagcttggatgagagagaaagaccctgtctcaaaaaaaaaaaaaaaaaagatggctgggtgctgtggctcatgcctgtaatcccagcactttgggaggctgaggcaggcagatcacgaggccaggagatcaagaccatcctagctaacatggtgaaacactgtctctactaaaaatacaaaataattagctgggcatggtgggcacctgtagtcccagctacttgggaagctgaggcaggagaatggcatgaacccaggaggcagagcttgcagtgagccgagatggcgccactgcattccagcctaggcgacagagtgagactccatctcaaaaaaaaaaaaaaaaagaaaagaaaagaaaagaatatacctggcttggctgggtgcagtggctcacgcctgtaatcccagcactttgggaggccaagacgggcagatcacaaggtcgggagttcgagaccagcctggccaatatggtcaaacccctctctactaaaaatacaaaaattagccgggtgtggtggtgggtgcccgtagtcccagctgctcaagaggctgagacaggagaatcacttgaatgcaggaggcagaggttgcagtgagccgagatcgcaccattgcactccagcctgggcgacagagcgagactccctctcaaaaaaaaaaaagaaagaaaagaatacacctggcttagctcttcactataggttaaggaagagcgagatgcagaagcatggaggacaggacccaaggttaaaaatacagaaatatgaggccaggcatggtggctcacgcctataatcccagcactttgggaggccgagacaggcggatagcttgaggccaggagtttgagaccagcctgacgaacatggagaaaccctgtctctattaaaaatacaaaaattagccaggtgtgatggcaggtgcctgtaatcccagctactcaggaggctgaggcaggagaatcgcttgaacccaggaggcagaggttgcagtgagctgagattgcaccattgcactccagcctggttgacatggagaaaccctgtctctactaaaaatacaaaattagccgggcatggtggtgcatgcctgtaatcccagctactcgggaggctgaggcaggagaattgcttgaacccaggaggtcgaggttgtggtgagctgagatcgcgccattgcactctaacctgggcaacaagagcaaaactccacctcaaaaaaaaaaaaaaaaaatacagaaatacagaagtcaagccaggtgccttgaacttgtacttccagctactcagaagattgcttaagctcaggagttcgagaccagcctaggcaaaataatgatgcactgctactcaaaaaaaaaaaaaaagaacccagcagatttatgtttgtcaaaaatcatcaacctacacacttaggccaggcacggtggctcacacctgtaatcccagcactttgggaggccgaggcggagggatcacctgaggtcaggagttcaagaccatcctggccaacatgacgaaaccctgtctctactaaaaatacaaaaattagtcgggcgtggtggtgggcgcctgtaatcccagctactcgggaggctaaagcaggagaatagcttgaacccggaaggcagaggttgcagtgagccgagatcgcgccactgcactccagcctgggtgacaagcgagactccgtctcaaaaaaaaaaaaaaacaaaaaaacctatacacttaaaatgtgtgcatttcatgtaaattatttgtagagggatgggtagaatgtctcaatgccccattggtggtttagtctctctgctcagagggtcatcagccacaagaaggtgctcagcgataagaatgggcctgtttcccagcagcccaggcttcactgcccacctccctgctatccacattgtccaagtggcacatcccacagtcccacagtcactcctttcaagaagcccacatccctacctgtaagccatatccagggactttggacaaaacaggggaggaatttgccatcttcttctgtgatctaagagatcaaaatacacacactcattgaaaaagaaaatatatataggtccaatttaaatatcttatgctgaactatgcttcttgcctccaatgtgacctttccgcctcccagcagttacctggcagtacgtttctctatttggactgtctatgccgaaaaatgcatcagcacaatcaaattttcctgtgaaaaactgtgggcctcgcttctaagccccaacgcctgaacaccttctcctctcacttcatgctgctattccagggacaaatagtgactcagcagcggcggagctgactgcttccacaggaagacatgcaaaatgggcccacatcagccatcagtccattaaaaaaagcctatataaagcccacttcagtcttgaaggaatcctaagctgagatgaaacagagtcacccccaggatgtctgacctacctaagacctactaggctaaagtcagcattattaagggtctctctccagcagcatggccaagatacccactcacatttagcatctccaaggaactctagcattagatggcaagctctgtgggcactgggcccatgttcaagtgttcatcactgaatgcccagtacctggcagcttccagcacagggcaggtgttcatgtctgtggaatgaatgagtgaatgagcaagtgaatcaacgagaagggaggccagtcgccacatgctcacctccctgcactgtgctcatcctcgctgctggaacgatcactactcgagcttctgtgcttatgtttcttgtgcttctttttcttctccttctttttcttcttctcctttttttccagactcatttgcaactggaaaatgccgagaacacaagcacacaagattactgagaccagccagcgcagtggctcatgcctgtaatcccagcactttgggaggctgagtggagcagatcatcacttgaggtccggagttcgagaccagcctggccaacatggcaaaaccccatctctactaaaaatacaaaaatcagctgggtgtggtggtgggcacctgtaataccagctacttgagaggtgaggtacaagaatcacctgaaccaggaggcagaggttgcagtgggccgagattgtgccactgcacttcagcctgggtgacagagtgaaactgtgtctcaaaaaaaaaaaaaaaaaaaaagattactggctgggcatggtggctcacgcctgtaatctctcagcactttgagaggctgaggtgggaggatcacaaggtcaggagttcgagaccaccctggccaatatggtgaaagaccatctctactaaaaatacaaaaattagctgggtgtggtggtgtgtacctgtagttctagctactcgggaggctgaggcagaagaatcacttgaacccaggaggcagaggttgcagtgagctgagatcacgccactgcactccagcagcctgggcgacagagtgagactccatctcattaaaaaaaaacaaaaagcccaggcggggtggctcatacctgtaatcccagcactttgggaggccaaggcgggtggatcacaaggtcaggagaaggagaccatcctggctaacacggtgaaacaccatcactactaaaaatacaaaaaattagctgggcatggtagcaggcgcctgtagtcccagctactcaggaggctgaggcaggagaatggcatgaacctgggaggcggagtttgcagtgagctaagatcgtgtcactgcaccactgcactccaccttgggcaacagagcgagactccgtctcaaaaaaaaaaaaaaaaaaaaagattactgagacccctatcagtctcctttgaggggcgtggctcatgcacaaactgcctgactccatgcctctgggtctacagaagtccaggacattataggggttccctgtcaacacaccaggggaagggtcttaaccctggccgtgcactaacacccccaactactgaactggtatctggtaggtgagactaagaatttgtgtttttaaacagtcaccaaaaccactgcctaggagtttccattctgtgtcacaggaactccaattccactgaaagcagtcaggaactataaggtcaatctttaactttccttaccaactgatccaagacacaattacataatatgtcatgtgaatggtaagtgggccctagaagccttatttttttttttttgagacagagtttcgctcttgttgcccaggctggagtgcaatggcgcaatcttggctcacagcaaactccatctcccgggttcaagcaagtctcctgcctcatcctcccaagtagctgggattacaggcatgaaccaccaccccggctaattttgaatttttagtagagacagggtttctccgtgttggtcaggctggtctcaaactcccaacctcaggtgatccacccgcctcggcctcccaaaatgctggaattacaggcatgagccaccgcgcccagcccctagaagctttataccacgaccaagggcatactccaacctcctgaacacactgcatggtaatgctttccacaggcttagcccacactcttcttctggaaaaacgacatcacatggtgcattctcccacccaaaagactttcaaccaaaatcaagcttaattaagcttaataaactaagattacataaaataaccaacctgaccaatatgaataaaccccgtctctactaaaaatacaaaattagccgggcgtggtggcacatccctgtaatcccagctactagggaggctgaggcaggagaataacttgaacctgggaggcggaggttgcggtgagctgagatcatgccattgcactccagcctgggcaacaagattgaaactccgtctcaaaaacaaaaaaatgattacataaaatagccacaacatggtctctaaaagacaaaagttttagaggccattctgtttttcccctggtaagctgagagtaaatggagagacgttctcacgttatatggctaaaagatgctcttggtgcttatctggtatactacttaccaattctttgattttcttcattttcactggattatttaatacctctcgttttttctcctcctccttcttcctaaagagagataattacaaaattcatgactatttcttttctccaaattctatggagtaaccttttctccaaacatatacagacaaactggcccatgttaaaatctacatgattagctgggtgtggtggtgtgcacctgtaatcccagctacttgggaggaggagaatcgctcccagctacttgagggaggagaatcgcttgaacctgggaggcggagattgcagtgagctgagatcgtgccactgcactccagcctgggtgacacagcaagactctgtctccaaaaaaaaaaaatctacatgatgatggggctgggtgcagtggctcatctcacacctgtaatcccagcactttgggaggctggggcaggcggatcacttgaggtcagaagttcaagaccagcctggccaacatggtgaaacctcgtctctaccaaaaaaaacaaaacaaaaaaattagccgggcatggtagcagcacgcacctgcagtcctagctactcgggaggctgacgtgggagaataacttaaacccaggaggcggaggttgcagtgagctgagattgtgccactgcactccagtctgggtgacggagtgagaccctgtctcaaaaaaaataaataaataaaaaacgacatgatggtgtcaaagccaaaaatctctcacaaatataagagattgtctcaaaaaaaaaaaaaaaaaaagagtcatgctcagtcgtccaggctgcagtgcagtggcatgatcatggctcactgcagccttgaccacctgggctcaagtgatactcccacatcagcttcccaagtggctgggactataggcccccaccaccatgcctagctaatttttatatttcttatagagatggggtttcaccatgttgctcaggctggtctcaatttcctgggctcaagcaatccatccatctctgcctcccaaagtgctgggattacaggtgtgatccaccgtacccggctgtcagttgttttttttgttgttgttgttgttttttcgagacggagtctcgctctttcgtccaggctagagtgcagtggcgcgatctcaggtcactgcaaactcctcctcccgggttcatgccattctcctgcctcagcctcctgagtagctgggactataggcgcctgccaccatgcctggctaattttttgtatttttagtagagacggggtttcaccgtgttagccaggatggtctcgatctcctgacctcgtgatccgcccgcctcggcctcctgaagtgctgggattacaggcgtgagccactgcttccagccgtgagttgttttttgatggttatagagtttcaattcagaatggtgaaagagttctggagacaggctgtggtgatggttgcacaacactttgactgtatttatttatttatttatttttattttttatttttatttttttttgagacggagtctcgctctgtcgcccaggctggaatgcagtggcgtgatctcggctcactgcaagcaccacctcagttcacgccattctcctgcctcagcctcccaaatagctgggactacaggcacccagggtctcattaatattatcaagaaaataggctgggcgtggtggctcacgcctgtaatcccagcactttgggaggccgaggcgggcggatcacaaggtggtcaggagatcgagaccatcctggctaacatagtgaaaccctgtctctgctaaaaaatacaacaaaaattagccaggcgtggtggtgggtgcctgtaatcccagctactcgggaggctgaggcaggaggatggcgtgaacccggcagacagagcttgtagtgagcagagatcgcgccactgcacttcagcctgggcgacagagcgagactccgtctcaaaaaaaaaaaaaaaaaaaaaagcgaagagaaaactgtaaagcaagagaatcaatggccttagcagggtctcaaagcatctgtaacaaacccccttcctagccccccattagtacctgatgatgaagagtgggtcctcccggatcttgctggccatgtcaagaagggaattggcacctgatggggcaaagatagagcctgggagaagtcctgtttcagaagagcagcctgcctccttctcctccatcttctcaaaaacatatttgtcaatggggcgccccagcaggtactcgtcacggttcaccatcccaccaggaccctggtacatccagtccaacttttcttcttttttcctggttcaagggaagaaaaagaaatacaatttctttaaaaagcagacttctgcaaacctacacctaaaacctggacacaagggagagagaaccacagctaatcagagttcattctactggcacctaccatgcaataaacacggcaccccatgtggccggcataaagaaatagtgcgggttgcgtgcagtggctcatgcctgtaatcccaccattttgggagtccgaagcgggtggatcacttgaggtcaggagttcgagaccagcctggccaacatgatgaaaccccatctctactaaaaatacaaaacattagccaggcgtggtggcggacgcctgtaatcccacctactcagaagggtgaggcaggaaaatcacttgaacctgggaggcagaggttgcagtaagatcacgccactgcactccagcctgggtgacggagccagaccttgtctcaaataaataaataaataaatggtgcttgtcctcatgaggcttacgagtgaatggagagagaatattcactcacataaagcaatttataaggaaaaccagtgttcctcaacatggggtgtggatcttggctcagagcttctcgagtctcctttacagagtctttatattatgctttcatttccaagatgacctaaaacaatgaataagcacattctacatcaccatcttaccatcaagaacaatttcagtgaccacatacgcagttgcattgattgtgcatcttggtgcttgtgggcacacagacaccagcggtaacactacacatttgaggggatgatgggaaaaaatcagaggtaactgaataagtgacgctttcaagccaaaagagccaaacactgaatacgtgaatcattaggtaactatctgggtttcacaagtgaataaaccctggtctcagccatctaggggccaaattaagtcacagcatcatgccacacaaacatttccctgcggttctgggagaaaaaagtggtgagaaagtggaaccctcataccacagacagtaaaggcaggctaaattcataagagcatgcgtggaagcagccaatactacattcacactgcaaccaggaaagtactttcattgacagtattatctataacctgaaattaaatgctttttgaatatgacttttttgttcttttttttcttttagacacagggtctcactctgtcacccaggctggaatgcaatggtgcgatcatggctcactgcagccttgaattcctgggctcaacaaatcctgcctcagcctcccaagtagctgggactacagggatgcaccaccatgccttgctgattttttattttttcaatttttaaacagatgggacttgctatgttgcccaggctagtctcaaactactggcctcaagtgatcctcctgcctcagcctcccaaagtgctgggattacaagggtgagccaccatgcccaacctgaatatgactttttaaatgtgtatacttgtttttgaggttatataacaactgtgagcataaagaatgttttcctagttgcatgcttggacatttttggtaagaataatttaaaccaacactgcagggccatgacccttttttttttcccccagacagagtttcactctgttgcccaggctggagtgcagtggagcgatcttggctcacggcaacctctgcctcccaggttcaagttattctcctgcctcagcctcccgaatagctgggactataggcatgtgtcaccaagactggctaattttttgtacttttagtaaagacgaggtttcaccgtgttggccaggctggtcgatctcctgaccccgtgatctgccagccttggcctcccaaagtgctgggattacaggcgtgagcaaccgtgcctggccccaagaccctttagaatttttttcatattaaaaaaatgagtctgagaaacactgtagtctacagttaagaactgatcagctgggcacggtggctcacacttataatcctagaactttgggaggccaagacaggctgatcacgaggtcaggagatcaagaccagcctggccaacacagtgaaaccccgtctctactaaaaatacaaaaaactagccaggcgtggtggtacacgcctgtagtcccagctactcgggaggctgagggaggagaatcgcttgaacccgagaagtggaggttgcaatgtgctgagatcatgccattgtactccaacgcaggtgacagtgcgagactcggtctcaaaaaaaaaaaaataagaattgatcatggggccgggcgctgtggctcacacctgtaatcccagcactttgggaggcctaggcgggcagatcacttgaggtcaggaattcaagaccagcctggccaacatggtgaaatgccatctctactaaatatacaaaaaaattaggccaggcacagtaactcacgcctgtaatcccagcactttgggaggcaaagatgggcggatcacaaggtcaagagaccaaggccatccaggccaacatggtgaaaccctgtctctactaaaaatacaaaaattagctggacctggtggcgtgcatctgtagtcccagctactcgggaggctgaagcaggagaatcgcttgaactcaagaggcggaggttacagtgagccgagatcgcaccactgcactcaagcctggtgacagagcgagactctgtcacacaaaaataataacaataataataataataattagccaggcgtggtggcacacgcctgtaatcccagctactcagcagactgaagcaggagaattgcttgaacctgggaggtggaggctgcagtgagcggagattgtgccactgcactccagcctgggagacagagcaagactctgactcaaaaaataataataataataataaataataggccgggtgcagtggctcacgcctgtaatcctagcactttgggaggctgaagcgggcagatcacaaggtcaggagttcaagactagcctgaccaacatggtgaaaccccatctctacttaaaatactaaaattagccaggcgtggtgatgtgcgcctgtaatcccagctactcaggaggctaaggcaagagacccgcttgaacccaggaggcagatgttgcagtgagccaagatcgcaccactgcactccagcccgggcgacagaatgagactccatctcaaaaaataaaataaaataaataacaaaaataaaaccagccgggcactgtggctcacatctgtaatcccaacactttgggaggccgaggcgggcggatcatgaggtcaaagatcgacaccatcctggctaacacagtgaaaccccgtctctactaaaaatacaaaaaattagccgggcgtggtggcgggcgcctgtagtcccagctactcaggaggctgaggcaggagaatggcatgaacccgggaggcggagcttgcagtgagccgagatcgtgctgcactccagcctggacaacagagcgagactccatctcaaaaaaaaaaaaaaaaaaaaaaaaaagaactatacaaaacaaacagatgaatacttaagtcatctaaatacattagcagtaaagaccaaaaagagaaggggcagagagaaccaaatgctgatcttagtgttttacaatattgtaggacatgtgatagggcaaaacaaaacaaagcatataaaatcaccttcccccattcacgacagacaagcaggcatgagtctgcaacaatgctggctcctttctctacagttgtgcatctgtactctgacctcattaatcagactccacaaaagcccaaatttctgataaattgagcacatgatgtgtaatgctttggtgaataaaaatgtcaaaacaatttttacctttggatagtacctcggcttatgactaatgggtattcagtctaaaatcaatttttacttatttatttatttatttatttacttagaggcagagtctcactctgtcacccaggccgaagtcagtggcaaaatcatagctcactgtagcctcgaactcctgggctcaagcaatcctcctacctcagcctcccaagtagctgggactacaggcacatgccaccatgcccagctaacttttcctttctttctttttttttttttgagacgaagtcttactctgtcacccaggctggagtgcaatggcgtgatctcagctcactaaaacttccaactcctgagttcaagtgattctcctgcctcagcctcccgagtagctgggattacaggcatgtgccaccatgcctggctaatttttggttttttttttttgagacggagtctcgctctgtcgccaggctggagtacactggcgcaatctcagctcactgcaacctccaccttctgggttcaagcgattctcctgccttagcttcccgagtagctaggactacaaatgcatgctaccacgcccagttaattttttttttttttttttagtagagatggggtttcaccgtgttggccaggctggtctcgaaatcctgacgtcaggtgatccgcccacctcggcctcccaaagtgctagattacaggcgtgagccactgcacccagcctctattttttttttgtttgttcgtttttttgagatggagtctcaatctgtcgcccaggctggagtgcagtggcatgatctcagctcactgaaacttctgcctcccgggttcaagcaattctcctgcctcggcctcctgagtagctgggattaccgccacacccagctaatttttgtattttaatagagacagggttttaccatgttggtcaggctggtctcgaactcctgacctcaagtgatctgcccgcctcggccttccaaagtgctgggattacaggcgtaagccatcgtgcctggctaatttttttctattgttttgtagagatgggttcctactacagactggtctagaactcctggcctcaagtgatctgcctgcctcagtctcccaaagtgctgggattataggcataagccgccacactcagcctatatatttttaaacagagatggagcctcactacattacccagactggtctcaaactcctgggctcaagtgatttctcagcctcccaaaatacagcaattacaggcatgaaccaccgcacctagtccccagttttagtctatctgttattttattttattctgacttaagaatacactgcatattgtatgctttttattttctcaaacatatttactcccatctccttttatgagatggatggggtagttattatctgctactcgtatcctatattatacaacaggaaattgaagcagggtaaaatctagtggcattggccgtaatcactcagcttttattgacaagcataccatccaccttctctcatgggacctcactccctgccccctgtccccgccgacccaagcaagcctgaaatacattaacaaaggcaggactgcatcctcaacatatgctgagaagcagggtagagcaaccatcctccatcacggttatcagccatctactgtgagctcggcttacagcaagtccttacgtgttatctcatttgattctcaacaaaccttaagaaggcgttgggtattattactccctggtcctactgaagtaaccaagtctctcaaatttgatcacagttccacagctagtacatgcaaagccaaccttagaatccaggtgagtctggcattacaacccatgcccttaagcactcagccattatacaacactggatgatgcatctcaggacagctctgcaattccctacacacaagcgcacccccagctcctcacttacttgacggccccaacatcctccgcatagcgctgcatctcttcccgggctctctcttctcgcagctcccgctgaagctcctcaatcttcttccgctcagcctcatgcttctgctcggccttccacactttctccacattcctgagggtctgcgggtgccagctcttcttcagattctgtggtaaataaaaagaaggtgatgataattcggggggtgactgagtggtgggtataactagccctgcctcacccacccttccatacccaaggcaggcgtgtgagggcaagatgtcttcaacaatggcaaggttttcttccaataatctctcacacatctagaggggaaggggagcttgttcaagtgtataaagcttcaggacaggtcgggcgcagtggctcacacctgtaatcccagcactttgggaggcggaggcgggaagatcacttgaggtcaggagttttagaccagcctggccaacatgatgaaacgcctctactgaaaatacaaaaattagctgggcgtggtggcaggtgcgcctgtagtcccggctattcagcaggctgaggcaggagaatcgcttgaaccaagaggcggaggttgcggtgagccgaaactgcgctgctgcactacagcctgggcgacagagcaagactccgtctcaaaacaacaagaacaagaacaagaaagcttcaggatagaacgggtccttcctgaattcccttcaaacagttttaaccttaaaagcatacaagtcatccttccactagccatacctaaatcagagttggtgatgacaagacaggaggaatgcagtaatgagcaggaaggcacatattttgaaagagaacagaactcatgcacttctgacagtggacattcattcttttttttttttttttaaagtcttactctgtcacccaggctggagtgcagctatctcggctgactgcaccctccgcctcccgggtgccagcaattctcctgcctcagcctcctgagtagctggactataggcacgtgccaccatgcctggctaatttttgtattttttagtagagatggggtttcaccacattggccaggctggtctcaaacgcctgacctcatgatctgcccgcagtggcctcccaaactgctgggattacaggggtgagccaccgtgcccagccttttttgtttcttgagacggagtttcactcttcttgcctaggctggagtacaatggcaggatctcgggtcacggcaaactctgcctcctgggttcaaatgattctcctgcctcagcctcctgagtagctgggattacaggcatgcgccaccacactcggctaattttgtatttttagtagagatggggtttctctatgttggtcaggctggtctcaaactctcgacctcaggtgatccgcctgccttggcctctcaaagtgctgggattacaggcatgagctaccgtgcctggcatggacattcattctttggaactcaacctaccttagcttggtctacttcacctgccctaaacttgcatggtttacaacccacccagaatctctttcaactttccttcccaggaatctctccttggttctgatctccccattcaccctcaaagaacacttctctctctcctccccatcagatactgctttggttcactttcccaataatgaaatgttccccaaagtaagtaatatctaaagacaattgtaaactagcctggtgatgtgtgaaggggagatgaggggggtagatttccaaacagaggggaacagtacagacaagtgcagtcctggtggtgagaaagaacatagcaataattcagtgtggctggagatgtggcaagctgatggtgcagggacgcaagaagaagccaagtgagaaaggagcagaataagggccttataagccatgtaaagggattacaggcatgcgccgccacgcctggccaattttttttttttttttttgagatgtcgcccaggctggagtgcagtggcgcaatcttggctcactgcaagctccaccttccaggttcacgccattctcctgcctcagcctcctgagtagctgggactacagacatccgccaccatgcccagctaattttttttgtatttttagtagagacgggtttcaccgtgttagccatgatggtctcgatctcctgacctcatgatctgcccgccttggcctcccaaagtgctaggattacaggtgtgagccaccacacccagcctgactccaactttttttttaacttttttttttttttttttgagacgaggtcttgctctgtcacgcaggctagagtgcagtggtgcaatcttggctcactgcaacctccacctcctgggttcaagcgattctcctgcctcagcctcccaagtagctgggattacaggcgcccgccactgctcccagctaatttttgtatttttagtagagacggggtttcaccatcttggccaagctggtctcaaatcctgacctcgtgacccacccgcctctgcctcccaaagtgctgggattacaggcatgagccactgcacctggctgagactccatcttaaaaaaaaaaaaagaaaagagaatggactggagaggaccaggagaccaattaagaaaataagatcatgtccacaaggtacttggcatgtggaaaatgttcggtcaatgagagctcccttttcttccttttctcttcccctccttgtcctgcctctccccttcgtcaggtcattcagttggttggttgtgggtcagtccgtcagttggtctgaccatccgtccatccttccgtccttcctccctcactccctccctctttctccctctaacccttcccatcttgtcctccctgcctcaagcatagattattttgctccccagggagaaaatcttctggagtcatttttggctgtcacaactggtggagacgggtgttagtggatagctccagtctagtggctagaggccagtgatgctgctaaacattctacaatgcacaggacagcccaactaccaccactaccacacacccccaaagaattatctaggccaaactgtcaagagcgctaatgttgagaaaccctggattagagctttcctgtccttaaatgcagttatgtgaagaatacactaaattggatgaaactagatggagtcctggcactcactgtgattgagaacacatgacaaactaataggtttactgggcaggcggctaagctgatctacttgctggttcaattagctccactttccggaggctagcattttcccaaccttgccccatgctcttgtgggtacatttaccctatttggggccttagcgctttacaaatgaacgtttcagtttaagagacattgccacataacttatattaagtggtatgaattcaaaagcaagctctgccactacagatcagaatccagcactgaaggaggtgtggaagtcagaaagatggacaggaagatcccttcaggcttaaaaaggaccccagggccgggcgctgtggctaacccttgtaatcctagcactctgggaggccgaggcgggcggatcacttgaggtcggcagatcgagaccagcctgaccaacatggagaaaccctgtctctactaaaaatacaaaattagccgggtgtggtggcgcatgcctgtaatcccagctactcgggaggctgaggcaggagaatcgcttgaacccaggagggaaaggttgcggtcagccgagatcgcgccatggcactccagcctgggcaacaagaaactccgtctcaaaaaaataaaaaataaaaaacgaccccagggcatggcttagggtagggagaatggggcacaaaccacccctacttcagtccaggacatgactctgaactctcacccaaggaagagaggtgtgtggcaagacaagatatacaaaacaaagtgtggtgacacgtcctccatatctacctcctttcctagccatggctccatccgccccctccccggtcttcccagaatttacagccggtagagccgcagtcaacaaacacgcaaacaccacctgtcactgttcgcgacacacctcggactttcccaaatctcagtcccacccctccattgccctaaggatccatcccctcttcagggcaacggcctcctcccggcgaaagcaaagctgcgttgccatggttatccactccttcctctacccccaccccctgccaatttccgtcccggcctcagtcctcccccgcccaggcctccctccactcaccaggtctccgccccccatgacggtggagacgattcctcactacgcggatctggaagatttcgggaggatcaagagaaaacgtagagaaatagttcgggggctacctcgcgggatctagtcccaggagccgtcaactgccagtttcaccaccgctctagaggtcacttccgggagggcgtcatctcaccgcgtcggcgtcgcggaacgatgacgtacagggctcggtcgcgctttgtgacgttggcgttacttgcagattttgcaaaggtccgggctccgctgtcgaggcctttgctgtcgaggtctcattttggctgcttcgggtcgccacgttgcctgatgtcccagactctctgttgaaacgccacaactctgttcagtgatgggttgccgtgggcctgtgcccacggctgtgttgccatggcagctcaccagggcattcggctcaaagctccacgtagtctctgctagacctaaggtggaccagactaggcctcctcccctcaccctgcacacacccccacgctccagttttccaaaacggctttgcaaactggcgctttcctcagaccttgactcacagcaaatccccttatgccaggcctattttacgaagctaaatagaaaccatcaaatcgaaattccatcagcttccgtttgccaaacttttaaaatctgccagcttccacagtggcagattttcccatagtgggaagctggcagattcctttcccttcagttactatgtgtttttggcatgtttttcttttttctttttctttttcttcttctccctttgtttttgttttttgagaaggagttttgctctcccaggctgcggtcgaagctgactgcaacctccgcctcccggacagcaattctcctgcctcagcctcccaagtcgctgggattacaggcgcccgccacccgcccggctaatttttgtattttttgtagagacagggtttcaccatgttgctcaggcttgtctcgaatttcgacctcaagtgatctccccgcctcagcctcccaaagtgttgggattacagacataagccaccgcgcctggctatttttatttttgtagcaacagggttttgccatcttacccaggcttgtctcaaactcctggactcaagcaatcctcctacctcggcctcctaaagtgctgggattacaggtgtgagccactgcgcccgacctgttttgtaattttcagaatagaagttttgcacatcttttgttaaatttattctaaatgttgtattttttgtgatgctattttatttatttatttatttatttatttatttatttatttatttatttatttatttatttcgagacggaatctcactctgttgcccaggctggagtacagtggcgcaataccagctcactgcaacctccgcctcctgggttcaagcgattctcctgcctcagcctcccgagtagctgggattacaggcatacgccaccacgacctactgatttttgtgtttgtagtaaagatgggatttcaccgtgttggccaggctggtctggaacccctgacctcaggtgatccgcctaccttggcctcccaaaatgcaaggattacaggcacccggcctgtgatgctattttaaataaaatttaaaaattttaattttccaattgtttgctactaatagataagaacgtgcttttgtatagtaaccttctattttacaggcttgctaaattcacttattagttcttatggctttttaaaaatacttattgcccgggcgcggtggctcactcctgtaatcccagcactttgggaggccgaggcaggtgggtggatcacctgatgttgggagtttgagaccagcctggccaacatggaaaaaccccatcctactaaaaatacaaaaattagccgggcgtggtggcgggtgcctgtaatcccagctacttgggaggctgacacaagagaatcacttgaccctaggaggtggaggttgctgtgagccaagatggcaccactgcactatagcctgggcgacaagagtgagactttgtctcaaaaaaaacagaaagaaagaaagaaacaggctgggctcggtggctcacgcgtgtaatcccagcacttttgggaggctgaggcgggcagatcatctgaggttgggagtttgagaccagcctgaccaacatagagaaaccccgtctctactaaaaatacaaaattagccgggcgtggtggcacatgcctgtaatcccagctactctggaggctgaggcaggagaatcacttgaacccaggaggcagaggttgtggtgagccaagatagcgccattgcactccagcctgggcaacaagagcaaaactctgtctcagaaaaaaaaaaaaagaaaagaaacaaacaaaatacctattaaatatttacttaaatgtatttgaataaagtttacttaaaagaaaagcaggctcactgctgtagtcccagcactttgggaggccgaggcaggtggatcacttgagcccaggagttggagaccagcctgggtaacgtggtagaaccctgtttctcaaaaaatacaaaaattagcaggacatagtggcatgtgcctgtagtcccagctactcaggaggctgaggtgagagactgcctgagcccaggaggcagaggttgcagtgatccaagatcataccactgcactccagcctgggcaacagagcgagaccctgtttcaaaaaataaaagagggccgggcgcagtggctcacgcctgtaatcccagcactttgagaggccaagacaggtggatcacctgaggtcaggaatccaagaccagtctggccaacatggcgaaaccccgtctctactaaaaatacaaaaaaattagctgggcgtagcagtgcacgcctgtaatcccaggtacttaggaggctaggcaggagaatcgtttgaacccaggaggcagaggttgcagtgagctgagattgcaccactgtactccagcctgggtgacagagccagactccacctcaaacttaattaattaattaatttaattaaataaagaaaagcaagcagagcacagtggctcatgcctgtaatcccagcactttgggaggctgaggtaggaggactgcttgagcccaggagtttgagaccagcctgggcaacacaataagacactgtctgacaaaaaaataaaaggaagaaaaaaggaaagaaaagcaatgctttgggaaagagtctggcagttcctcaaaaggttaaacttagttaccatataacccagcatttctactcctgggtatatactcccaagagaaatgaaagcatacatcaatacaaaatattgcccatgaatggctttttattttgttttgttttgagacagagtcttgctctgtcttccaggctggagtacagtgctgtgctcttggctcactgcaaccttcaccccactggttcaagcgattatcgtgcctcagcctcccaagtagctgggattacaggcgcacaccaccacacccggttaatttttttgtatttttagtagagaggaggtttcaccatgttggccaggctggtctccaactcctgacctcaagtgatctgcccacctcggcttcccaaagtgctgggattataggtgtgagccaccacacctggccaaaatcttgtacgtgaatgttcatagtagccgttattcataccagttaaaacatgggggaggctgggcatggtgtttcatgcctgtaatcccaggactttgagaggccaagatggccagatcatttgaggccaagagttggagaccagcctggccaacattgcaaaaccctaaaaatacaaaaattactaaaagtaaaaaattagctgggtgtggtggtgcacatctgtaatcccaactattcaggaggctgagaacccaggatttggaggctgcagtaagccaagattgtactactgcactccaacctgggcaacagagtgagactctgtctcaaaaataaagtagggcagagaatcaaaacatatccattacctgatgatgatgaatagataaagtatggtatatccacacagtggaatattatttggccataaaaaaagaagtactggctacacatggtggctcatgcctgtaatccaagcactttgggaggctgaggcgggcagatcacgaggtcaggagatcgagaccatcctggctaacacagtgaaactccatttcaactaaaaatacaaaaaattagctgggcgtggtggcacatgcctgtagtcccagctacttgggaggctgaggcaggagaatcgcttgaacaggggggcggaggttgcagcgagccaagattgcaccacagcactccagcctgggtgacagagtgagactccatctccaaaaaaaaataaaaaagaagtactgttaagagctacaacatagatagactttgaaaacagtatgctaagtgaaaaaagccagtcacaaaagaccacatgtatcattccatttataggaaatttctataataggcaaatcaatagagacagaaagtagattagtggttgcctagagatgggtaggttgggaggaaataggaagttgactgccaatgggtatggagtttcagtttggtgtgatgaaattgtgctaaaattgattgtatcgatgggtgaacaactttgtgaatatactaaaaatgattgaattgtaggcttttgttggctgaattgcacggcatgtaaattatatcaataaagctattaaagagaatcagtattacttgccataaatagaatggaaactaaaaatgacttttttttttttttttgagatggggtcttgctctgtccccaggctggagtgcagtggcacgatctcagctcactgcaacctctacctcccaggttcaagcgattcccctgcctcagcctcccaagtagctgggattacaggcacgtgccaccacacccggctaattttttatattttttagtagagatggggtttcaccatgttggccaagatggtctcaatctcctgacctcatgatccgcccgcctcggcctccaaaagtgctgggattacaggcgtgagccaccgcgcccggcctaaatatgacattattaaacactaactagatacattttatttttcttgaaatgggtctcaatatgttggtcagggtctaaatatattggttaagctgatctcgattcctagactcaagtgatgctcccacttcagcctccagaggagctgggattacaggctggagccaccactgtgcctgacaggaggaattcttatttggtgccagctctctaacacttctaaatcttctaaatccaaagtgcaaggattacaggtgtgagccaccacgcctagccaatctccctctcttttattcaaagagtgtacagtgctgggcatggtggcacatacctataatcccagctacttggaaggttgaggcaggaggatcacttgagcccaggagttggaagctacagtgagccgtgattgtgccactgtagttcagcttgggtgacagagtgagagtccatctctttaaaaaaaattttttaaacgacttttttcttaagttactgaggataggaaagggaataatttttttaattctgtgattcagtgtttttgtctatctccagtcaaattgcaaatgcctgcagtacccatcccacacttgggacaaacagacacaagatgtgaagctgggcacggtgctcacacttgtagtcccagcactttcagaggctgaggtgggagaatcacttgagcccaagagttggagaccagcctgagcaacaaagcaagacctcctctctacttatgttaaaaaaaaaaaaaattagccaggtgtagtggcatatgcctgtagtcccagttgctggggaggctgaggcaggaggattacttgagcccatgagtttcaggctgcagtgagccgtggtcatgctactacactgcagcctgggtgacagagcgagaccctctctcaaaaaaaaaaaaaaaaaaagatgtaaagctgaagtacaccacccagaatgtgacatatgccccttccatttaagcaataagcaattctttttcatcttattttattttattttatttttttgagagggagtcttgctctgtcgcccagactggagtgcagtggcctgggttcacgccattctcctgcctcagcctcctgagtagctgggactacaggcatccaccaccaccacacccagctaattttttgtatttttagtagagacggggtttcaccgtgttagtcaggatggtctcaatctcctgacgtcatgatccgcctgcctcggcctcccaaagtgctggggttacaggcgtgagccaccgcgcctggcctccttttctctcttttttccttccttccttctttccttccttttctttctttctttccttccttctttctctctctttcttttctttccttccttctttccttcattttctttctctctttctttccttccttcctactttctttccttcttttctttctctctttcttctttctttcctttcttccttctttctttcttttctttctttccttccatctttctctccttttctttctttatctttccttccttctttccttttcttgctttccttcttccttccttttttccttcttttcttttttttttcttttgagatggagtctcactctgtcacccaggctggagtgcagtggcgcgatctcggctcactgcaagctccgccccccggattcatgccattctcctgcctcagcctcccaagtagctgggactacaggcacccgccaccacgcctggctaatttttttgtatttttagtagagacggggtttcaccgtgttagccaggatggtcttgatctcctgacctcatgatcagcccgccttggcttcccaaagtgttgggattacaggcgtgagccactgcttcggcctcttttttttttttttttttaggagagagagtctcactctttttgcccaggctggtgcaatctcggctcacacaatctccacctcccagattcaaacgattctggtgcctcggcctcccaagtagctagaattacaggtgcacggcaccatgcccggctaatttttatatttttagtagagacggagtttcaccatgttggtcaggctggtctcaaactcctgacctcatgatccacccacctcggactcctgaagtgctgggattacaggcgtgagccaccgcacccggcatttctctctctctctctcttttccttctctctcctttcttctgtctttccttccttcttttctttatttctctttctattcttccttccttctttctttccttcttttctttctttctctttctttccttttctctctttctttctttttttttttcccagagtctcactctgtcgcccaggctggagtgcagtggtgcgatcttggctcactgcaagctccgcctcccgggttcacgccattctcctgcctcagcctccccagtagctgggactacaggcgcccaccaccatgcccggctaattttttgtattttacgtagagacagggtttcaccgtgttagccaggatggtcttgatctcctgacctcgtgatccacccgccttggcctcccaaagtgctgggattacaggcgtgagccaccgcaccaagcctttttttttttctttcgacaaagtctcgctctgtcgcccaggctggagtgcaatggcgcgatctcagctcactgcaacctctgcgtcccaggttcaagcgattctcctgcctcagcctctcaagtagctgggattacaggcgtgcaccaccacgcccggctaattttttgtatttttagtagagacagggtttcaccatattggtcatgctggtcttgaactttttttttttttctggacagagtctcactctgttgcccaggctggagtgctatggtgcggtctcggctcactgcaaccactgcctcccgggttcaagtgattctcctgcctcagcctcccgagtagctgggattacaggtgcgtgccaccacacccggctaattttttgtatttttagtagagacgggggtttcaccatgttggccaggctggtctcgaactcctgacctcgtgattcacccgcctcggcttcccaaagcactgggattataggcgtcagccaccgcgcctggccctggcccttctttcatgttttaattcgaggcagctttgcatgtactaagttttcaaaagtacgtgcatttttatctatactctgacacacacccaattaccaaattgtgttcacagctctgtcagactcactcacagatttagaatctcctcagggacttggtcttaattgaagacaaatgaggtcccagatgggctttttgtcctaaaggtcagctggaatgtgggaggaacaatttcagcacaagagcaagttgaaagttgcttcatcttttcaggtgatactgtggctgacagtatttactgttaaatggagtggaagtgagaaaacaccacagaagggggcacctagattcgaaccggggacctcttgatctgcagtcaaatgctctatccctgagccctaccccctctacctgtaataagcttcttccgtgtccacttacggtgactcaatacaatcaagttccacccacacgagttctggcaagctttgtgttctaaagccccaccttcttaattatccatcatctgctttggcttttcccttggccaccaataaactgaaagggaacacttgaaaaatgacatcctgggccgggcaggtggctcacgcctgtaatcccagcactttgggaggccgaggtgaggtcaggagttcgagactagcctgaccaacacggtgaaaccccgcctccactaaaaatacaaaaaaattagctgggcatggtggcaggcaccagtaatcccagctactagggaagctgaggcaggagaattgcttgaaccccgggaggcagaggttgcagtgagctgagatcacactactgcactccagcctgggctaacagagtgagtctctctctccttctctctctctctctatatgcatatatatatacataaacatatatatatatacataaacatatgtgtatacacacacacacacacacacacactcacacacaaacatatatatatgtttagtaaagacagggtttcgtcgtgttgcccaggctggtctcaagtgatccacctgcctgagctcaagcaatcctcccatctcggcctcccaaagtgctgggattacaggcgtaagccacggagcctggcctttgctccgttcttttttttttttttttgagacggagtcttgctctgttgcccaggctggagtgcagtggcgcgatctcggctcactgcaagctccgcctcccgagttcacgccattctctcgcctcagcctcccgagtagctgggactacaggtgcccgccaccaagcccggctaatttttttgtatttttagtagagacggggttttagtgttagccaggatggtctcaatctcctgaccttgtgatccacctgccttggcctcccaaagtgctgagattacaggcgtgagccacagcgcccggccctttgctctgttcttgatggaaacaatagccagctctgacctggggccctgctgatagctggggaagtgctttattgaggttgagtagtgtggctccttcttatcccactggtaggggagaactgaagcccctcctttcaaacctggcactcgttggtatggagtgcaagggcgtaggcctgagaagccctttctcctctcaccttctctccagagggaagagaagctgagggtagaactggctccatcctctaatctcagggaagaaacagcacacgtggagacacaaattaatttttttaacgtaaaataacactaagagttcatctaaacatttgtcttagaaattcaggtcgatggctatgaagggaaaagatgctgttagaacagagggaagtgggtgacctctccgaagacggacgtgctctgacggagggctggagtgttcctgcggtagccaaaccttccattgaacccatcgatcggtttcagatcagcattgtagtggtcatgcccagtcacctgctggagagaatgcccttggggacaaggagagagaggcctgagcctgcattcagcccacctcttggcttccccattcccctgggtgtggtatgggatgccaaccaggcgtagtcacttgcattccccatgctgaacacgcaatccacaagtgtcctgagactctgggctgaaaagccaagggctggtgaggttgaggggcagaaggcttcctagaaataaaaccccgcaccaggaataattgcaggaaaactgtgaatggtttgtgctgggacaggaagggccagaaattctgggcttggcaaagcttgcctttctcccacaagaaatgagaaaaatctcacccttgcctctgacccatgtggaaaaaatggatgagatcaagatcaattgagccaaatggcacaaagtatcatgtgactagaggagtggcccaggatggtggagccaggctgggaggagggtttaccctgttagaaaaatatctctcaactctttcccattgttgttaacctgggcctggaaaatgagcaggatgcagcagtgaggggaacaggggcttcagagttgggaagagcagaatctttttgtttgtttgtttttgagacagagtcttgcactgtcgcccaggctggagtgcaatggcgcaatctcggatcactgcaacctctgcctcccgggttcaagagattctcctgcctcagcctcctaagtagctgggattataggtgcctgccaccacgcccggctaattttttgtatttttagtagagacggggtttcactatgttagccaggctggtctcgaactcctgacctcgtgacccgcctgcctcggcctcccaaagtgctgggattacaggcatgagccactgcaccaggccaggaagagcagactattaatcccagctcagccctcttgccaaattactttaactcaagaaacttgttttcctacctgtgccatggggttagtgtgagggtgaaaagtgcccaacaaatggctcatgtctgtaatgccagcactttgggaggctgaggccagaggatcacttgagcctaggagttcaagaccagcgtgggccacatagggagactccatctccacaaaaaataaaaaattaactgagtgtggtggtgcacacctgtgggcccaactgctcaggaggctgaggtgggaggattgcgcaagcccaggaggtcaagactgcagtgagtagtaattgtgctactgcatttctttctttctttctttctttttttttttttttttttttttgagatggagtctcgctgcatcgcccaggctggagtgcagtggcacgatcttggcacactgcaacctccgcctcccgggttcaagcagttctcctgcctcagcctcccaagtagctgggattccaggtgcgagccaccacgcctggctaattgtttttttgtatttttagtagagacagggttcaaccaggttggccaggctggtttggaactcctgacctcaagtgatccacccgcctcagctcccaaagtgctgggattacaggcgtgagccactgcacctgtccgtgctactgcatttcatgcattccagtttgggtgatagagtgagaccacgtctcaaaaaaaaaaaaaatgaggtctgacatacagtactggtgcttattaactaatattagggggcactgtggcaccatctgctcatgtatgtgaagaaaagctggaaggatgcagtccctttgcctcttcccctcaaccaggccttgctatggcccaggaaccatgatgaggctagaaatggaggcagcacttgcctgtccctgcccaatttctcctgttgaggtatctttgtccttgcccgaagatgtggatgtagtctactatccagccatcccttcctgtaccgccatgatcctgaaagtgggcaagagaaagtgggcaagaacactgtcagccacaatgctgagggggacacagtgcaaactgccctggggtttgctgtggggatagggaagaggtcagagccttaggtaactggtgcagacagattaaatatatttaagaaccagaccgggtgcagtggctcaggcctctaatcccagcactttggaaggccaaggtgggtggatcacctgaggccaggagttcgagaccagccttgccaacatggtgaaaccccatctttaccaaaaatacaaaaaattagctgggcatgatggcaggcgcctgtaatcccagctgctcaggaggctgaggcggtacaattgcttgaaccccggaggcagaagttgcagtgaaccgagatcctgccattgcactccagcctgggcaacaagagccaaactccatctaaaaaaaaaaaaaaagaaaaaaagaaaaagaaaaagaagaacctattgcctctccgggaggggcagttgagcttggcagctgaaggctcagtttctgctgccagacaggctgggttctaactccagctcaaccattaacaggctttgtgaccttgggccaattacacagcttctctgggcctcagttttcccatcggtaaaaggagtattgctgtgaggtttgttttttgagacacagtcttactctgtcacccagactggagtgcagtgttgccatctcggctcactgcaacctccgcttcctgggttcaattatcctgcctcatcctcctgagtagctgagattacaggcacgcgccaccatgcccggctaatttttgtatttttagtagagacagggttcacatattggccaggctggtctcaaactcttgaactcaagtgatccacccgcctcggcctcccaaagtgctgggattacaggattgagccactgtgcctggcttgctgtgagacttaagtgattttgttcagataaagggcctggcatagtaaagtttaataaatgttatctttatttaaatgaaaataatacctaccacaaatggtggttttgataattaaataatacttttaaaaattaaacagattggctgggagcagtgtaatcccagcactttgggaggccaaggctggaggatctcctgaggtcaagagttggagactagcctggccaacatggctaaacccggtgtctactaaaaatacaaaaattagccaggtgtagtggctcatgcctgtaatcccagctactcaggaggctgaggcaagagaattacttgaacccaggagacagaggttgaagtgagctgagatcgtgccactgcactccagcctgggcaatagggcgagactccacctcaaaaataaaataaaataaaataaaagattagctgctgggcatggtggcacacgcctatagtcccagctactcaggaggctgagactggaggattgcttgagcccagcagttcaaggctgcagtgagctgtgccactgcacttccagcctgtgtgacagagttgcactctgtctcaaaaaagaaaattagaaagcctttttcaaggccgggtgcggtggcccacgcctgtaatcccagcactttgggaggctgaggcaggtggatcacttgaggtcaggagttcgagaccagcctggccaacatagtgaaaccccgtctctactaaaaatacaaaaaactaactgggtgtggtggcgggcgcttgtaatctcagctattcaggaggccgaggcaggagaattgcttgaacttgtgaggcagaggttgcagtgagctgagatgacgccactgcactccagcctggatgacagagtgagactctgtctcaaaaaaaaaaaaaaaaaaaaaggaaagaaagaaagcattttcaaaatatgtataccctatcattttcaaccttttaaatactcaagttcttccttttcccctccccagactctggttccttctgtcgtaaaattacgagtcgatgccagcatggtggctcatgcctatagtcccagcactttgggaggccgagatgggcagaacacttgagctcaggagtttaagaccagcctgggcaacatggtgaaaccctgtctctgtagtctcagctactagagtggctgaagtgggaggatcgcttgaacacggaaagcagaggttgcagtaagccaaaattatgccactgcactccagccagggtgacagaacaagaccctgtctcaaaaaaaaaaaaaaagaaaagaaaagaaaagaaaaattgggccgggcacggtggctcacacctgtatcccagcacttttggaggccgaggcaggcagatcacaaggtcaggagttcgagaacaccctggctaacacagtgaaaccccgtctctactattttttgtaaaaatacaaaaaattagacgggcgggcgtggtggcgggcacctgtagtcccagctacttgggaggctgaagcaggagaatggcgtgaacccaggaggcagagcttgcagtgagccgagatcctgccactgcactccagcctgggcgacagagcgagactccgtctcaaaaaaaaattaaaaaaaaaattacatgagtcaacacatgtgtgactcatgtatgtccatatacatgcactgcacagacctatgcaaacaaacatttgggactatacacacacacacaaatcccgaagatttgctcacagaataaccccatgagtcttcctgtctcttccccacaccgcttatacgtagaaacacaaatactggaagcaaaatgttgggggaaaaattgaaccatcagcaaacagtctcggaatctttgatctggggggttggtggaggagaactctgctgggaaggggcctacacctaggagggaaaaggccagggggaggaactgaggtccgcagaggtttgagaggtgtccctcccatcagaccaaagaacccggagagcaagccccatgccctgccactatgatgtcacaggaggaaggcgtctcgccctgcaggtcaaatcaattccctttgtcttgctcactgaggtcacacggatttttgcgtatttagagaatttgcggtgtgaggtcaccctagagggcgggtctgtgacgtcacaaaagacaaagacaccgactggtttgggagaagctggctttgagccctatccccttgccttgcagaaacctggaatgagtctattctcaaattcagggctggaaggccattctgtgagctcagggagcttgcgctcaacacctgtcctccctttcctccagtcctcgggctgcgttaagaaaactgggaggcggtggcgggaggatagcgtgagcccaggagttcaagaccagtctgggtaacatggcgagaccccctctctacaaaaaaaaaaaaaaaaaaaaaaaaaaaaaaaaaaaaaaattagcccggcgtgatggcgcgagcctgtagtcccggctaatcgcgaggctgaggtgggaaggttgcttgaccctgggaggtggaagctgcagtgagccgtgatggcaccaccgcactccagcctgggcgagaatcagaccctataattacaggctcacacctgtaacatggcgaaaccccgtctctaccaaaaatataaaaattagtctggcgtggtggcgcgcctgtaaccccagctactcgggaggctgaggcaggagaatcgcttgaacccgggaggctgaggcaggagaatcgcttgaacccgggaggcggaggttgcagtgagccaagatggtgccactcactacgctccagcctgggcgacagagcgagactttgtctcaaaataataataataaataaaaatttaaaaaagaaaagaaagtaaaccgaggaggtgaaagtggcggagccttctttgtggtgagaacgctggagtgaagatttagggaggtgtgtggggtcttccgggaagctcctatacctgatcagttttccgcaaaaggggcggaaccacgtgactctggaagtagctgcgggcgtggtagtcctgctgcgcgttgtagggcggaatcgccgaccacagcttgggcctagagcgcccataagcgcgggcagcggtgctcacagccaccccgtccaagataaagcctttctccagtcgcaggcgacactcgctcaggtacgccatcccaaccaccgtagcctcggagggcctttctggtgggggatgaggaccctagatggggacacccctgcgcattcttacgtgatgtcaacgacccctgcgacacaaaccctattgtctccactcaccccgggttgaccggtgggcccttaaggccgtgggggaagttgcttgcttggccccagaggaggttgaccagactgactatgcaagaggagttggaaagtgaaggggaggagactggataaccgattgtgggcagtttgtgtgcatttaggccccgctcccccagttttcctttaaggtgagtattctcttttcccacggtattacatgctatttcctcagctcagttttgttgaaaagcttgtacccggaattgatcagaaagttcagatcgcacctacttccaattctcattttacagagctagaagttgaagcttagaaagtttccctaggccgggcgcgttggcttacgccagtaatcccagcattttgggaaaacgaggcgggggggatcgcttgggcccaggaattcaagaccagcctgggcaataaagcgaaagtccatctctactaaataaatgaatacttagccgagtgtggtggcgcgcacctgtggactcagctgcactgcaggctgggccatggaggtggaggctgcagtgagccatgattgtgccacactcctggatgagagaaggaggccctgtctcaaaagacaaaaaaaaaaaaaaaaaaaaaaaaaaaaaaaaaggccgggcgcggtggctcacgcctgtaatcccagcactttgggaggccgaggcaggcggatcacgaggtcaggagatcgagaccatcctggctaacacagtgaaaccctgtctctactaaaaatacaaaaaattagccgggcgtggtggcggacgcctgtagtcccagcaactcggaaggctgaggcaggagaatggcgtgaacccgggaggcggagcttgcagtgagccgagatcgcaccactgcactccagcctgggcgacagagcaagactacgtctcaaaaaaaaagaggttccccaaatccagttagctgacttccggtcagtccacttaacaattctcctgccccacccgaattaacattatttatttacttattctttttatttatttatttattttagagacaaagtctcgctctgttgcccaggttgtagtgcagtggctcaatcctggctcactgcaacctgtgcctcccggcttcaagcaattctctgcctcagcctcccaagtagctgggattacaggcacctgccaccacgcccggctaattttttgtatttttagtagagccggggtttcaccatcttggccaggctggtcttgaactcctgatctcgtgatccacccctctcagcttcccaaagtgctgggattacaggcgtgagccaccgcgcccagcctttcacttattctatctatctatctatctgtctgtctgtccgtctatctatctatctatctatctatctatctatctatctatctatctatctatttagagagggagtctcgctctgttgcccaggccggagtgcagcggcgcgatcttggctcactgcaacctccgcctcccaggttcaagtgattattccgcctgagccttccgagtagctgagattacaggcgcctgacactaagcccggctaattttggtatttttagtagaaacggggttttgccatgttggccaagctggtctcgaactcctgacctcaaattatcagcccacctcggcctcccaaagtgctgggattacaggcataagccactgtgtctggcctattatatatattttaatataaatataaaatgtatattttatatttaaatattttatatttatattaaaaatatatatatatattttttaggtgtcacccaggctggagtgcagtggtgcgatcttggctcactgaaacctctgcctcccgggttcaatctattctcctgtgtcagcatcctgaatagctgagattacatgcccgtgtcaccaccccagactaaatttttttttttttttgaaatggagtctcactgtgtcacccaggctggagtgcagtggcaggatctcagctcactgcagcctcccaggttcaagcgattctcctgcctcagcttcctgagtagctggaatcacacgcgcacgccaccacacctggctaatttttgtattttcagtagagccggggtttcaccatgttggccaggctggtctcgaactcctgatctcaggtgatccacctgcctcggcctaccaaagtgctgggattactggcgtgagccatcctgccccgccacccagctaatttttttttttttttttttgagacagggattcactcttgttgcccaggctggagtgcaatggcgcgatctcggctcaccgcaacctccgcctcccaggttcaagcgattctcctgcctcagcctccctagtagctgggattacaggcatgtgccaccacacccggctaattttgtatttttagtagagatggggtttctccatgttggtcaggctggtctcgaactcctgacctcaggtggtctgcccgcctcagcctcccaaagtgctgggattacaggcatgagcgaccatgcccggccattaatttttgtatttttattattattattattttttttgagatggagtcttgctctattgcccaggccggagtgcagtggtgtgatcttggctcactgcaacctctgcctcctgggtttacaggtgcacgccaccacgcctagctaatttttatatttttctagatacagggttttgccaggctggtcttgaactcctgacctcaggtgatttgcctgcctcggtctctgaaagtgctgggattacaggcgtgagtaatttttgtctttttagtacagatggagtttcaccatgttggccaggctggtctcaaaattctgacctctagtgatcctctcgccttggcctcttgccaaagtgctgggattacaggtgtgagtcaccatgcccagccccacccgagttattttcacccgctattatttatgcttgtttttttcccctcgagacatggtttcactccaatttcccaggctggcatgcagcgttgcgatccggaatcactgcaacctctgcctcccggactcaagcgattcttctgcctcagcctccaattagctgggattacaggcacacgccaccaggcccagctaattttcgtattttttgtagagacagggtttcgctgtgttggccagactggttttgaactcctgagctcaagtgatcagcccaccttggcctcccaagctgggaggattagagccatgagccaccaggactggccttatctttcctttaaaataacaaaacggtggggggacacattaccatatttttcctccagctaattttctttttctttttcctttagtttccacatacagcattggatctaggtaattatataaattacatattttattattttatttatttctgagacagtgtcgctctgtcgcgcaggctgcagtgcagtggagcgatctaggctcactgcagccaccgcgtcctgggttgaagccattctcctgcctcagcccagagtagctgggagtacagatacacacaaccacacccagctaattttttttgtagagacggaggtgttttttttgtttgtttgttttttgggtttttttttttttttttttttttgagacagagtctcgctgtgtcgcccaggctggagtgcaattgcgcgatctcggctcactgcaacctccacctcccgggttcaagtgattcttctgtctcagtctcccgagtagctggagttacaggcacctgccaccactcccagctgattttttaattttttttgagacagagtctcgctctgttgcccaggctggagtgcagtggtgcgatctcggctcactgcaagctccgcctcccgggttaacgccattctcctgcctcagcctccccagtagctgggactacaggcgcccgccaccacgcccagccaatattttgtattttgtttagtacagacagggtttcattgtgttagctaggatggtctcgatctcttgacctcgtgatccgcccgccttggcgtcccaaagtgctgggattacaggcatgagccaccgcgcctggcctaatttttatatttttagtagagacggggtttcaccattctggccgggctggtcttaaactcctgacctcgtgatccgcccatctcagcctcccaaagtgctgggattacaggcgtgagccaccatgcccggccttgttttttttttgttgttgttttttgtttttgttttttctttgagatggagtttcactcttcttgcccaggctggagtgcaatggcacgatcttggctcactgcaacctctgcctcctgggttcaagcgattctcttgcctcagcctcccaagtagctgggattacaggcatgtaccaccacagccagctgattttgtactgttagtacagacagggtttcaccatgttgatcaggctggtcttgaactcctgacctcaggtgatctacccgcctcgacctcccaaagtgctgggattacaggcgtgagccaccacggccgttgttttgttttttgagacagagtctggctattgtcgcccaggctggagtgcaatggtgcgattttggctcactgcaacctccacctcctgggttcaagtgattctcctgcctcagcctcctgagtagctgggattacaggcgcccatcaccacacccagctaatttttgtatttttagtagagacgcgtgtttcgccacattggccaggttgatctggaactcctgacctcaggtaatccacctgccttggcctctcaaagtgttgggattacagccgtgagcctccgcacccagccgagatggaggtttttttaattttttttgagacggagtctcactctgtcgcccaggatggagtgcagtggcacgatcttggttcactgaaagctccgcctcccggtttcacgccattctcctgcctcagtctcctgaatagctgggactacaggtgcccgtcaccatgcctggctaattttttttgtatttttagtagagacggggtttcaccgttagccaggatggtcttgatctcctgacctcatgatctgcctgcctcggcctcccaaagtgctgggattacaggcgtgagccactgtaactggcctgttttgtttttttcatagagacagtcttgcccaggctggagtgcagtagtgtgatcattgctcactgtagccttgacctcctggcctcaagtgatcctcccacttcagcctccagagtagctgagactaaaggtacacaccaccacacccggccaatttttgcgtgcctgtagctagacttcagaattgctcatctcagcctccagagtagccgggataataggcatgctccactaggtcttgtagtgaatttactatttttttatatttactactatttttattatgaaagtacatgtattactgttcaagttgcaagctactataaatcagatctgatatcttgaatccattctattaaaacttttacctagaaagaacttgcagaatataaacagtgacaaaggaaacaatatatatatatatatatctggccgggcgcagtggctcacacgtgtaatctcagtacttcgggaggccgaggggggcggatcacctgaggtcgggaggtggagaccagcctgaccaacatggagaaactcggtctctactaaaaatacacaattagccaggcgtggtggtgcatgcctgtaatcccagctactcaggaggctgaggcagaagaatcacttgaacccgggaggcggaggttgcagtgagccgagatcacaccattgcactccagcctgggcacaagagcgaaactcggtctcaaaataaaaaaatgctaaaaaaaaaaaaaaaaaaaaaaaaaaaaaagatacaaaaatcagcctagcgtggtggcgggcacctgtagtcacaggtactcgggaggctgaggcaggagaatcgctagaacccaggaggcagaggttgcagtgagctgagattgcaccactgcactcaagcctgggcaacaagagcccaggagtctcttggagcccaggagtgagatggagtctccctggctcactgcaacttccgccactgcaacccctgcctcttgggttcaagcaattctcctgcctcagcctgcggagtaattgggactacaggcacgcgtcaccacgcccagctaattttgtatttttagtagagacgagatttcaccatgttggccaggctggtcttgaactcctcacctcaggtgatcagcccatctcggcctcccaaagtgctgggattacaggtgtgagccaccatgcccagctgacaaaggaaaacatttagtgaagtgtaaatataaagttttttaatccaagtcaaaaaaaatctccaaagaataaaatgtgaggtgggatgcagtggctcacacttgtaattgcagccctttgaaggccacagcaggaggattccaagtccagcagttcaaagttacagtgagcttcagtggtgttactgcactccagcctgtgtgacagagcaagactgcctcagaaaagataacattcaaaaacagcagcgattagtggttaatatataaggatcatatattgccataatatataaagacataaatggtgggcctaggggcttgtcacactaaagctgacttgaaattgaccatactcagggatgttatggtgtaactctctaaaactagagatttaatacattttttttctttccccccagagtttcactggttgcccaggctggagcacaatcgtgcgacctcagctcactgcaacctccatctccggggttcaagcaattctcctgcctcagcctcccaagtagctgggattacagcatgcaccaccatgcctggctaattttgtatagtagagatggggtttcaacatgttggacaggctggtctcactctcctgacctcagatgatccacccacctcagcctcccaaagtgctgggattataggtgtgagccaccgtacccaggcgagatttaatacttctaaaaccaagcctggttcagtctagacagggtactggttctcagtcttgggtataccttgacatctcctgggagcttcacaattctgatgtctgagtcctattctgcagtctgacttaattggtctagggtatggaccggaaacattttcaaaagctccaggttagaacaactcctctctaggtctggtacattccataactagtcatggaagacactaagggtagtcctttttgataccaagtggagcttgtattatacccaacttacaggtagaaacatttatggctgagtatttgcagatacagatacataaacacaaaccttaatctaaaaaccctgtttagtccacttccctccaaattattgttctaaacaaacacccatttttccaaaacgctgggtgtcacctaaataaactcttacacgtttagaaagaaatgctaacaacctcctaccttaaggccaagtcccttattatcagcgctttatgcctgttcagttggcaaaaatttaccacattcttccattctcaaactagagcttggaacataaattacacgatcatcctgtttgtcaaaacattttcatagcaaaatacctgtaggtaccatcaacttaatcatcttccactatgacagtaaacctacatggcaattactgttgttttataaatattcaatttactccaaatctgttaactgctaaaatgtacatacataaacaaactcacatcattcctcaaaatccatgtgtgtgtccaggatctaactatatagtctatcttaacttcaatgcctttttttggggcgggggcgggaacggaatcttgctccgttgcccaggctggatggagtacaatggtgcaatctcgactcgctgcaaactccacctcccaggttcaagcgattctctcagtagctgagattacaggcggtgcgccaccacgcccagctaatttttgtatttttagaaaagaggaggtttcaccacgttggtcagcctggtcttgaactcctgacctcatgatctgcctgccttggcctccgaaagtgttgggattacaggtgccagctaccgcgcccagccatttgaatgccttcctcactccaggagaagctaccatgtatagccagtcattgagcagtatctactattatttttgggactcaaaacccaaataatactttttgaggccaaaattgtaaatacagcaattggaagatgctgaaagtctgcaaactcacaaaaaagcaaggattgctttaaaaaaaaaatgcccagagtttccatttcagaaaagtgatggtcagggtatgtcaaaaacactgtagaggcctgggtgggcagatcacttgagatcaggagtttgagtcgtttggcaaacatggtgaaaccctgtctccaccaaaaatacaaaaactagccaggcatgacggcaggtgcctgtaatcccagctacttaggaggctgaggcaggagaatcgcttgaaccctggaagtgaacagggagacaagcactgcaaacaaatactttttaatgggtttagtttttttttttattttttacaaatatactggagaatcatgcaatgctgccagcattggatgcaatccggggccacaagtctgcacactcctttgctactggtcctgtaatggcagaacctgcattaaaaaaataaaataaaataaaataaaaacatgtgggggacagattaagacatcgtcaaacacagaagatccttggcctgtacttctagacaatccacccaacctcagagacctaaggaacaagctggactgatttcctacctttcatctcgcctttattgttcactatgactcctgcattatcttcaaaataaagaaacacgccatcttttctacggtatgactttcgttgtcgaatgaccactgctggatgtactgagagaagaaaaaaggacagcagtcattaacctgtcaagtcgcagtgccaccacaaaagcagtttccaactagacagaatgtacactcagcgtttgagacagtgacagtgtaaatatcaatcttcaaggtgatcctcccacctcagcctctctagtatcttggactacaggtgcacactaccatgcccagatttttttttttttttcatagagacagggttttgccatgttggcaagcctggcctcccaaagtgctgggagtatagggagtaaaggcatgaaccacgatcatctattcacatcttaaaatcaaagctgccagtattttctcacaagtgtaaaactctcaggacaactatccttgcctatgccttttccaacttcaccttacaggtaggttattaagatcccagtatcactgaattgggatgtagaaatgggacctgggacccccaactcctcccagtcctggcaatgagcagagaccaagctattcagatttacactggaaaacagtttgaattcctgggcccaagcaccaggctttgttttacttttaatgaactgttttctagtgtcctaagtaacttttatacccatctgtactaaagtgaaaaagacgcttttcccaactttcaaaatgaagtatcactacacagtgaaatataatgcttgtgaagaactattgtagagtcagacacacctggattcacaatcttcactgatactagcatggggtccttacacagaatttttatgacaggaagactacacaaaaaatagataagtctaaccaagttagtaatgggacacacatgaggtagccaatacttactgactgaccctcctctactcataaaccatttaatcctcacaaattcttcaagtagacctggtccttttgcatatttctgtgcttgttatttattgatattaagttccaaggggaggggatgtattcatttagcagaaacaaggaccaaaaaagacattaacagaattggaaactcacaactagttttaaaactgaagtgttcggagctctggtctgtcccaccactgactgagaccaacaatccaccctcctgccatctcatctacaaagtgaaggccatttgctctgctcttctctgacagctccctgggccaccaatcagacccaggaagtgttctgagaagaggaaaaagcccatgcaattgctgaatcacaatcacagtgctacccagccctcaaatggatattaatggtgaacaaaaaacaatttctaacccaaaggctaaaaatctactggacagcatcgtggggtggatacaggaataggagtaactgtaatacagggctgacaaatcaacatcacatttgtaaatcaagggatggccaggaactctttagaagagcaagacatcccagggtagagacagattaggcaggcacaggaaaaaagtgcaagcgctgaagttaaaatgcaccaaacaccagaagttctaaagccagacaggacacaagctgcaagtattttgaggcctccccctttaaatcatacacctgacaggaaaaattttgagtggggagcctgagattaagtaatgagcaattagccgggtgtggtggtgcacacctatgatcccagctactcgggaggctgaggcaggacaatctcttgagcccgggaggtggaggttgcagtgaacagatatgtgccactgcactccagcctgggcaacaagtgagactccatctcaaaaacaaataataaaataagcaacgggcagcttgttttcgttttgtaatatatttttttttgagagcccaggaggcggaggttgcagtgagccaagatcgtgccattgcactccagtatgggctgggcgacagagagagactccatctcaaaaaacaaaacaaaacaaaacaaaaacaacaacaaaaaaacaactaaggtatggaagtgacaagatgatggtcccccctccaacacaatatgagcaaaaacttaagatacttatctcacactgcctctcaatggaaaacaaacttgaggccttgaaaactgatccattttccaataaaggaaagcgtccccccactactcatcagtattaaggtgggctcagtgtttactcacccttttttctgagctctggtttgcctttcttgactgtggccatcaccatgtcacccacaccagcagcgggaagtctgttcagccgtcccttgatccccttcacggagatgatatacaggtttttggctcctacaaaagaatgtaaataaaaataaaaaatgttgagggccatcaggccgttccatcagtataacatttcccaaacacttccaaagcccctccctccactcactgcccaagcagttagtccgcaagaacgccttgtcacaccaccgattgaagcaaacaacacatgttgccacttcacccaaaagcgatgttttcactctcccctttcttgacggctcaataggtcattagccacaggcccattgagtgcttttaaaagggggagtatagcaacgtgcaaagacctcacctgtgttgtcagcacaattgattacagctcctaccggaagacccaaggaaatccggaatttcgcaccagaggacccaccacgtcctgtggatataaagggaagggaaacaggataaagagatcacaatctagacatggttcggagttccccctcatactcaagctgtaattcaccgcacatgctttgatagactgtacgctatagattagctcgctcggattttacttatgccgtccccatgtgccacccgattctcacggaaagtagcctatttcttactattaacactctgacatcgaaattaagaaacctagacgactcaacccttgctctaactttcgcaaaacgcaattactcctgcaaggcataaaaccgcagaggtcgcgcaaaccagggcctaatccagtctaacttcaaccccattacgatagccctattcgcggagcgatctcgcggtatccagactacattcacgtcgggatcctgccatctcaactctccagcaccccactgccactttcgagggccctggcagtgctctcgcggtggcctggctctctctctccggcctgaaggagagcaaagcgccccagctgcctagggccaccgctcctgacgaatccgccagccactgcacgacagatggtggaggatcctccagaaacaaaacctcacctcgcttcgacatcttgaacgccggaaaaaagaaaaaaggaagtcgattcaaaggacactgggatatgaactttaacgccccgcccaccctcctcacgtggccggagcaaaaaccggcctcttccgcctctgggcgctgccttattacgtaataagtttacgacgtcgcttttagccctctctgcgaagtgggagttgaggtagaagcgcaagagataggaagtatcttctctacgagcttaagagtagttagggacatggaaacagtgatttgttaacttgctcacgacctcttttgaccacttaatagtgccaggcacttatctgcacactagagaataggaattaaaacacggtttgtgccgtgtgggggttccccaaggaacaaagaaagtgggggagggagggagaacaagctctaaacggtttcgttgaatgtaatacagttgagaagtgctgcagatcattccatctatgtgttcttggtatcataccattctgtattttacatatacagtattgctctatttattgacccgtcccccccaacacacactctttttttctttttttgagaccgagtctcactctgtcgcccaggctggagtatagtggcgagatctcagctcactgcaacctccgtcttccgggttcaagcaattctctgtctcagcctcagagtacctgagaccacaggcgcccgccacaacgctgggctaatttttgtatttttagtagagacggggtttcgccatgttattggccaggctggtctcgaacttctgatctcaagtgatctgcccgccttggtccctcaaagtgctgggattacaggcgtgagcccccgcgccaggcctaattgctcctttcacagcttcagccgccccttattctctgggttctttccttcccacgatacattaattcacatacttattgagctcctactttacagcaggttctgtccagggcgtacagcggattacatcagagaacaaaatagatcaacattcttttccttatggagcttacattctgctggggtgcaggtggaggaggatattagacactaaacaaaagatataataagtaattgcagtatgtagtatgttagatggggatatgtattataaaaatataaatagtatcgcttctcggccttttggccaagatcaagtgtaaaatataaatagtggccgggccttgtggctcacgcttgtaatcccagcactttgggaggccgaggcgggtggatcacgaggtcaggagatcgagactagcctggccaacacagggaaactccgtctctactaaaaatacaaaaattagctgggcgtggtggcgggcgcctgtaatcccagctactccggaggctgaggcaggagaatcgcttgaacccagaaggcagaggcggcagtgagccgagatcgcgctactgcactccagcctgggcgacagagctagactccgtctcaaaaatgtatatagataaatagctctttgaggaagacgcggtcgtaggtgttgcggatcgctgatccgcacgctcctgctactgactcaccgctgttcgccctcgccgaggaaccagtcgctcaggaagccgcgcagcagccatggcttttaaggataccggaaaaacacccagggaggcggaggtggcaattcacgaattcgagtcactctaacgagccgcatcgtaaaatccctggagaaggtgtgtgctgacttgatcagaggagcaaaggaaaataatctcaaagtgaaaggaccagttcgaatgcctgccaagactttgagaatcacttcaagaaaaactttgtggtgaaggttctaagacatgggatcatttccagatgagaatccacaagtgactcattgacttgcacagtccttctgagattgttaagcagattacttccatcagtattgagccaggagttgaggtggaagtcaccattgcagatgcttaagtcaactattttaataaattgattaccagtttttttttctttttcttttctttcttttctttctttctttcttttttttttttgagacggagtttcgctcttgttgcccaggctggagtgcagtggcgcgatcttggctcaccgcaacctccacggccgatatctatctatctatctctatctatctctctctctctctctatctctatagagatatatatctatagagatagatagagatatatctatctctatgtatttatctatattaaaaacaactggtaatcggccgggcgcgctggctcacgcctgtaatcccagcactttgggaggccaaggcgggcagatcacctgaggtcaggagttcgagaccaacctggccaaaatggtgaaacctcgtttctacaacaatacaaacattagccaggcgcagtggttcacgcctgtaatcccagcgccttgggaggccgaggcggtcggatcacctgaggtcgggagtttgagaccagcctgacgaccaacttggagaaaccccatctctactaaaaatacaaaattagctgggcgtggtggcacatgcctgtaatcccagctactcaggaggctgaggcaggagaatctcttgaaacccgggaggtggaggtttcagtgagctgagattgcaccattgcactccagcctgggcaacaagagcgtttgaaactctgtctcaaaaaaaaaaaaacaaaacaaaacaaaaatggggccaggtgtggtggctcatgcctgtaattccatcactttgggaggccaaggtgggtgtattacttgaggtcaggagtcagagaccagcttgccctaaatagcaaaactctgtctctactaaaaatacaaaaattagcaaggcatggtggctcatgccggtaattctagcactttgggaggccgaggctggtagactgcctcagctcaggagctgaagacccagcccaagcaacatggcgaaaccctgtctctactaaaaatacaaaaaattagccaggcgtggtgcgtgcctgcagtccccagctactcgggaggctgaggcacgagaatcactggaacccaggaggtggaggttgcagtgagccgagatcgcgccagtgcactctagcctgggtgacagagcaagattccgtctcaaaaaaaaaaaaaaaaagatattgacatgaaaccaggcacagtggctcacatctataatcccgaaacaatttgggaggttgaagcaggaggatcccttgagcccaggagtctgagacctgcctgggcaacatagggagagtccatctctacaaaacatttaaaaattagctggtggcggctgggtacagtggctcatgcctgtaatcccagcactttgggaggctgaggcaggcagatcatctgaggtcagaaatttgagaccagcctgcccgtcatggtgaaaccccatctctactaaaaatacaaaaatcagctgggcatggtggtgggcaacctgtaatcccaagtacccaggaatctgagacaggagaattgtttgaagccgggaggcggaggttgcagtgagcccagattgcgccactgcactccagcctgagcaacagagcgagactctgtcttaaaataaaataaaataaaataagctggtggcatgggaatctgaggcaggagaatcacttaaacccaggaattggggactgcagtgagccgtgattgcaccactgcactccaacctgggctacagagagaaaccctttgtcattttccaataaaaagccctaaggcaggggtgtgactgaaccgaatgagcaccagcaaggaagccagatgtgactggacaggacgagtaaagagcaaagtagtaagaaatgcagtcagaagtaatggaacggtggctcacacctgtaatcccagcactttaggaggccaaggcaggtgataacctgaggtcaggagttcaagaccagcctggccaacatggtgaaaccctgtctctacaaaaatacaaaaattaaccatgcatgatggcaggtgcctgtaatcccagctacttggtgggttgaggtgggagaatcatgtgaacctgggaggcagaggttgcagtgagccgagatcacaccattgcactccagcctaggtgacagagcgagagttctgtctcaaaaaaaggaagtcatggaatgaaaccactgtggactttggcattggctgagtgaaatgaggaaacattctttgattttaagcagaggagggacatgatttgactaatgtgtcagaaggatcactgtggttgagttgttgagactacactgtgggagaggacacagggatagaagtaagaagatccattaggaagctattgcagtaacccaggagagaaatgatggtggtttggactagaatggtagtagtggatgtaatgtagtcagattctggatgtgttttggaggtagagccaataaaatgtggggtatgaaagataggaatcaaaatgtctccaagtctttaggcctgagcaattggaagatatcattgccgtcaaccaagatggagaaggctatggttataggaggaatagtgttcctggttggtactaccaccagtgtctcaaccaaaaaacagggacacaattaattctcttctcccaggctcctagaagtagtcaccaaggtctatcaacttgactctgtttcctaaatttttctgcccatgccttccacgttctgcctttgtttcaaagctattgcatcggcctctatatggtcagaccataatttcccactgcttaaaatcatgtgctggccaggcatggtggctcacacctgtaatcccagcactttgggaggccgaggcaggcagatcacccgaggccaggagtttgagaccagcctggccaacatggtgaaaccctgtctctaataaaaatacaaaaattagtcaggggtgatggcacgcacctgtgatcccaggtattcaggaggctaagcagaagaattgcttgaacccaggaggcagagttgcagtgagccgaggttgccccaccgcactccagcctgggcatgcagtgagactccatctcaaggaaaaaaaaaaaaaaaaaaaacaagaaaacaaaacaaaaaacatgtaccgaccctctggtacttatagaatacagtccaagctgtttaagcatcgaagtcacttgaaatggcctacctcttccctggctccatcttctgccaccttgcctcttatatttcacacaccagaaacaccaaaccagttaggatttctggacatatagcttagattcacactttcttgtatttatgcattcacctgctttagccactatgtgttatttatttatttatttattttgagacagagtttcactcttgttgcccaggctggggtgtaatggcaccatctcagctcactgcaacctttgcctccaggattcaagtgattctcctgcttcggcctcccaagtagctggaattacaggtgtacaccaccatggccagctaatttttttttttttttgtatttttagtagagatggggattttaccatgttggtcaggctagtctcgaactcctgacctcaaatgatccacctgcctcagcctcccaaagtgctaggattacaggtgtgagccaccatgcccgtccaacctgttctttaaaactctgctcaggtatcatttcttctctgagccgtttcacaaccccagcagtttattctctgagccacttctttactaggagctgtggttctcaaatattttcattttagacccctttacactcttttttttttttttttttttttaagacagaatctcactctgtcacccaggctggagtgcagtgggaccatgttggctcactgcaacctccatctcctgggttcaagcaattctcctgccttagcctcctgagtagctaggattacaggcgcccactaccacgcccggctaatttttttatatttttagtagagacggggtttcaccatgttggctagtctggtctcaaattcctgaactcaggtgatccatccgcctcggcctcccaaagtgctgggattacaggcgtgagccactgtgcccggccctttttttttttttgagacgaagttttgctcttgttgcccaggctggagtgcaatggtgtgatctcagctcaatgcaacctctgcttcccgggttcaagcgattctcctgcctcagcctcccgagtagctgggattacagacatgcggcacctcgcttggctaattttgtatttttgttagagatgaggtttttccatgttggtcagggttgtctctaactcctgacctcaggtgatcagcccacctcggcctcccaaagtgctgggattacaggcatgagcctccttgcccagcctcctttacactcctaaattattaaagacctcaaggagtttttgttcatataggttatatctgatgacatttaccatattataaattaaagttaagaaagttattacttcacgtaaaataacaataaacccattttttgctaaagtaaataacattttagaatgaggaataggtcaagtttggtggctcaggcctgtaatcccagcgggaggatcacttgtcctcaggagtttgagaccagcctggacaacaaagtgagatcctatttctacaaaatatcaaaaaattagctaggtgtggtggcgtgagcctatggtcctaactacacaggaggcggaagcaggaagatcacttgagcctgggaggttgaggctacagtgagccatgattgcgccactgcactccaacctgggcaacagagaccctgtctcaaatataaaataaaataaaataaataaatgtaactatatttttccaaacaaaaataatttagtgagaagggtgactttgctttacttatttttttttaaatccctttaatacctggcttgatgaaagaactggtttttcatgtttttacactaatctgttgtgatttcacacatttaatctctggaaatctccactgtattctcatgaaagagcaagagtaagacagaaaaaaaatgacattattattaaaataattctttcctctgcacagaaagggtctcactaatattatcaagaaaataggccaggcgtggtggctcacgcctgtaatcccagcactttgggaggccgaggcgggcggatcacgaggtcaggagatcgagaccatcctggctaacacagtgaaaccccagtctctactaaaaaatacgaaaaattagccgggcgtgatggcgggcgcctgtagtcccagctactcgggaggctgaggcaggagaatggcgtgaacctgggaggcggagcttgcagtgagccaagacgccaagacggcgccactgcactccagcctgggtgacaaagtgagactccatctcaaaaataataataattattattattattctggctgggcgcgggggctcacgcctgttatcccagcgctttgggaggccgaggcgggtggatcacctgaggtcaggagttcgagaccagcctgaccaacatggagaaaccctgtttctactaaaaatacaaaaattagccgagtgaggtgccgcatgcctgtaatcccagctactcgggagactgaggcagaagaatcagttgaacctgggaggcagagtttgcagtgagctgagatcaagccattgcattccagcttgggcgacagagcgagactaccttaaaaaaaaaaatcctttcttgcacgcagaaagggcctaaaggacacccaggatccccacatcacacttacaactaccagggattcagagaacactccaaagttgcagataacacatcctcctataacttaccagtttgtatgttgatatactttgtagaaggtgaagtctatgaaggtgaaaagggggtaatacgtagtttattattttcccagtatccaccacagaatgctccgagagctttatctttcttgcccgtcactgtgttaaaacggtggctgtgagggggcacccggatttgaaccggggacttcttgatctgcagtcaaatgctctacccctgagctataccccctctaccaaaaaaaggaagactgcgtcttaaatgtagtgttttctgatcagacattgcctgcagtgattcagaatagtttggtgtctatgataaactatttagagtgatctggacccaagtaaagtggtgggagagaaaagagaagtctaagtcctctctgattctggcttgagggtcttgtacggatgtgcagtgggatccctcttttccatcactatagcgcccccttttttttccactacagccttttttacctctggcatctgggaattctcttattttattatttatttttattatttttttgagatggagtctcgctctgttgcccaggctgcagtgcagtggcgccatcttggctcactgcaagctccgcctcccgggttcacgccattctcctgcctcagcctcccgagtagctgggactacaggaacccgccaccacaccgggctaatttttatatttttagtagtgacgtgggtttcaccatgttggtcaggctggtctcgaactcctgacctcaggatctgcccacctccgcctcccaaagtgttgggattacagccgtgagccaccgcgtccggctgcatttgggaatgcttcaagtcaattttttagcctctgtgcctgcaacgtgagctgcagtgaatcctcagccccgtgctttgcacacaagaggaagtacttcccttgtccttcccaagaccatctctgcttccgggccaggtgtgtctccgttgtctccattttctccagcatcttcaatcacttcctcttcccctggctccttcaaacatcaacaggtttccattaggaaagtattcttcttttttttttttttttgagacggagtttcccacttgttgcccaggctggaatgcaatggcgtgatctcggctcaccacaacctccgcctcccgggttcacgcgattctcctgcctcagcctcccgagtagctgggattacaggcatgcgccaccaccccggctaattttgtatttttagtagagacgagggttctccctgttggtcaggctggtctcgaactcccgacctcaggtgatccgcgcgcgtcggcctcccaaagtgctgggattacaggcgtgagccacctggcccggccagaaaagtcttttacctgtgattgcctgttcattttcttccttctcactaccaattttttactttttttttggtctcgctctgtggtccaggttggagtgcactgacaccatctcggctcactgcaacctccgcctgttgggttcaagggattctagtgcctcagcctcctgagtagctgggattacaggtgcgcaccaccaggcccagctaatttttgtattttttgtagagacggggtttcaccatgttggccaggctagccttgaactcctaaattcaagtgatccgcccgcctctgcctcccaaagttctgggagtagaggcgtgagccatcacacccggccaagattgtgcattttttgagggtagggatcatgttgcattatttcttgcattttccaaagtagtcggcgcagtgcctggttcatggtaatccctggtcgtaatcaccaaactacagcctagttaaactcaccgatgggattccaccaaacctgcacccaagcagctgaatgttgctgaagaaaaaaggtgcacaagtttgtgccaatcaatgtaaaacatgctttctgtctagcattgcttcactattgcccaaatatgtttactttttcatgctccaaaatgactatttcacacagtctctcctttcttaaaccttccacaccttctttctcctcttgctgtcagatgaagagcttgcctcttccttttttttttttttttttttttttgagagggtgtctcctctgtcagccaggcaggagtgcagtggtgcggtctcggctcactgcaagctctgccccccaggctcatgccattctcatgcctcagcttcctgagtagctgggactacaggcacccgccaccacgcctggctaatttttttgtatttttagtagagacggggtttcaccgtgttcaccatgatggtctcgatctcctgacctcgtgatccgcccaccttggcctcccaaagtgctggggttacaggcgtgagcccccgcgccaggcttcgaaacgcatactcttaaatatcagttaagcaccttaaatgaaacatgttcatcccaatactggaacatgatgtctgtgaggacatggggctgtactttgttactttcttttaagagttttaaaaataaactcattttttttcccctaaactcgcccctttctcagtgggatttttctcttttctttctgttttttttccctccaagactaagttttgctcctcttgcccaggctggagtgcagtggtgtgatcttggctcactgcaacctctgcctcctgggttcaagcaattctcctgcctcagcctccggaatagctgggattacaggcacccacaaccatggctggctaattttttgtgtttttggtagagacgtggtttcaccatgttggccaggctggtctcgaactcctgaccccaggtgatccacccaccttggcctcccaaagtgcttggattacaggcatgacccatcgcgcctggcgtttttgttttttttttttttttttttttttttagatggagtctcattctgtcacccagggtggagtgcaggggtgcgatcttggctcactgcaacctcccacccctgggttctattgattctcctgcttcagcctcccgagtagctggaattacaggtgtgtgccaccacacctgggtaatttttgtgttttttgtagagtggggttttgccatgttgagaaggctggtctcgaactcctgacctcaggtgatctgcccacctgggcctcccaaagtgctggaattacaggcgtgagccattgtgcctggccacctgcattcttctctagctcggctgttctacttgttcctacttgtaatagactaaataatgacgctccaaacatgtctacatcccagtctccttgtgaatctatttgtgactatgttacctctcatgataaaagcaactttacagatatgattaaattaaatatcttgagatgtgaggttatcctggattatccaggtgagctcagtgtaatcccacaggtccttacaagagggaggcaggaggatcagagtcacagagagaggagatggtaacatggaagcatggaaaccaaggctagacggagacaggatgatatgctgctggctttgacaactggggaagaggcaatgaggcagcaatgtagcggcctctataggctgggaaagtcaaggaaacggattctcccctaaagcctacagaaggaatgcagtcatactaacattttaattctagccctgtggatttttttttttttttttttttaagatggagtcttactctgtcacccaggctggagtgcagtggcaccatctcggctcactgcaacctccgcctcctaggttcaagcgattcttctgcctcaatttcctgagtagctgggactgcaggcgtgagccaccatgcctggctaatttttctatttttggtagagaagggatgtcaccatattggccaggctggtctcgaactcctgacctcgtgatctgcctgccttggcctcccaaagtgttgggattacaggcatgagccaccgagcccagccagcccagtgaaattgattttgggattctgacctccagaactgtgaagataataaatttctgttgttttatgcaaatagactgtaatttgttatatcagcaatataaaactaataaaacactgtagtctaagacatcaccaccatctctgacccgtattattacaatagattcccaactggcttctctctctctctttttttcttgagacagagtcttgctccgtcaccctggctcactgcagccttgacctcttgggcacaagcaatcctcctgcctcagcctcccaagtagctgggactacaggtacacaccaccatacctggctaatttttaaattttttttgtagagatgggaatctcaccatgtcgcccaaactggtttcaaactcctgggctcaagtgatcctcttgccctggcctccaaaagtgctgggattatgggcatgagacaccatgcctggcagaccctcttagattttcaactatacaatacagtattgttaattgaaggcaaaatgttgtacagccgatttctagagttttttcatcttgcagaactgacattttagacctattgatcagcaactccctccagcccctggcaacaatcgttctactctctgcttctgggagtctgactatgttagaaacctcatataagtggaatcatgcagtatttggtcttctgtaactggcctgcttcacttagcataatatcctcaaggttcatccacgttattgcatattgcaggatttctttcttacttagttttttttttttttcttttttgcaacggagtttcgctcttgttgagagcgaaacttgttgcccaggctggagtgcaatggcgtgttcgtattctttttggagagaccaaggaaaaactttatccagttttgcaggaggttgttctctgacttgctagcggggagagatgagtgggattgtggataaagaattgagcctaggccgagtgtggtggctcacgcctgtaatcccagcactttggaaggccaaggtgggcagatcacctgagatcgggagttcaaggccagcctgtccaacatggagaaaccccgtctctactaaaaatacaaaattagccagacgtggtggtgcatgcctgtaatcccagctactcgggaggctgaggcaggagaattgcttgaacctggggggcacaggttgcggtgagccgagatcgcactattgcaatcccgactgatcaaggagagcgaaattccgtctctgggcaacatagggagacggcctccttcacccaccacctgcccccatctccacaaaatggaaaacaaacaaacaaacaaacaaaaattgaaccaagcaggggtgcggtggctcatgcctgtaatcccagcacttcgggaggccaaggcgggcagatcatgaagtcagaagttcgagaccagcctagccaacatggtggaacactcatctctactaaaaatacaaaaattagctgggcgcggtggcgggcgcctgtaatcccagctactcgggaggctgaggcaggagaatcgcttgaatccgggaggccgagattgcgccactgcactcactccagcctgggttacagaggaagactccgtctggagaaaaaaaaaaaaaaagaactgaacctagacaaagcagattggcacctaaattcacacgcttttcaaactgccaccacgtcttggcctagccttttttttttttttagatggagtctcgctgtgtcgcccaggctggagtacagtggcatgatctcggctcactgcaacccccgcctcctgggttctgggttgcagcaattctcctgtcttagcctcctgagtagctgggactacaggctcccgccaccgctaccggctaattttttgtatttttagtagagacggaggtggggggggggggggtgggtttcaccatcttggtcagtctggtctcgaactcctgacctcgtgatccgcccgacgcggcctcccaaagtgctggggattacaggcgtgagccactgtgcccggcctatcttggcctagtcttttaatttctccttcctcattggtaatttcagtataatctagcaaagagacactaattttgaacgaatggtgaaagtatgaaaattttgggatcaatcgatgtaaaaacaatttaccagagagccaccgccagagggggtatagctcagtggtagagcatttgactgcagatcaagaggtccccggttcaaatccgggtgccccctcgggtttctttaagtttttttcacagccatccaggaataacctgagtcagcgagttctgaatgcaaaactcacgggaggtgtcgtttgtatcttccacctacctaattttcaccttgaaaggattcccgtaccctagagggagagaacagcaaccagaggctgcctttaggtggatctgagccctcataccccaagtggcgataagcgcaccagtactctcagttggagaacaaaggcgcgtatcgatttccatctccgatgcccattggtttaacgttaattataatttgttttggggtaaaaaatatgtcttggacggggcagtagttcgtacttgactatgaaaactaggagaagtaatccaaattcagaggttttcatatactcgcgaactcgaacaggacagggcacacagatagaaggtagacagcgagcaattttcccctcttccttcttgactcagctcataggcagggctttggcttgataagctatacatggaaagttcaaggcctaaaggagaggtaaaactggttcctcctgggttttgcacggaaccgcagctctgctgatctgtgatctctctgttcagcctagagatacagctcacagtaataggagccaggagaaaaaaatgcgcgtttccccggggtccgaggaatgacacaaccacattccgggtttaaaatatcgcagctgccctttgacccaggcagcacgcctcttcctttctcctttatttttcctttttttgggcaaaacctagtcgagggggacgcccttgtctcccgtcacacttaccattttcctccggcccaacagtgaccctgtcaggcacgcagccagcagatacttgtccccatctttaggttatgaaactccatggccttttattcttacttcagtggttcttaaaatgtggtccccacaccagcagcaccagaggcacctggaaacttggtagaaatgcaaattctcggggcccccttacagaatcagaaactagcagtgttttaacaagccctgcaggtaattctgatgcacgttcaaatttgagaaacactgtgttcgtttatctcagtttgcactgggttataactttacttttgtacattaatagtcaaggatgaacacagcacgtccatgtcaccattaatacagaaagttgaagttggagaagggctgtgtctatgggtttccctcgcctgacccaccctccacccccaaaaggaacgccaagttgaggcgttcccctgtctccctacccccattggaaacatcctgtccctcaaacccggcacctcgaactgtctgacccatctgaggctggcgcccgtggccgcagaaatccctacacctctggcgcgagtaatgcggtcgcgcagcttttatacccaccccctcctcccgctgagcacaaagtaaaaccgaaagatttctgctaaggttgaaaaatgaggaagatactttttcttttctttttttttttttttttagtcaggacccaatgttaaaatgtgagtcaagaatgaaaaacagatggttaacaaggggaaggaaaaaccaagccattgagggggcacccggatttgaaccagggacctcttgatctgcagtcaaatgctctaccactgagctatacccccgcgcctctacagcgcctggaggcggctccttgggtgctaagcattgttgcagctgctacactgtgagtagtggtgtaacagaaggagaaaggaatgctggagaaaaaggggtcaagctgaacgcagacggtgcccgcatccggggaaccccgggaaggtgcactgcaggggctcgagagggaagcactagcccgggcccggcagcgcgcagggtccaagagggagggacgggttccgccccacaaatgtgggaaagggtgtgggccggaagagagctaagaggggcagggtagggggtccccgttcggtccgcagattcatgccgggtagaaagtccccgaatgcggtgaatcagttccagcgttcaggaggatccaaccccaccctcgacgggcttgaggggttagcccgcctcccgcagcccgggcgccccagatgtgcagcctgctcgcctctgcgccgcctccggctggggaagggccctgggcaccgggcgcagtcagcctgagagcgctgaggcgccagcaccgcgggccccgccgtccccccaggaacccgcccccgcgcagccccacgtcgcccggagagcgcgcctcgctgcgcgtgcccttgcccgcgcccgaggcgcgtgcccgccccagtgcagcccctcctccccgctgtgtttattaggggaaggagggcggaggcggaggccagttccccagctccagccgccgtcgctgctgcctgtgtagttgcagccgcggccgcctcccgccagctcgcctcggggaacaggacgcgcgtgagctcaggcgtccccgccccagcttttctcggaaccatgaaccccaactgcgcccggtgcggcaagatcgtgtatcccacggagaaggtgaactgtctggataaggtgagcccgggaccgggagacgcgtctttgcaatcccccgcagtgctccgaatccagggaggagagaagggccgggtctttgccgccttatccccgcgatcccaggagaatggagggagggcgagcgggcggtgtcatggggtgtggggacacatcccagtctgaaaaccaggagatctggggcgaggcgggaagtccacgcgtagcgggcagccgctgctggagaggggtgggctctgtgtcccggggttgggaggacgggagaggagcagggaagtcaggcgccggggtgtgttgggggaaggttaggggtgcagtcccgccccctacggcctggagagtgagaagagacggccgctccctctccgctctgcgccgagcgccaagtaggcggaagcgcggggcgctggtggagggggcgggggggcggggcagaggctggggggccctgcaaaaccgtccgctccggcgggggtggcctggcttcctggcctggcggggcgggggctatcagcctgcgagtgtgtggcatctgatgcggggggttttgggtaaggacccgggctctgccgcaagagccccgtttttgaacgacctgcacccccttggattcagtcgttaaaggactcgcagacctcctccacagcttcccaacccccacctccaattaaaagccaactcccggtgctgggccgtccagcctgagccgggtggggttgggtggcagagtagggtgggtggagggtgcttagctgagatctcctgaaattgtgctcagagccaggagaccgtgtggaagaacaaagagctaacttttcaaagcaggtttctccaatggagggtggggttggctgagttctggggaagccgaggaaagggggaggtattggggggaggggagggtggccttgtggagattcagtgtcccctgggggccctgtctccccaatgctggacttgttcatctggttgccattagacttttggaggggggttggagagtagaactgggtgtttcccgtacagtttagggtaggatcctgttctcttgtaagctccgtaagatcctaaggtaaaacctgcccctctgcatcccctccccagtctggaggggaggcctctgtgattttgtgcccttcctcaccgcgtctttcatccaccacccaaagctggctccaagtccaagtattctgtcctttccatctgaactgggagggctgggaggactggatggaagagaggtgcaagggtgggaacactagatgaaagaggggtatagagccctggggccaagttcattactgacctggagccaggttttgttcaggagaggatagtttattggacaccttatctctcccctcccccttggtgtgtgagcttcctcagtgacctttggcctctgagtcagcgtgaggaggtggggttggaggttctgaaagatatttgaacttgctcttggggagtgtgggcatatggggccgctgctgtgtcactgttcctcctggtcctgggcttgactgggcaggaggagaggagggggtatattgtgggcacgaggaaagttgttgatctccccatgaccatgccagccgctgttgggcaggacttgagcttagagctatcagataatgaagtctccccttgagaatgtacctgtccttgcacactggggtttcgcccgcccctcgtggcagagattttggcctctgcatcttgagttccctgtggtccccttcttctccacagtcatgaattgggaagaggcagtgggcacttgacccgtataaggaaaaagcaaaacatgaaggcaggattgccactccaggagttgggaaactgggtccttgttccaggtctgctcccaccagttttatgaatgtctctaggcctcagtattcaccatctgtcagatgggtatgatgatgtcatttccttaaaggtggggcagtgcactaaagtccctgagtgctaaagagggtgctgtatagactatgccctccctacctctctgggatgctctgttcagctccacaccactccccttggaaagaccttcagtgccgtgtacccgaggggaggggagcagggatgggcagggtgccctccccagttctcttaccctagctggaagaggacgttcaagtgggggttgcccagggaagtgggagttggtgattccttcctctttttagaactctccctataggaagtggccctggagagacctcgccccctgtactgagcaggagacctgaaatatccaggtatcagacctattcctctccacctgctccaggcagtaaggataggaccaggaatggggagccagtgcctggaggatgctgggctgtgaccagggaggaggggaaaccttcagtcccataggcagcttcagtcccatagttgctaaccaacttcccaaggcctcccatttacagcaaaagagtcaaattagactcacccgtttctctacaatcccccatggtactcagcccactacgtggcccaaagcacagggtgtgtccttggtttcagccttttctcctccctgagccttatctcccaaaggcataggtgggtaaaaaccttgtcacctctgaaggccaccctgcccccaacctgcagtacccagcatgctttgcaagctggataaatatgtattgctgatgacagtgtttgaggaaggaggtcgagatttgcttctccagaggacttctgggattagagctgggggagaaacagggtgacctcatttgctcattcaacaaatatttattgagcacctactttgtgcacctgctttgtatctagggagctgtgttgtcaagaacctcgccacgtccctctttcctggcttgcttccccaggtttctgaaaacaggtggaggtagaggattggtctgctgccagttcccctggaatcccctgttagggtgggctctctgcctctgcttgtctcagcgctccctccccactcgagggggttgaagtcctcacagctgtggtgccccgttttgctagctgaagcttagagtaccccaccatcatcttgtgaccatcccttcataatagctactagttatcacgatatgctgggctcagtcttcacagcagcctcacaaagtaggtgtattcgctcttgtaaacgatgcactccataaatggaggctcaggtagcccatgtggctcatctccctctcttagagctgaaattcacatccacagttctttctgctcagctcttctgccagtgtgtttgcagaaagtacttttatttatacatatttatattttatttacatctcatttgtgccaaaagtaggtcccatcccttcctgaccctatctggaggaatgctctgggcctggggtcttgtatgggggcgtggggccactgggaataatcctgtcctcctcggaatttgtggaggtgcagcaaagatctatgcctttaagccagcgggtcaggtggccaaccaagctaggctggtgccccggccagggtggggctggcattgcctctgcaggagggagaaactgtaaccctgggcaacaggaagggaagagatggtctcataatccatccctgagtcatggccaccccaggtagcctgggttcagaggccaaggtgccaggctgcaggcacagtgacacgaagcttgccacatcccccccaacccagagccacagagggacaggctgtcccaagtgaggggtatccttgcaggcttctgcccctaccagcctgtttacctttctttagagtgggttgcaggtaggcaagggaagatcaagatgaccctgccttggagcctcggatccaggctgagaggcctctaacaggcagcagaggtagggtctgtctggtttctgtgaacagggaagccatggactttgcaggcagcaggaaggggcagaggtgcatgcctcgaggtgcagtttccttgagtcctgaggcccaggaatgcttcgctgaaatcatcttgcctggggcctttaaaagaggggggctcttgctctgggacagagcccatggggcagggcagaggcagacggggtcactgtggggtcctctggacatatttccctgacagtgtccttccccagaccccattgagacaaggcaggagttctttcatcttagggtccaggcttggctcacagcggttgtggagggactggccattttctgcctcccctccccacaattttcctaccccaaaaaggacacagtggaaggagctggtgggttttcttgaaccttggggccttcctccagagagggtaggggagtcgcctgaagctgctggaggtgccaagcattaggggtggaacggcctcctctcctgaccttccagcactctgggagacagtggctgcagctccacttgacacttgtgcttcatagtaactggtttccatgtttctgctcagagccccctgcagggggacaggcgaccaccctcctctgccccacccttgggtgtctggatgagagtgtggggcctgtgagggaggtgggaaggagctactgatagaaataggtgccatcccctagaagaggggctctgcttcctccgcgtggcagcctggaggggtctttggaaccactgggtccagtgttggccctgtgccccctgcctgctcagtacaccccaccctccttctccaaggggcttggctccgggtgcaggcctggccatctggagtaggggtctctctccctttgtctccccaacgtcaatcaggaggcagccttggaggtccgtggtcctaggacagtgtgtagcccttcgtgtgtgtgtgtgtgtgtgtgtgtgtgtgtgtgagaaagtgggtcatggtctggattctggagaatgtttttcctggcaggcccctgtgggggtagggggaggcaggggcccaggcaggggcctaggcaggggcctgtgcagctaagtaggcagaggccagcagactgggtggtgaccaggctggggcaccctgccaatgcctcccagttactcggggagggagtggggctgtcacttcaggggcctgtgggggcagggaccagcctgtcttagtgtccctggtgggttctgtgtgttggggtatgcaccacttcaggggcctgtgggggcagggaccagtctgtcttagtgtcccggtgggttctgtctattgggttatgcaccagaaggagtctttaagttgcctcataggagtttgggggccctgggtcactgggataggcccaggttggggagggggccaagcttagacccgccacttctttgcttccagacttccggctggccgtcctccccaagagtggttctcctagcattctgtttaatattccaccattaggtttttcctttgggtcttcttgatagggaaccagtaccctattagaaggtgatttccccctgaaattaccctgggggtctctggttgaagtgggccatggtagggaggttgaatcccagattctcagccttctttctgctatcccctcctcccagtgtctcagaagcacctctccctccgggggtttggagacaacattttgaaaagcatcgccttgggggaattccttgacaaatggccaagaaccagctctgtggctgggctccttcaaaagtccccctgggcctgcctcctggcctccttcttttggaatggggaatgtctcccttgactactgggaaatggggcagggacaggccagccaggtcactcaggtggcctggattattctggggtcctggcagtggacccctgtttggtggtgatccagcacatcatcctgggcttctgggggtgaatttagatcctgttgtcatgggtttgcctaagcatcaatacttctcaggggttccacaaagacccctccaggctgccacgtggagcctgttagatcgtttctcttttttttttttttttttttgagacagagtcttgctctgtcacccaggctggagtgcagtggcacaatcttggctcactgcaacctccacctcctgggtttaagtgattcttttgcctcagcctcccaagtagctggaattacaggcatgcgccaccatacccggcctatttatttatttatttatttatttatttatttttgagattaagtctcgctctataccccaggctggagtgcagtggcatgatctcagctcaccgcaatctctgcctcctgggttcaagcgattctcctgcctcagcctcccgagtagctgggattacaggcacgccgtcactgcacccggctaatttttttgtatttttagtagatacggggtttcaccatgttggccaggctggtcttgaactcccaacctccagtaatccgcctgccacagcctcccgaagtgctcggattataggcgtgagccaccgctcccggctagatctgttctctttctgtcatcactctcttccctccgtcggccaccctggatgggccctgtgtcccacattctcttttttttttttgagacggagtcttgctctgtcacccagactggagtgcagtggcctgggttcacgccattctcctgcctcagcctcccaagtagctgggactacaggcacccgccaccacgcctggctaatttttttgtctttttagtagagatggggtttcaccatgttagccaggatggtctcgatctcttgacctcatgatccgcccgcctcggcctcccaaagtgcgggattacaggcgtgagccaccgtgcccggccgtgtcccacattctcacacgcatgaatggattggagctgtggttggcacagtgaagcccctctgcaccccaacacacacaatctccagtgtgagccctgaccccctcggctaaggttcacacctgctgtgcccagcacctgacatctgagtgctcagaggtgccaagtgctgtgctgagggctttgaaggtgatttctcctcagtcctggacaatcccaggagggccaggtgttattacatccattgtacacaccaggaagtgggctcctctgaggtgcagggccccgcccaaggccatacagttagtggggtagagctttgatgtccactataggggtgtccaccttcaaggctttgaagtagagcccttcagtgcctcagtgggagacccgctgccgggtgctctcctgccctcctcctggggtgggagaggatgagggaagggtagaaaggatgtgttgtgttgacagagcctgggacacccagcccactcctctggccaggcatcccacaggaagtgggaggtatcggagctgtagcaccacctggggctcatgtggggctggtgggtgtgctgggccctggtacaggagctaggagcacctgggttctgggcctgggtgtgtgggggctgggccttcctcttctgaggccttggtgccaccagaggagctgctccttcatgttcagcggctgctccctagcaacccagcgcagctttgcataagcaatgaggcctcgccagctctgggcaggaggggttccctggggagggtggagctgacttgggggctgctgccactgctataactgggctcttcccccctgtccttcatgcctgcctgtctcttcctcctgggttcaaatggcccattggtggaggatgaggaaggagagaggggaggggagtgccaaagcctgtgacctgaaatgcccccagctcacctgggatgattccatgttctccccacagccatgggcctaggacagtcccagcagctcctgagtgccccttcctagggcctgagcccctttttcagaagtcctggtatctgatgtatgtcctcctgtctccatccccagttctggcataaagcatgcttccattgcgagacctgcaagatgacactgaacatgaagaactacaagggctacgagaagaagccctactgcaacgcgtgagtcctgttctgggcagggggctgggtgggcaccttggctccctccccgagtgagttcttcctttccttccaataaccgcaaggtgacattggcgaacacttccatcccctacttgaacatcacagtttgtcctcacaacagctgaatgaagcaagcactttttatccccatttaaagtgcttttatcccccatttaaagtgcatttaaagtacagatgaggaaactggggcttagggaagggaagagactctcaaggtgggatggctagggcaagacaggctctaacccaatttcgggcagtaaggcgagcacgtttctttccactgtcccctgctacaaaagagggggctttcctcgtggtctttcaagaatgagtgacgtgtctgttgtatttggggttgaggactttgttctgtttaccttcccttatttctctcctcaaaatcgacagtttccttctctcacctgggtacttctaggctttgggggctccttcctccagtggttccttcaagaaaactctctggaagcctcatgccagcccttttggtgttcattttttgagaatgggcaggggtgcataaagggtgttgcctgggccagatagatctcttccctgcctggtgagggaggctgtggagactgtttcttttgagtatagtcatcttgagtatagtgcagctctgttccttctgcactgggacctgcagcagctgacggtagggagggagtatagaggtggggtcccccatcccagagcctggaggaatacctcccctcccatcccatcccatcccatcccatgcaatcccagaaagtacagcaattttccatcttccaattgaccttgtgagtagcaagtacaaactcagtgttggggcctcacagccgcctccacctgcgaggtggaggctttggaaggtcaagtcacttataagtaatgatgtaatgataatttctttttcttttaatttgcttttttttttttttttgagtcagaggactcatcacccaggttggagtgcagtggcgcgatcttggctcactgcaacctccgcctcttggattcaagcgattcttgtacctaagcctcctgagtagctgggattacagatgcatgctaccatgcccagctaatttttgtattttttagtagagaccggggtttcaccgtgttggccaggctggtctcgaactcctgacctcaagtgatgcaccgcctcagcctcccaaagtgctgggattacaggtataagccacctcgcccagccttaattcgattttttttttaattttaacttttttttttttaacttcaaccaactcaagtaatggtaatttcagtgttcacatgaatttaggatctgacttgagtccagttttttttttttttctcttaattctcagtcaggaggctctttgcagctgaagttcacccagggaaaaaaaaatttgggacttgtctaaaaagggggcttaaacctccagccttacccctaaccttaccccaaaccttccttgcttccttaccccctcccgttccctggctaagaccactctttcatctttttaggggctcgctcattcagcagacatttattgcctgcctgctgctataatacatactaacctgcaccaggtgctgggaaaacagattcctgataaaaatctcaagcccaagaagcaacatgaagttgtcccttctggaagaaggagggcactgggcaggttatctgggtaaaggaagggttgcagctctgtcctggcccctccttcagctgccccttctcttctattaatttctactgttcctcttccccctaccaacccctcccacccccacaagggaaatgggacattcttcgaattcttaagggctcacacaagccctggttctctgccacttcctccctccattgggtagtggggtggggttcagagaagccagggcagttaacccctccgttgctggaccacctcaggctagattctgagcctccgccccagcacgcagaagtctgaccgagccttggagcccagtgactcaagcagcctagaattcagtgagcactgggagctggagaaaaatcagaggcttgtccttgttttctctgcgttttatcagcctcatccaaagttccagcttactgtttttactgtcttcttgggaagctgccacaaggttgggtggagggctcctgcagggactgggggagccagaagaggcagatcaaggtttcttctctgggtgatgcttccaacttgcagaggcagaggttcccctgtctccctcctggcctccagccaaaagaagcaggttggcctctccatgtttcctccagcttttgtagccctagcctctgccatgcctcattgacctttggcccagttgggatgtttcctgggaaggagcctagtgagagagacctgggggctttgtgacccagctgtgtttcactttagctgtagtagcacctcctcgcccaaggcagtcattctccctcccctgcatccactgggccaagaagttacccgtggggattctgggatgaaccaggtgtggcgcccgcttgcaaggagtgctctctggacgtgtctgagccttggtttccccatggttaaaaattcctgcccaggaggcctggcatagtggctcacgcctgtaatcccagcactttgggaggctgaagcaggtggatcacttaaggtcaggagttctatcagcctggccaacatggtgaaactcgtctctactaaaaatacaaacattagccagatgtggtggtgggcacctataatcccagctactcaggaggctgaggcaggagaattgcttgaacctgggaggccagggctgcagtgagccaagattgcctctgcacttcagtctgagcgacagagcgagactccatctcaaaacaaacaaacaaacaaactaaagataaaaaaaaattcctgcccagggatgttggaccctagaccaaagaggatttattgagctcttgctatgtgccagacgctaggccgagtgtttgctgtcattccctcctgctttcttactttttttgtttttattttgctttggttttttggagacaaggtctccaaaaaaacttcgtcctgctcagtcacccaggctggagtgcagtggagtgatcatggctcactgcagcctccacctcctgggtttaagtgatcctcctgcctcagcctccctagtagctgggaccacaggcatgtggcgccatgctaatttttaagttttttgtagagaggagggcttgtcatactcttggcctcaggtgatctacctgctttagcccagcctcctcgtgttttcttcctgcctctggtcttatccttgagtgacattcaggttcctgaatcctgggtttaccagggtacagctttctgccatttctgttctggtcttgctttgtggaccacaggcctggcttccttctctgaagcatcacgtgctccatgctgggccaagcccagtgcaggacccgtaggggcacgtggtttcttctggcactttgccagggagttgggcccacccagtgagtgtgtgagtttggtgtgcagggaggcctctatgttctgcctgtctctggctagtctctgaggggagctaggatcttgcagggggctggtcaagaaagaagaaagctatctttccctgtggtttctcaagattcagatttaagctctagaaagtgactgtaaagtaggcagtgaaaaggcctcttctgtttctgtccttgcatcagacttgtttgggggagaggcaggggagagaacataggccagagctcactgccagcccacctggtgtggcggacccccacatgcgtgcagttacacacatgcctggtgtgtaggcagacacccacgccggtgctggggcgggggaggaggacttgggagctggactgaatgggctgtgtttgtgtttccaccttcaggactgcagccatgcagccaatgctgtggcaaggttgagggtgcactcccggcttctgcacaatagccagtggtggaggaagaactgctaatagaattctttttgtttgttttttttgagacggagtctctgtcgctcaggctggagtgcagtggtgcgatctccgctcactacaacctctgcctcccaggttcaagcgattctcctgcctcagcctcccaagtagctgggattacaggcacctgccaccatgcccggctaatttttgtatttttagtagagatggggtttttccatgttggccaggctgatctggaactcttgacctcaggtgatccactcgcctcggcctcccaaagtgctgggattataggcatgagccactgcccggcccgaattctttcttgaagcttctgggtgggtggagtgagcctgctcttggtgagagagatatttaagagagatatttatgccctccattacttgttttgtaaactggattttccaaaagtggggcagatcagtccacacgcccaggcttagcataaacctgcatcgttgtctccctgcagatagtctagagtactgcctgttccctcctctttagggccctactgacaggaggcagggttgccagccagggaaaccagcttgtgaggtgtcaagtgggaggtgggcatgggctggggaaggaaaattgggggacttggttgcacctttcccctcttctctgactgcacatatttggggttcattctccagtttccttgagctgtggggtaaggactgaggagggtaaagatgtccctgattctggggagccaggaactatgtttctgccccttcccttaggcatcagatgggagtagggtgtggtctgtgtcagacaaggctgggtgcttaagtgtctctggattctagcaaactgtctttaatcccagctgcttttaaaaggtggggcagggttgggtgcagtggtttatgcctgtaatcccagcactttgggagactgaggagggtggatcgcttgaggccaggagttcaagaccagcctcatctctacaaaaaatgaaataaattagccgagtgtggtggtgtgggcctgtggtcccagttacttgggaggctgaggcaggaggattacttgagtctgggaggttgaggctgtagtgagccctgattgcaccacagcactccagcctggcaacagagggacactctgtctctaaaaaatgtaaaaatgaaaataaaaataggtggagcaggagtaggcaaaccccgcactggggcccagggctttccctccttcccaaaattgtctgcctctaactggaaaaatggggactagggatgacagtgtgggggagggcaagtgcaaatggccagcccaagtagccaaatgtggcctccaggtagccctcccacctcacttacccccaaatccctgtccttcaggcctcctggagcctgagggatcactttgcttcctaacacctacgttttacagatgaggaaacaggcccgcgtttccatgccttactcaacttgcagaattgtttctcttctatattaccgacaggggcaggcttttttttttttttttttcttttcattttgtgtgcaatctgatggctggtaagttcttcctcaagtctagccttgatctttttgactgctcttttttttcctctgattgaacaatgcctccttgttgcttcctatcgccaccacttcagccccttaggcctgaggggatggacgggtgagaaactgggttagcagggagccctcccttcccgcctgtgggcagccttcccagtaggggcttttggaatccgcagctctttctagaggcaggatgtgggggctgttttttttttttccttttggtaaaaccaaaagctccttgttgcttttgttgatgtctttttgttcctccttgaacacaaagctgtggtttttgaagagatccaagcctggaacgggcgaggctctgtgtagaaagggcgctgggctttcgggttcgctatcctgttcttctgaccctggagtgtggctgatggcaggactggagagtgaggctggtggctgacaagctgtccctgtcacctgtgagcccggaaaccttgcccctgtagtcccaccaagcaggaaggccacccagaggtcctcacagataacccctctcctgggacacagggcctcttcagtatcatatccttttttttttttttttttaatttttattttttgagacagagtttcgctcttgttgcccaggctggagtgcaatggcgcaatcttggctcactgcaacctctgcctcctgggttcaagcggttctcccgcctcagcctcccaagtagcggggattacaggaggccgctaccatgcctggctaatttttttgtatttttagtagagacggtgtttcaccatgttgtccaggctggtgtcaaactcctgacctcaagtgatccgcccacctcagcctcctaaagtgctaggattacagcgtgagccaccacgtccggctttttttttttttttttttttgagatggggtctctctctgtctcccaggtggaagtgcagaggtgtgatctcggctcactacaacctccgcttcccgggttcaagggattttcctgcctcagcctcctgggtagctgggactacaggcgtgtgtcaccacgcccggctaatttttgtatttttagtagagacagggttttgccacgttggccagactggtcttgaactcctgacctcagatgatccgcccgcttcggcctcccaaagtgctggcatttcgtgcccgacctgtatcatatacctttgaaaagttcagagggataggcagctcctaagcaggtgtggctgagaggccccagaatatctctcataatggccgagcttggaaacgagttgggtttgaaggatgaagtgctttgttttgcacccaacctgccaagcacatctttccccagaactgagtgctggaggtggctggggtccatctggcctccccttcgctgtctgggcagctgtggtgtagaggagaatgccttgggcaaggtctctgtccttgacactggacctcagtttcttcatctgtaaaacggcacaatgagaatgccagcctaaagctgtgtggtgggttttgagagagaatgtgcacaggactcagtgtgccaagatgttgctttgtgtctctgtaaattgtcctgaagcccgaggctgctgccaatagctgcctgtttgccctgccctatccctgtccagtccctgttcctgccccgcttcttcctgtcctacatgcctctccctgcaaactccccagagcagctgatagcagggaggaagggtgggtggggcacctgcagagagcccaccacccacttggaatgattaacaaggggccagtacaggctggcctatgggacaaaggacagctgtgctctggactctgccctgcacccagctgatcacctgtccctcattcctcgccatggcccagtctgtcatggggttgggttccagcggagtcaccagctgggacgggtggcccctggtctgtcttagcacccatgttggcatgcacacatttccagccatccctgctgggatctaggggtaatggatgggatgggcaggaagggaaaaggtagaattcccaaaaattgtttctggagggaggtcaaatcagttggagctttctttgaagcccggcatgctggtggggggaggggtgcagcactgatgttctcatgcctttgcttctagaaacaaacccgtgacacttgtcctcctcacctaaattatccagaaagatcctatagacacagtctcctgactttgccctcatgggcttctccttagttgaggacccccttgctgtctgtgcctcttcctcaacccccgtagacctctctctctctctcactcattctctctcactcgctctctcactctcactctctctctctctctctctgtctcgctctcgctctctcctcactctctctctcactgttgctgctctcctgcctggagctgaagatgaggttgccatggaaacctgaagcgtagtgagccgggagagggaaaggcagagtcgtctcgccagggctgggggctggggactggggactgtgggctgtggggaggggacagggttgacccagcaagaggaatatagcccaagctgtctgcctgccttcctctgcctggggttgggcttagtgggcaggggaaggagcttggaggctctggagtgcctctttaatctagttaatctgatgcaggattaaaatcctccctcactcctgccaaattaagctgagctcacatctgggctggctcacccccacttcccttctgatgggattagcactccagctgtcgggggctgagactagggggaagggtgcttctgaagaggatgaagtacctgccaaccccacccaaggtgcctgctgcatgttggaggggctcccgagaccgtctggtgggtgtagggtgagcagagggacacagtgtggggtgcagggggtgtgtggacatggcctcaatgcagctgctgcctgggtgtcttggaggcgcccatcggtgcagagggcacatctatatattcatcgtgtgtgaggcacagtgcagtgtgtgtaggaacttcagactgtggaatgggtggggcacgtcaggtgcacctgtctggcggtctttgggcactggagctggcctctgttttatttatttatttaataaaaacaggctctcgctctgtagctcaggctggtctcaaactcctggctcaagaaatctgccctccttggcctcccaaactgctgggattacaggcgtgagccactgcacccagcctggcctgttttaaccctgtgcattctggccaatgagaaaccccagggttttgcagaccgggtctggaggatgtgtttgccctgcttgcctctagccctccccatcaaatgctaaccagcctcatcttctcagaattgagtcttcgagtgctgggccagagctgcccggaggtctcctctcccccaccctgcttttgccacatgtgcctctacttccatgtgcttgcctcaccacagcccctgcccatacagtctgcagaatggctctgatgttgggaggagggtcgtctcgtctctgaagcgctccctcttagggcctcagggcctgccagccctgctagagatcttccctttctggtctctaggaacagactcgtggttgatcatcccttggcctggaattgtacaggaactttgaagggagctcctcagctgtgggtggccctggctgcacggggacgaccccagacttggccacgtattcatcacaggccacgtctgttgccagctgcggacacctgtgtttgcctttcctcatcttcccttcctctgctggaggaactgcgagtctgggctgacctgggtggccaggacccaggtgagggctgggggacgggcaccgctaggatcatctggatccgggacagtgaaactggcccaagggaaaaaggatttgccaaggtcacccagtaagtcagtggcagggccagagccctgcactgggccctgtcaagttatgctcctttgattgaggtctccaaatcctgagccctgcccttcacaagtggtggcctcaggggaagtcgcctgtttacaggtagctctgatgcacggccatgtgggcggcaggagaacatgccgagcagaggggcagctcgttcttagctctcgagtgtgtcagttttgggtggaacgtgcctaggaagaggtcccaggaggccatctatggcttacctgggtgcagcctgtgagtcagggatctgcaggggtcatagctgtggtgggctgtggtcacccagggctaaaaatggcctgacgggctccggcttggagaagccacccaccagtccctgaagtaattggggcccatgcagacccccagacatttctcatagcagcacatacacacaaaccacatggctcagagctgcctgtctctcctgcagctggtttgctaggggaccttgtgatgagagagggatggagaagggctgagttctagtcctgcaccagcttcaattcctggcgtgacttttttttttttttgagatagagtcttgctctcgcccagactagagtacagtggcggatcttggctcactgcaagctccacctcccaggttcaagtgattctcctgcctcagcctcctgagtagctgggattacagctatgcgccacggtgcccggctaatttttgtatttttaatagaaacaggatttcgccatgttagccaggctggtctcgaactcctggcctcaagtgatccacctgctttggcctcccaaagtgttgggattataggcgtgagccaccatgcccagcctgacatttgtttattcaacaaatatttactgagcatcgcctactattctaggaacttgagataaatcaatgaacaaaagagaccccaaaatccctcccttcatagagaagtagtggagagagaagacaatacattgatgtgataaataagttaattatgaagactgctaagggagaagtgcctggtgccagcacaccgtttcctcctctgaaatgagggagttggaccagagtcttctggaggtctctgcaggctctgagggttgccgtggcttcggctgcctccaagccaggccctcttcctggggaccaggctgtgctgggcctggaaattggcggctaagttcagcatgaactgaagaaatcgtctgggcgcaaatctggatccctgtgtgtcttggccatgttgtttaacctctctggcctcagttctcccatctgtcaaaggggtacgctgaataccagtcacacaggtggctgtgagaattcggtgaactagggcacataagcccttagcacagggagaacattcactgtttgtttttttttgttttgttttgttttttctttttgagacgtagtctggctctgtcacataggctggagtgcaatggcaggatcttggctcagtgcaacctctgcctcctgagttcaagcgattctcctgcctcagcctcctgagtagctgggactataggcgcacgccatcacacccggctaatttttgtatttttagtggagaccggggtttcagcatattgaccaggctagtcttgaactcctgacctcgtgatctgcccgcctcggcctcccaaagtgctgggattacaggcatgagccactgcgcccggcctaattcactgttgttactatagattgagcagccctaatccaaaaatccagagtctgaagagctccaagatgcaaagctttgagtgccgacgtgatgccacaagggaaaattccacacctggcctcatgtgataggtcataggtcaaaaagcagtcaataattttgtttcatgcataaaattatttaaaatattgtataaaattaccttcaggccatgtgtatgaggtatataggaaatggtcccatccccaagatgtctcagtatggatattcaaatattctaaaatctgagaaaaaatccaaaatctgaaacacgtctggtcctgagcatttccaataagggatactcaacctgtattttacctgtcaccctcaggtgacctccttttttgtcctcaagctggccttcccacctaccctccagttaggttggaccttgttaaccgtttgaaataccactttaaccgtgtgttttctctctcaccacttcctccaggaagtccccctggatatgtgtgtccctttgtttttctgtctcccccttgctctcctctgcatggtcggtctccacttctggtcttagctgaaagcttagtcctgactcacctgtgcccatcttcccccagccgggcccagttgcctcgacctccatgtgtggtaggcacaaggcatggattatccccaaacaagggtaaccttcaaccctcagagagtggcccagtggccatcctttcgctcaggacagttctccttggctggcccatcactgatgcctgctgcgtcttcccaggtcagccagtcccagctgagtctgagaaacgcttgtctcccctcggccttggtggtggacactgaagtcctcctgtggggccgggccagggcgtgcccaagcataggacgaagttcccaggagggcatgctctgtgagaagcccagaggctcctgcccctcccccagagtcacccccactctgttttttctgtcctgcagacactaccccaagcagtccttcaccatggtggcggacaccccggaaaaccttcgcctcaagcaacagagtgagctccagagtcaggtgaggggctgggcggtgctggggcctggcagggagggatgctggggagggaagttgtaaggtcggcatttggcaagagtaccttcccctgcggttactctgcaaggccaaggtgctgaaatcctagcattgcctttaatcttgaccccacccctgactttatcaaaggagcagggtagagcgttctcccacttcctacctagagggggttggagaggtgtgggtgtctatttgagcccgctctggggctccctaaagcctacctcctccaggaagccactctcccctccctcttccccattcacactcacccacaaaggaggggtttggggaggaccagggaatttgcccctccaggtcatgccagtctgaggctgggcaaccaaccctctatagccgcgtcccaaacctccacccactgaagggcaaggtgtgaagggggccctgccatgggggcacaggatagggggctgttccgcctctgtctcctttggcttgactttccagaacactgctgagtgggaggtatgtgcccctgtaggaggggaggacgggttccaggcctagggagaacttggtctttaggggacacggaggaataagcaaagggtctggagtcctgagaacagaacagctgacccaccctgcctgggggtgcgagggctcctgggacaaacctggccagtgatgaggtggggtggggtggggcggggcttcagccgatgaaggattaggcgcgagaatacatgtaggggaatttaccacgtgggcagcgcgcccaggacccactcaggatcgggagaagactgcagaggttccacccgggccacagaggggatctctcccagttcctccagaggggactcctgctgcctgatcttgatgtgactgcccgggtccatcagggagaaccgaccctgccttttgtcaggctttccatgcaccctctctcagcatcctcccagcagccctgtgaggaaggtgctatcttccccattgttacagatgaggcgactgaggcccagcgactttgagggactagctgaggtcctgcgggtaggagaggcaataataatattcacagctgacgatggagggctcagtgctcccggcgtgtgagctcgtttaatcctcacccagccctgtgcagctgtagcatcacttcacttcagagaagaggaaatagacactggcagctttgaatgtaggtttgtctaacccagggactatccactccccaagaaacagtctctaccttaataataaacatgatagttccttatgctgttgagaagttttgtagtttagggctgggagccatggctcacgcctgtaatccctgtgctctgggaggccaaggtaagaggatcacttgagcccaggagttcgagaccagctggggcaacatagcaatacctggtccctaaaaaaaaaaacgagcagagatggtggtgtgcacctgtggtcgtagctacttgggagtttgaggcgggagtatcacttgagctgaggagttggaggctgcagtgagccatgatcgcaccactacactccagcctgggtgatggggtgagaccctgtctctaaaaaaaggaaaagcaagaaattgtgtagttcagcaagtgcctttagttagttcccctgtttatccttgactgggttctgggagaaggtaaaagacccagcgtctctgtcttacagataggggaaccgagtgagtgaatgcggatccaggatttgggccctggtcttgtcactcccaagtctggggcccttgatgctgcacagccctggtagggcctgaggctcacagaggaagagagcagcagctcacacctgccacccacccacctgcggcacagaagctgaagttactaggaagcagggaacaccacagcctgcctggccatattttacagattctagccaggccctgactcctgccttcaattccctgccctgtggaagggccatgggggccagaggtggaggggctcagaaggacctcggagaagaggtgctgggagcagatagcaggtctttggagacacacacacacacacacacacacacacacacacacacacccttctcaggggagaaattcaaacccctcagcctttgtcagttccacaaaagcgtggctgcagctctttttgccccggcaccctatccccgaggggtggggtttgaggaggaagcacctccacgttgttccccctgcccaggatgggcagcaagtgggcagggcatgctgttggcaggggctgcttctgccccccacaggggaagccagcaccacgctctgggtttgggggctcctgtccctggcctgtgccccctgcttcccagggtcatagcctgctgggttcccgggggggcctcttgggagatgaaaatggcggtcactcttcattagggcctcactgagggccagagcgtgtccgtgtgtgtatgtgtgtgtgtgtgcgtgtgcacgcatgcacgcgtgtatgtgtgtgtgtgtgtgtgcaagcatgcacgcatgtatgcgtgtatgcctgactttgtttaatccttacagccacctgatgaaagaggggctcttattatccccatcatacagatagggaaactgaggtttacagaggctgccctgcttgtgcagagcccagggacaggggcagacatcaagtcccatgacctggccctggagcccgttgctctgaacagtgctgatggcacaggcaccgagccctgtgctcccaccctgcaggatgcaccagtcagcagcaagtaggatgggcttgttggaatgcagattcctaggccccacccaagggacttctgcttggcagctctgggtgaggcccaagaatctgcattttgactcccccgtgattctgataaggacttttggccccactttaagaagcttagagatgggtccatgggcaggagtgtaccgaccctgtttgtatgctctgaggggtgccacattagggtagggctttgcactaagggcacggctctgttcccctgaggtgggggtcctcgggggttgggggctgagggcaggataggcaggggaggaaagggtactgccctttttgcaggcctgttctgtctcccttcccaccgcccaccagctgtgtggtctgagactggcctcagactgtctttcctctcatagctttgcttcctcaccagtaaaatgaggacagcaaacccagttgcctcaagctgggggctgggcctgatgctttgaggcttggaagggctgagccggccaggctggagcagtgacgggttctggttcctgtggctgccgtgggggcagagctggagagagctgcctgcggctagcaggaagggaagggggagcctcttctgctcacccagcttcaccccacggggtcagctggcttctctccatgccccttctgggcctgccttgcccttccctgtctctgggaagctgcccaggctatttcagctttatttattttcccatctctatattggtctccaaaatggcactttgggtgtctgggacacctggagcctcccctgtggaggaggtaaccacagaactgtccagaaatgaccctctcggtggtcctgcccaggcctggctgaggcagggggctggcagctggacccccagccccccttctcacttgctgctcctatcccacccccaggctgagcagaggcagtggctttggggtgggactgagctggaggtgtctgtatggccctgagcccaggcagaagtgccaagtgccagtagactgttcttccattttttccttcatcaactcaccttgatggggtcatgggaaattacaggggggtttctatcctcctcggatcttgtaagcagcacgggtggtagagtatcactcttacccgaactagctggcctgagattgaatctcgcatctgctgccaccagctgtgtgaccttgggcaagttgcttaacctctgtgcacagtgccttcgtctgaataatgtggattacctctctccagagggtggtgtgagataggaggatatgttaagcatttaaagattcctgacgtggagtcagcattcagtgtttgctactactgttctcccggaaaggagaggaaatggaacttggacatgaagaagctgggaaatacacacagcaaccttttgaccatgacttccagccccggccctttccatcagctctcctctccatctgtgtgtgtctaattttttttttaaatttgtatttttttgagacagggtctctctctgtctcccaggctggaatgcagtggcgtgatcttggctcattgcagccttgacttcccagactcaagcgattttctcgcctccacctcctgaatagctgggactacaggcgtgcatcaccatgcccggctaatttttgtatttttagtagagacagggtttcgtcatgttgcccaggcttgtttcaaactcctgacctcaagtgatctgcccacctcagcctcccaaagtgctgggattacaggtgtcagccaccgcgccctgcctaaattttaaaaactagtgtttcttttttgttagaaggggatgggttacaaagtatgttggcccaacacatggtaggcacataatagtggaaattgtatttcgctcaataaattttgtatttttttagagatttttattaattttttttttttttaaatagagatggggtactatgttcccaggctggtctcgaactcctgggctcgagtgatccacctgtcttggcctcctagactgctgggattacagacatgagccattttgttttttaagtccagcctaatttttgtgttttttttttagacggagttttactctgtcgcccagcctggagtacagtgtcaccatctcagctcactgcaacctccggctcccaggttcaaggaattctcctgcctcagcctcccaagtagctgggattacgcccaccacgcccggctaactttttttgtattttttttagtagagatggggtttcagcatgttaggctggtcatgaactcctgacctcaggtgatccacccacctctgcctcccaaagtggtgggattacaggcgtgagccaccgtgcctggcataatttttgtttttaagtaatgatccttcttcttatattgggtcatcaaggcagttgttttcccaattatgctgctttgtttggagattacgtgtctgcattcaattcattcatgatccaacaaatgttgatctgcacctcctgtctgctgggatgagaagcaagatagatccagggagaacaactaagaactgacagaaaaattagagtttcacggatggtggttgtttgggtgtcaggagcctcagatgtcagtcagtcctgggcctgacagcagagtttccaaaatgggagcccaggtatctcccaggagtggggtcctctgggagcccaggcatctcccagaagtggggtcctctgaccgaagcgctgagttgcatcctggcctgagcgacaactgggttgtgaccttgggcaggtcccttcctccacagggacccccacagcaccctggtgagccatcctagacaacaggggcaagcactcctgccagggcaagaagggagccctgaagaggggctctgggctgggccctccctacacccctggccccccacccttcacttctgccaccccttccatacccaaagacctttcaaagagcctccctgtcttgattatccatagtcagggtctgaaggtgctttaaaatggtcacagactccaaatgggagggattttagagatcagctagccagctcccttcaggggacccagagaggggaactgacttgcttagaaacacacagcaaggtggtgctgatcccaggctccctcccttctcagcccctacccctcacccctaccctctgtgggcctcctatgttagcagtgaaatgaatgatccttccccaacagggagggggaggcagaagcagttcccgatcctgggaacctgctgatgtcattgcagcgtcgccatggcgattattcccctggattaggggcctgacccttgcaaagccaggaagcaggggacggagtgggggactggcactcgttcagcacttcattgctgacagagcactttcacactggccctccacagtgcgctgctgctttagagccactgtctgtatcgtgggttggagtgactggcgttatggtccccattttacagatgtgggaactgagtcttgagatgtgaagtcgttggcccaagatcactcagaagtgggagactgagcctgcgttagtgctagctccgcctggctttgtgcccagacttggtgataagaagccccctccccatattatacctgatttctgtcacaactcttttacagatgaagaaaccgaggccaggggcttgagatgcagggcttctgtatctggagctacatttctctgcctctgagtgccctaccttccccgatgcccgcttcccaaagggcctcccactaagagtcaccgtgctggcccagggcttccaggactgaggaagagctggtgctaggcaggttctggactcttggggtgggttggtgcctctatccactgcattcacttctgaactaatggggaacagcacatccaagcccttcttgtctggatcagaacagagaaggagagggaaccacatggatgagtgactgggggcttcaggagacaaacaaggactctgacccccacaggcatgtgcagaggacctgacaggtgtggccgtggctgcatgcgcatgcgcagtcgctccagtccaagcacagctcggtgctgctgccagatgattccctgccagggaactgcctgggtttgtgtcctgggctgacctgtgtccaggacagtgcagcccccgtggaggaaatccaagcagctggtggggtctggaacagatggctgatgaggtggacagtgaagtctctggaagccaaggaatagtttcctgttccatgagttttctcagcctcattctgttcttcaaaaccctcaggggaggacaagctgttcctcatatttcaattcctttcgtgccagggaagtcctttctgatgtctgacttgagtccctctagtactgtggtggggtggaagggttcttccctggagcttggagacctgctgagatgctgtctgacccccgctgctttcctcccctcctatggcggtggcctctgaagccatcccggcaggctcccagaatccgcggggcctgtcaaaggcgcactgatggagccttccctggggctgtctcaccaccctcctttctgggcaccaactctgtcctttggcacagccctcactcagctggttgctgaaaagctcccccaggcgtagtgggcagggccacatcctggctaacatgagggctggggccaccctgggagccctggaaagaacctttttcctataagcttccagacaggatgggcagggagtgaagggtcaagagtcaggcagatgagggtttgcactctggtagtgccggacattgactgctaagctctgtgaccttgggcaggggactttgcctttctgtggctccgtttcctgatccgtaaattggagctgttaattgcgtggctatatgtatggtgggatctaaatgagatggttcatgtaaggccctggactctgtgcctgccattcactgtgcaccaaagacttggtagtggcttattattacgagtctaacaccttttggctgaggcctctgctttgagttggggacttctgatcagggtctttctgctgactccctgtccctgtctcctgactggttgctgcctcagaggggccccaagccgaggccctttcggctcctggcctgactccaatccctcttcctcccctcctgcaggtgcgctacaaggaggagtttgagaagaacaagggcaaaggtttcagcgtagtggcagacacgcccgagctccagagaatcaagaagacccaggaccagatcagtaacgtgagctcttgccctgccctgcggcatccctgctgccctctgtttggtccccttcctgccagcctggcagacgcaagcctggcagatgtgaatgaggccagtgcctccactacccctgccctccagggtgggcctggggaagagcttggggttcccagatgcctcttctctgtgtacccccagaccaccagcacgcatagcattttcttcttgaagggactgtattctgtgggggcctgtgtgctaaatcagcccccactctctctgactgttgttcttttttctggatatcgtgggtatcggtgaagactgcatgtctcatcttagcacaaaggtcaaaactggggggcggggagcacctggcctcccctggtctgcgcctgggtgctgacattgcagtcatttccgcccttccttggcctcctcccccacatcagcctgctcttccttcctgtgtaaaaaccccagccagcttcacccgccagccctgcaccccctggctcacaccccccgcctccctgatggtcagtggcatctggctgtggcaggggtgggcatggagagtgggcaggggatcaactgtccccagcatcgtgtgccctccatggcacctgtggccagagaacaggcctcagtttcctgcttggcagagccacaggcaagcagcctgtgtggctttaggcatgcgggggcagggcactgcggtgagcagcaaccatgggggatgcgcacacagaactgcaggggctgcccagccagcctggcctaggaggtcctgccagggagggtttaggcaggcagctgtcttcgtgtctggaacaggaagggatcagtgagctgcccattgttgctctgggctgaggaactggggatagagattgccgggggagcctggctttccggtggtctcagcacccactccctgggctccacatcccttcctaccctccacctggccacctcagcagggcgctcctttaagagcttggctgggccgtgcatagagtgggctgcagtggtgggtcaggtggatttcagaagcacaggcagcccacagacagcagaaccagccatgcccaaaatggtggctttcaaactctgacttcagcctacagtaaaatatacattgtacgtcttgacccatctgacaggcatacatttatgtagagggaaaacagaatggaagctttcatgaatgagtacttcctacttagagggcgttcagatctttttttttttttttgagacagagtctcactctgttgctcaggctggagtgcagtggtgctccgcctccagggttcaagtgattctcctgccttagcctcccaagtggagtagctgggattacaggtgcacaccaccacccccggccaatttttgtatttttggtagagacagggtttcaccatgttggccaggctggtcttgaacacctgacctcaggtgatgtgcccgccttggcctcccaaagtgctaagattacaggtgtgagccaccgcacccggccacattcagatcttttctaaagatgctggttgcaggcccctatacaccctcacataatacagcccctttgaggactgtattcccaacactttgggagactgaggtgggaggattgcttgagcccaggagtttgagactagcctgggcaacatagcaaaactgtttctacaaaaaaaaaaaaaaaaaaaaaaaaatacaaaaactagccaggcatgatagcacacgcctgtggtcctagctattcaggaggctgaagtgggaggatcacctgagcccagaggtttgaggttatagtgagccgtaattgcaccactgcattccagcctgggaaaccgagtgagaccctgtttccaaaaaaaaaaaggaccaggcgcggtggctcatgcctgtaatcccagcactttgagaggctgaggtgggcggatcatgaggtcaagagatcgagaccatcctggccaacatggtgaaaccccatctctactaaaaatacaaaaattagctgggcgtggtggcgtgtgcctgtaatcccagctacttgggaggctgagacagaagaaccgcttgaactcgggaggcagaggttgcagtgagtcgagatcgggccactgcactccagcctggcgacagagcaagactccatctcaaaaaaaaaccaaaaagatgctggttgcagacttactgtgaatgggttttgcaactggactgttgacctgcagtttgaagttggtggcctgaggaaatggcatgcttccctttggctagcaggggatgcctagggcgggcactctaatcctccttcccctccaacttccagaggcctgtcacagttgactctttatatgctagggcctggcctcacgccctggagcttccctttggctcagaccctgcaaagggtaagacccttaggtctgtgtttcagagctctcggcttggaaagtgggggagggggaagatggtcttagattatggggaaaacccggaatggttcacagaactggaatgtcggctcttcagcctctgcggcttttcatgtagaggctctagtcttttatcagtgacacttgctcccaatgtgcaaccccagctccctggctgttcactcattgcttcaccctgtgggttttggaggaggggagacaagcccagtcatccctgcttccctttctggaaggcttccagaacactccacactcagcctaagccacctcctcttcttccctcccccagttagaggtgttaatatcctagtgacaaaactcaccaccctggccaagccatccgcatctcaggagataaccatcttttacccttctcgcggtgctgcagtgagctaatggtcctctgcaggagctgggggaagggatcgaccccgacctgctagctgcttttgcagctttagcagagacctgtagggtgtgaatgcaaagcctggagactcttggttttaatgaaagcaattacagtctgtcggatatgggcctccagacagctgtagcacagtcacctgtagggttgactgaaaatgcagactcacaggccttctcccctggctgccagaatcagcgtctctgggagtggggcccaggaatcagcatgttagacacattccctgggtttctgtggtgctctctgaagtttgagagccaccacctaaaagtctgaaaaagcttcaccaacccctaagtcagagggtgccagatcaggctgtacctcagaaccccaggggagctttatttttatttttatttttttgagacggagccttggtttatcacccaggctggagtgcagtggcgcaatctcggctcactgcaacctccgcctcccgggttcacgccattctgctgcctcagcctcgtgagtagctgggactacaggcgcccgccaccacgcccggctaatagtttttgtatttttagtagagatggggtttcgccgtgttagccaggatgatcttgatctcctgaccttgtgatccacccgcctcggcctcccaaagtgctgggattacaggcgtgagacaccgagcccagcctatttttatttttgagacagggtttcgctccgtcatccgggctggagtgcggtggtgtgttcacggctcagtgcagcctgaatcttctgggatcaagccattctcccacctcagactccgagtagctgggaccacaggtgtgcaccaccatgcccagctaatttttcttttttttgcagagacactatcttgctatgttgcccaggctggtctcaaactcctggattcaagttatcctcccgcctcagcctcctaaagtgctgggattataggggtgagccacctcacctggcctcccaggggagctttttttttttttttttttttttaatcagagacagggtctcactatgttgtcttaaactcctggacttaagtgatccgcccacctcggcctcccaaagttctgggactactacaggcatgagccactgcgcctgggagctttaaaccacacataaaaccattgctaagttgtcccaacctcctgaagtgttttggaaaatagggtgtttagagccacaccttttgttttgtatccaaaatagcattcctgttcctgtatgtagcttgttgctttgcttcccagattagcaccaaatgactccagttactttatttatttatttttaattttagttttattttatttttgagatagagtctcgctctgtcgcccaggctggagtgcagtggcgtgatcttggctcactgcaacctctgcctcccgggttgaagcgattcttctgcctcagccttctgagtagctaggactataggcacatgccaccacgcctggctaatttttgtatttttagtagacacagggttttgccatattggctcggctggtctcgaactcctgacctcaggtgatccacctgccttggcctcccaaggtgctgggattacaggtgtgagccactgtgcccagctgactccagttatttctaaaggtcaggccatcttacaaaagaatgaggatatgcttccttggagggatatgctgcagactagggctttttaccagccagagcattttaaaaacaagtgtctgatctcctctggggtgtctgctttggataagtgcagtctgtcttcagtcttgctaagtggtgagacagtgaggtaggaagagatggtaagggcccagatcctagcttctgtcattctggggccaggcagggctctttgagcctcagtttcctcatttgtaaaaatgggacagtaggccctactttgacaggtggttgcaaggaacatgccaagtgcttggcatgggataaatgatatcactcttattatcatcattattatttttgagacaagattgcccaggctggagtacagtggcacgatcataggtcactgcagcctcgaactcttgggcacaagtggtcctctcccgtcaacctcctgagtagctggtactacaggcatatagcaccatgcccagctaattgttattttttttgtagagagagggtcttgctatgctgcccaggctggagtgtagtcacgtgatcacagctcactgcagccttgaactcctgggtttaagtgaaccctggcctaagactcccaggttgctgggattacaggcacacgccatcacacccagttatgttgtcaatgttatcaatactttaaaggcacacttgtctgctttctacactgttgccggagaagggtcataaagtgaagtttggcagaaaagtttggccattgtctagtactgagaatgtgtggaagtgaggaaaggggccagtatattacacatctatggtgagtagttgtgtcatcattaaaggcatttgaagagttgccttttgatgggtccatgctatgggataaaggttacatgttaggaatcctggccttttgtcatgagctctagcagtgttcaagtatggaaaactttagtcactttactggagcctcttcttttatttacttacatattgattttctgtatacaattttgtgtccttaaaactttttttatgtgtgaaatatgacacatagtaacatatacaataaacacctgtttcaccaggcaggtataccatacattgtattactgtatgcctgtcaagagcccagtgttcacagtgttaaaaatataactcccatgtagtaagtacttatcatatctttatttaattatgagggaaccagctagagattaaaactggggaatatgagaggcagaggtaaatgctagtctgtgaaagaaagtgctggggccgggcgaggtggctcatatctgtaaccccagcactttgggaggccgaagcgggcagatcacctgaggtctggagttcaagaccagcctggccagcatggtgaaaccctgtctctactaaaaatacaaaaattagccaggtgtggtggtgcacacctgtagtcccagttacttgggaagctgaggcaggacaattgcttgaacccgggaagtggaggttgcagtgagctgagactacaccactgcactccagcctgggcaacagagcaagactccgtctcaaaaataaaaaaaaaaaaaggaaaaaagagagtactggatacatttagctacagaaatggttaagggcctaccattagttacacattggctattgtcctacaggaaaataaaaccataaactttgaagatatctttgctgcaggcagaaatgctttgcatctcagttggccagaaataatgagcattttatactctgtaatgagcttcagtctttagagtctgggcctaatcaatagtaaatagtcaaacaaagttttgtccccagagtaaaatactctgaaggcaggtttgttggacaatcctctagtttgattttgaaagcatgtatttttcattataattttagtatgtaattatgtattcttaaacactatagttttgcttttcctgattttgaacacagagtaattttgtgtatcttgcttctcttacacaccattgggtttaaagattcatccatatgtttgtgtgtagcggtagtacatcctttttcattgctatatagtattccattgtttgtttataccacattttattgattctgttgctggtggacatttgtactgtttccagttgctatggacatttttgtacatatctcctgaggtctatgtacattggaactgctgcatcttagaatgtgtgctccttgggccgggccgtggtggttcacacctgtaatcccagcactttgggagaccgaagtgggtggatcatgaggtcaagagatcaagaccatcctggctaacacagtgaaaccccgtctcaactaaaaatacaaaaaattagccgggtgtggtggcgcactcggtggcgcaatcccagctgctctggaggctgaggcaggagaatcactgaacctgggaggcagaggatgcagtgagttgagatcgcaccactgcattccagcctgggcgacagagtgagactccatctcaaaaaaaaaaaaaaaaaaaagtgtgctccttcaactttacgagataatgcggaactattttccaagtggctgcactgatttaccctcccaccagcagagatgagtttcatttgctccatgtgctcagatatgttcactttagcattttgatcgtgtagagtgtgatagccgatggttttagattgcatttctgtgattactaatgaagttgagtacagacttttgtttgttttaaaaataaaatactggggcatggtgggctcacgcctgtatcctaacagtttgggaggctgtggtgggaggattgcttgaggccaggagtttaagacttgcctgggcaacatagcaagataccatctctacaaaaaaaagaaagaaaattagccgtgcatggtggcatccacctgtagtcccagctactcgagcggctgaggtggtaagattgcttgagcccaggagtttgaggctgcagtgagccatgatcacgccaccgcactccagccttggtgacagagcgagaccctgtctctaaaaaataaataaataaaatattgtgagtctctgatggggagcagtattgcatggtggttgagaactgaggctctgatgttagaactggattctgacttaacccactgtttgcccacatcttgagccttggtttccctatctgtaaaatggcagtattctcgggctggctgaggaaaggaaatgaggccaggcgcggtggctcaggcctgtaatcccagcactttggcaggctgaggcaggtggatgatttgaggccaggagtttgagatcagcctgaccaacatggcaaacccccgcgtccactaaaaatagaaaaaaatagctgggcatggtggtgcacccctgtagtctcagctacttgggagacagaagcaggagaattggttgaacttggaaggtggaggttgcagtgagctgagatcgcaccactgcactccatcctgggcgacagagcaagactgtctcaaaataaataaataaataaataaataaagttaaaaaagaaaaggaaatgagtaatgcatgtaagggcacccaaaaaaagaccctagctggtgagctgatgattccacccagagcctgctgttccctcgttcactgtgatgtataatcatgtgaggagcaccgtatggagagtcagacttttattttccaccacagttgggagagcaggggggtcagaaaacagaacatcagctagcagagctttgtcatggaccctaacttgtcatcctggagtcccagctagtagggtcctggctgagtcgggagggtccttaggcctggacccctgaacccacatgtacttggacctcatgggcacaggtagagtgtggcctgtgtccacagaggcccaggacagcttccaggctgggggctgtgctgacatgtctgggcttagggcgctcctcactcagggctctctgaaggccagaactttgcagagcttggagcagggatgagccaggcccttggaagctgggaaatgtttccttgccttctgaatgtgctaacatccccctcatgtgcctatttgcttaacaaaccagtaggtgggtcaggaaagtaataacacaatttcctcatttgctggcgaggggaaggagaggaagctgagggtttggaaattttatccaagtgggcccaggctggaaggagctgagcctcactttttctcagcccatttagccgctctgtgccgcctgtcctgagttgcatgcctggtgtccctctctctcgagttagggtgactttctgattatcattcttgttgagagtgaaaaggggtgcattgaaatttatccctgagcagcagacatgaactgggacttgggcgtgtggtcaccctgctccacacctgttctcaggaaagggcctgtctagctgtgattttgtccttgtgtcaccagccttggctgttactgagcaatgaaagctctgcctcgggaagtcatttaatttctgagcctcatgttcctcttctggaagatgggaatgaaagtgtgcgtgtccggcccattttttagggcaatgattgtcagggtatgaagagcttggtcaagctgtgtgaagagctgtacagctgcagaggttgttaacattgatagagccacccaggaagggtgtcctgggttcaggcagctactcctccagccgtcgggtcagccagccgtaactttagatacacttatccatgtgtaatgactttttaagaagcaagatcagtttccccagccctttatgggaatacccatgtgtccatacttgctttcagcttagagtttgctcaggttcctagagctggtcagggtttgcaggaccgcctgggagcagatggtaccatggccttatttacagatgaggaaactgagacccagaggggaaagtgactcccaaggtcatgtaggtaagcatacggctcccctaaggatgaggcattggtctggtgacagtgcagcccatcataagggactgagcctgtggggtccagacctgctctcctcccagaggaaaaggctccctgtcaccccatcgctaatgcagatagcgtcatgtccagggaagctgtcacacattcatctgggcccccaacatcaaggacacctgtccctgcaggccccctgctggcaccttcggggcccagggcaggcccctgtccattccgtgtctgcacttccctccctggtcacaggttctcaggggcaggctcttttccttagcagaaaggaaacaagggaagctgacctttcccacctcagaacaaaagttggaagggcaggtgcctcgtgagcctggaggcctcaggaggggtgtccccttcccttgtgccctccccgccaccaacaccagtggacagggatcactaagagagtggggctcgggagactcaccttctgcgctgggtctgtgagaacatcacctggagtgcccctcccagcggatgctggggtcggttggattttcagcctggccagggttggctgcctcacctcaggaacaggcttagcctgtgctgccacgtgggtgccggtccttgctctggcctgaagggagggggccgggaaaggagggactgatcctgacccaaacccctaagtaaactgccctctgcgtccagactggactccccccagactctgtccaggcccttaccactgccctccctgtgcccccagcccgggctgcaggaactattggctgttcagccagcaggagcagcaaccatgcaggtgtttccagctgttaacgtgtaagccctgcctggccacgtgcttgctcttgccttttgtgcacagccagtgccaagggggagaggaggcagcagagacgttgtgcggaggggatgcccaaaggggactgcccaggctgggacagccctgatggggcaggggcgttccaggaaacagcaggttttgcctctcctcctcttcccaccccactactcccaccccattttcccggatcaggaaaaggcaggccagcattctagggaacaggaagtgaagttggcttccagctaggtgcctgccagggcctggaggaaattcctgcaggcctgagcccgtctgggaaggaccagtttctctccttgtcctggtgtcctgctttctgagtttcccctgagggtgggggagagctgtcactctcttcactctatgtcccgcttcctcccccatcctcatggagcactcaaaccctgaaccctcacacctttctatggttgtacccgtccccaccagtttcctctctggaaagtgaagaggaggctgggcacggtggctcacggctgtaatcccagcactttgggaggccgaggtgggcagatcacaaggtcaagaagttcaagaccagcctggccaacatggtaaaagcctgtctctactaaaaatacaaaaattagccgggcgtggtggcagttgcctataatcccagctactcaggaggctgaggcaggagcatcacttgaacccgggaggcagagggtgcagtaagccgagactgtgtcactgcactccagcctgggcgacagagcgagactccatctcaaaaaaaaaaaagaaagaaaagtgaagaggatagagcccactaggggtcatcaaggtgtgggacaggcagcatgttcctacaggaagaaaactctaactcctggttctggttctttttcatctcattcattcattcattcattcattcattcatttgttttgagatggactcactctgtctcccaggctggagtacagtggctcgatctcagctcactgcaatctccgtctcctgggttcaagtgattctcatgactcggcttcccaagtagctgggattacaggtgcccaccaccatgcctgattaagttttgtattttcagtagagacagggtttcactgtgttggccaggctagtcttgaactcctgacttcaagcaatctgccaacctcgacctcccaaagtgctgggattaaaggtgtgagccaccgcacctggccatctcatactttcacaattcattctttggtgcaagttttacaatatacattctatatttgtcaagtgataacttccatgtaacttataaaatacacataattcaggaagattgtgctaaaatacatttaaccaataggagtatgccgtcagaatattttggcaaacaagggtcactaagttttttctgtaaagggccaggtaggaggtatctcaggctttgtggccatatggcctctgtggcagcagctcagttctgcagttctgccatgaaagcagccacagataagaggtaattgagtgggtgtggctgtgttccaataaaactttatttctggaggctgaaatttgaatttcagagaaatttcatgtgtcatgaaatattattcctcttttggttcttcttccccccctccaccgccccctgccaagcattaaagaatgtggaacccgttcttagcagccggctgtgggctggatttggtccatggaccatagattcccagcttctgctctagaccacccgttctcagacttgaagcctgcttcagacttacctggagagcttttttccaaaatgcatattccagaaccccagccctgattttgtagattttctggaaggccccagaacccgcattctaacaaggagcccagttgagtcagacacaggtagtctggagtccacttttttttaaacagagtctcagtctgttgcccaggatgcagtgcaatggcgtgatcttggctcactgcgacctccgcctccaaggttcaagcaattctcgtgcctcagccttccgagtagctgggatcacaggtgcctgccatcatgcccagctaatttttgtattttcagtagagacggcatttcaccatgttggccaggctggtctcaaactcctgacctcaggtgatccaccagcctcagcctcccaaagtgctgggattacaggcgtgagtcaccgcgcccggccaggagaccacatgttaagaagcaaagctcaagggtctccaggatcctggtctgttctcttcagccagtcctgaggcctggggtgtgcagtgctgtgggagacccctgcatcagaataactggctccttcactaccttccaggagcttccatccagtgggggtgggggacaccacccgccaacagcacagcccagtcccaggtgctatggaagccctgggttcagcctggagccagggccagcgtcccgaggatgaggtgccgagatggaccttgaaggatgagagaagcctggactgcccttgagtggcgagggtgggctgcctccaggttgaccttaatcccttccctccctaccaccatgtgtccagatgaccttgggcaggtcccttagcctctctggatatcgggatatgacattgactacctcagagacttgtggggaggattcggcgagctgatatgcatgaagtgtatcaactagggctgctggctggtatctccttcccttgtcttcccccaccaccccagccaggggacagggtgctgctgagggagtgggctgggagagtcacttctggccttgtcttagggatctgagaacagggcatgggccccgtgtctgggagtgccctggtgcccttcctagtggggttgggcgtggtcagtctggccagggctggctccctcccccataaataggctcacctggaggtcttttcccatttgaggcaatgagatatgtatgtgaggctttatgacttgtcttttttttttcattttgagacagagtcacggagtctcactctgtcacccaggctggagtatagtggcatgatcttggctcaccgcaacctctgcctcccaggttcaagctatccttttgcctcagcctcccgcgtagctgggattataggcgcccgtcaccacacccagctaatttttgtagttttagtagagacagggtttcaccaagttggccaggctggtctcgaactcctgacctcaagtgacccacccaccttggcctcccaaagttctgggattacaggcgtgatccaccgtgctcggcctcaccacccgcctttcttgtggtgtagttcttgctgcctcaagaactacatatatcaggcctcaaaacccacctgatatatgcgtgcctgggaatagggaccttgacttttcccctgtcccatatgggcccaggggccggttctgggctggcccaggtggggctagagcagctggatccaggcacatgagatgtgaaagtgtgggccttacgccgcatggagcggctggaggaaggagagagggagcaagggtgccgcagggtcagattgccacagggccagggtgccacagggtcagggtagggccagggtgccatagggtcagagtagggccagggtgccacagggtcagggtagggccagggtgccgctgggccagggtgccgcaggatctggttgccacagggtcagggtgccgcaagcacaaggagtcacccgtgattctccagggtctggctcttgggctgagatccaggagaccttggcaggcctgtctttgggagtctggcacagccccagaaggccatctggacagttttcagacctgagaggaggaaagggcttgtgtctggagaaggtgccatgggggatgggaggtggaggaagcctggggccaatcaggatctggatctagcagggaacaccgaggccggtgttctcgtcccaccatgggactcagcctgaagaagacaaggtgaatgaacgaccatttctctctaactcagttggctaagaggactgagctggcgccgaggctctggacacaaatgggccagttgaccctgaggtttctttctggtagtggaggtggggcttcctctggctgaccctgcttaggtctctgatggaggtagcaggggctctggttcccccaaactggccaagtcctccaccatagcacccaaggggtctgggcagagtgcagcttccctcccctccccagcttggcttggtgggcacctgcctcccctgccctcctgaccttgatggctaatgcagccagccccaggcaggcacagtcacagccctcaaacaacatgaggcccaactcaagactcctgggtggtggtggtcaaggtgggggactctgtagccagtagagcactgtgggggcaagagactgacttgaaggcttggagcctcacatgcccgcctagtggggtggtcctgagggatatgacttctttgggcctctctgctcatttttggaacctgacccgagaaggagcccatccaagacaatgtcccgccctcagggagggtctggcagtttttatccctaaaggctgggattctcagcggagcatcctaggctgtagtacccacgacatcttgcacacaagaggtggaatcgcctgttgatgaagagcaaggctctggaatctgtgatcttgggccactcacttcacttatcaatcccttcgcttccttcttgcctgttacatggggtctgcaatctacccctcaggggcgctgacgagctcacatgagcctgtgacataaaacacctagcacggccctggcgcagtaagagctcaggaaacgggctgctgctgtggttactgtggacccaggcggaaacagagcagccccgcccctgccgcaggcatataaaagtgaccacttggccggtcacggtggctcacgcctgtaatcccagcactttgggaggccgaggcgggtggatcacctgaggtcaggagtttgagaccagcctggtcaacatgatgaaaccctgtctctattaaaatacaaaaaattagctgggcgtagtggcaggcgcctgtaatcccagccgcccaggaggctgaggcaggagaatcacttgaaccctggaggtggaggttgcggtgagctgagatcgtaccattgcactccagcctgggcgacagagccaaactccgtctcgaaaaaaaaaaaaaaagaaaagggaccactcactttggtctgattcttcagttctcatggtccttttacatcggtcatttcattgcattctccaacagtgtctgagggagactggtgtctcattttgcagaggtgaaaactgaggcttggcaagattaggtagcttgtccaaggacacacagctggtgcttccagagcgagacctggctttctgtacccaaagctcttgggtagtctctcccatcctgggatcttgagggtcacgggaaggaactgggtggtttgcagtgggacccttcacctagtgccttctgaccttgcagataaaataccatgaggagtttgagaagagccgcatgggccctagcgggggcgagggcatggagccagagcgtcgggattcacaggacggcagcagctaccggcggcccctggagcagcagcagcctcaccacatcccgaccagtgccccgggtgagtgcaggtcctgttggtgcagatgacctgaggcgaggccagtggggtggggaggaagccaggagaagacagacagacagatacaccttccggagccttgctcttaatcaacaggcgattatgcctcttgtgtgcaagaggggaccagaggacctgaggccgggccagctggggtggggaggaagtcggcgagagacagacacacacacacacacacacacacacacacacacacatgcacgcacgcatgcaggcgaggaaaagactgcttcccaagaccccaagttccattctcatccagaatgaggacgtgagcaccagggtcaggcctgtactgggccaagaggattgaaaggagaggcccccaggtcatggggctcagagcccctgcgtgggatacaacacacaggcaaatgtgcacacgtggacatcagcctttgagctgtggggcttgagccaggttgggggcggggtggaagtgcatggtatggacttctcgggagctctgggaggggctgggtttggcaggacagtttccaagccctgtctcctcccatcttccagtttaccagcagccccagcagcagccggtggcccagtcctatggtggctacaaggagcctgcagccccagtctccatacagcgcagcgccccaggtggtggcggggtgagtaaccctggccggaggggagaggccagaggcagggggtccttcgggaaggcttggacacagctcatggattctcctgacctttgcacccaccctctgttgtgtgtgatgataaggatctcagccttgtgagcagagaggaaattggttggcgtagtgggcagaggctggctgggactggggccctgcgttccagccctggtgtaccatgggcaggttgctcaccctgctttgggtggggtttccttaccccagctacctgggaacacacaaggcaactttctgcatggggccttccagcactgggcgctgctctcctcgcttcatgaggatggcccccacatccttcagctctcaggctgcccctgcctctgaggggcctccccagccatgtcgtgtaaagcgcatcaccctgatgctttgcatcactcgactccgctggctgccttcagagcactttttccaactaaaaagagctcttcgtgttggtcaccttctctgtgtcccctgctgggctggggaccctggcagcgtccgtctggttcacctactctgagccaggcctagagcaagtgaataagcccagcaggaatggggtgagatcaggcttcctgagccctcagagctgaagtcccggctctgtaagtcctgccactcactccacccatgggtgccgctgagccacccttaccaagctcctggcaggctcagcgcctccaggctgggtgcctgggaattcaaagtagctcacgtaggagcagaacagatacttagagagataaaatcgcctgagataatggctggctggagtctgatgctctgggcacacaaacaaagggatgttaggactgcccagggcactgtgggcgcaagagttagtctgaagtataaggttccaggcagcccagccagtccctccctcctcaatgggtctgtcctggatgtgtagggtccatctctgaatataaagccacctctctgccctctgggggcttacattccagtcagggggacaaacaagaaaacaataagaaaataggtgtataacataaggtcagcggtgacacgctgtgaagagaaagacagcagggtgagggatggatagaaagcagctggattaagacatttggccgggggtggtggctcacgcctgtaatcccagcactttgggaggccaaggcgggcaggtcacttgaggtcaggagttcgagatcagcctggccaacatggtgaaaccccctgtctaccaaaaatacaaaaattagccaggtgtggtggtgtatgcctgtaacctgtaatcccagctactcgggaggctgaggcagtagaattgcttgaacccgagaggcagaggttgcagtgagccaagattgcactattgcactccagcctgggtgacagagcaatatctccaaagaaaaaagacatttggccgggtgcgatggctcacacctgtaatcccagcactttgggaggccaaagtgggcagatcacctgaggtcaggagttcgaaaccagcctggccaacatggtgaaaccctgtctctactaaaaatataaaattagctcggcatggtggtgcatgttcataatcccagctactcgggaggctgaggcaggagaattgcttgaacctgggaggtggaggttgcagtgagccgagatcacgccatttgcactccagcctgggcagcaagagcaaaactccagctagaaaaaaaaaaagaaaaaaaagacgtgacatttgagcaaagtcctcaataaaggaaggagtgagccgtgcaacgaggacaggaagtgcaaaggctctgaggcaggaatattctaggaaagttcagggagcagcaggaagcccgaattgactagagtgggagagggtgggaggtccgattatgcagggacttgtgggccccaggaaggcctctgtgacctgtgatctgtgcagagcgacataggtttttggaagaccaccctggcagctgtgttgagaagaggcagtggtttgagggtagaagcagggagaccgtcaggaggctgttgcaggatataggcatggatgggagtggctcagcccaagatagaggcagaattggtgatgagagagactgaggttacttcatgggaggtgtgacttcttatcccatagacctgttggtttcaaactgtcctgtggagcctcagagaccagtcaagggcagtgaaggtcaggggaggtagaatgttgtctatagctataggatttatttttcttttttttttcctctttctttttttaaactccatcctggtagtaggtggcgctgtaggtttttgtgtgccttactgaacattacctagatctagggcttaagcggcagattttggctgaggcttggaaggtggaacctgatagactcgtcttctgtcctctgaagatttttctcccaaggaaagatctttgtcctgaacttggacaggactcatcatggcttctaaaagaaactactggtgcttataatcatacaaataatagcatacagggcatgttttttctgttttttttttcttttttgagacagggtcttgctctgctgcccaggctggagtgcagcagtggtgcaatcacagctagctcactgcagccttaacctcctgggttgaagccatcctcccacctcagcctcctgagtagctgagactacaggcatgtaccactaagcctaactaattttttattttttgttgagatgggctcacgctagtactttgggaggccgaggcgagcggatcacttgagaccaggagtttgagaccatcgtagccaacatgatgaaaccctgtctctacaaaaaagtacaaaaattagccgggcatggtggtacacgcttatagtcccagctacttgggaggctgaggcaggagaatcgcttgaacccgggaggcggatgttgcagtgagccaagatcacaccattgcactccagcttgggtgacaaagcaagactccatctcaaaaaaaaaaaaaaaaagagggagttggggggtcttactgtgtttcccaggctgatttcaaacttctgggctcaagcagttctcctgccttggcctcccacagtgctgggattacaggcgtgagccactgcacctggcctgcatgtcgtatttttagacattactctgtcatcatggctggtggaccttactgcagtcctgttcagggaggtggggcagagctgatgtgacccggtccctgctctgcctctggcccttagtagctgccaaaggttgtaaaagatcgattgctctcagaaagcaagacacagaggttaagaatctttgcagcagagcctggtgctccatttctgagttcactgctcccccaggctctgctccagggtcgtggagagttagaaaaaaatgctcagacccaggtgagccggcatgcagggccctaggctgaccacacttcccccacagaagcggtaccgcgcggtgtatgactacagcgccgccgacgaggacgaggtctccttccaggacggggacaccatcgtcaacgtgcagcagatcgacgacggctggatgtacgggacggtggagcgcaccggcgacacggggatgctgccggccaactacgtggaggccatctgaacccgcagcgcccccatctgtcttcagcacattccacggcatcgcatccgtcctgggcgtgacccgtccattcttcagtgtctctgttttttaaaacctgcgacagcttgtgattcctacccctcttccagcttcttttgccaactgaagccttcttctgccacttctgcgggctccctcctctggcaggcttcccccttgatcgacttcttggttttctctctggatggaacgggcatgggcctctctgggggaggcagggctggaatgggagacctgttggcctgtgggcctcacctgcccctctgttctctcccctcacatcctcctgcccagctcctcacatacccacacattccagggctggggtgagcctgactgccaggaccccaggtcaggggctccctacattccccagagtgggatccacttcttggttcctgggatggcgatggggactctgccgctgtgtagggaccagtgggatgggctctacctctctttctcaaagagggggctctgcccacctggggtctctctccctacctccctcctcaggggcaacaacaggagaatggggttcctgctgtggggcgaattcatcccctccccgcgcgttccttcgcacactgtgattttgccctcctgcccacgcagacctgcagcgggcaaagagctcccgaggaagcacagcttgggtcaggttcttgcctttcttaattttagggacagctaccggaaggaggggaacaaggagttctcttccgcagcccctttccccacgcccacccccagtctccagggacccttgcctgcctcctaggctggaagccatggtcccgaagtgtagggcaagggtgcctcaggaccttttggtcttcagcctccctcagcccccaggatctgggttaggtggccgctcctccctgctcctcatgggaagatgtctcagagccttccatgacctcccctccccagcccaatgccaagtggacttggagctgcacaaagtcagcagggaccactaaatctccaagacctggtgtgcggaggcaggagcatgtatgtctgcaggtgtctgacacgcaagtgtgtgagtgtgagtgtgagagatggggcgggggtgtgtctgtaggtgtctctgggcctgtgtgtgggtggggttatgtgagggtatgaagagctgtcttcccctgagagtttcctcagaacccacagtgagaggggagggctcctggggcagagaagttccttaggttttctttggaatgaaattcctccttccccccatctctgagtggaggaagcccaccaatctgccctttgcagtgtgcagggtggaaggtaagaggttggtgtggagttggggctgccatagggtctgcagcctgctggggctaagcggtggaggaaggctctgtcactccaggcatatgtttccccatctctgtctggggctacagaatagggtggcagaagtgtcaccctgtgggtgtctccctcgggggctcttcccctagacctccccctcacttacataaagctcccttgaagcaagaaagagggtcccagggctgcaaaactggaagcacagcctcggggatggggagggaaagacggtgctatatccagttcctgctctctgctcatgggtggctgtgacaaccctggcctcacttgattcatctctggttttcttgccaccctctgggagtccccatcccattttcatcctgagcccaaccaggccctgccattggcctcttgtcccttggcacacttgtacccacaggtgaggggcaggacctgaaggtattggcctgttcaacaatcagtcatcatgggtgtttttgtcaactgcttgttaattgatttggggatgtttgccccgaatgagaggttgaggaaaagactgtgggtggggaggccctgcctgacccatcccttttcctttctggccccagcctaggtggaggcaagtggaatatcttatattgggcgatttgggggctcggggaggcagagaatctcttgggagtcttgggtggcgctggtgcattctgtttcctcttgatctcaaagcacaatgtggatttggggaccaaaggtcagggacacatccccttagaggacctgagtttgggagagtggtgagtggaagggaggagcagcaagaagcagcctgttttcactcagcttaattctccttcccagataaggcaagccagtcatggaatcttgctgcaggccctccctctactcttcctgtcctaaaaataggggccgttttcttacacacccccagagagaggagggactgtcacactggtgctgagtgaccgggggctgctgggcgtctgttctttaccaaaaccatccatccctagaagagcacagagccctgaggggctgggctgggctgggctgagcccctggtcttctctacagttcacagaggtctttcagctcatttaatcccaggaaagaggcatcaaagctagaatgtgaatataacttttgtggaccaatactaagaataacaagaagcccagtggtgaggaaagtgcgttctcccagcactgcctcctgttttctccctctcatgtccctccagggaaaatgactttattgcttaatttctgcctttcccccctcacacatgcacttttgggcctttttttatagctggaaaaaacaaaataccaccctacaaacctgtatttaaaaagaaacagaaatgaccacgtgaaatttgcctctgtccaaacatttcatccgtgtgtatgtgtatgtgtgtgagtgtgtgaagccgccagttcatctttttatatggggttgttgtctcattttggtctgttttggtcccctccctcgtgggcttgtgctcgggatcaaacctttctggcctgttatgattctgaacatttgacttgaaccacaagtgaatctttctcctggtgactcaaataaaagtataatttttacctgcggacttggtttcctctctggctctgagctgctgttgtgtgtgtctgtgtgtgggtgtgtgtctctagctgtaaggtgctgctgtgtgtgtgtgtgtctagctgtaaggtgccactgtgtgtgtgtgtgtgtgtgtgtcctgtctgcttgggggcactggcctgtggccctcctgggacctctgctgcccctcggggagagaatgacttgtctggatgccaagggggagtttgctgctgtctgtcaggcccttggcccctacttcctccttgctgagaactccccaccaacctacttctggctttccacccgctcattcctctctgcccaacttggtgatgctcccggaagcttccctgagctccgtctcgtattactgtgtcacttcctcagtgacatatctgtctccccactagccagagcccttggggcaggtgatgagtctaattcatctctaaatcccgggtacctgcccaggagcggtgcggagctgttgaattaatgaatgagcttggctggggagcagttctagcactctgccgctgccaggcagagagcaggagctccacgcatttgaggaacgagatgacagggcattccacagtgggacgggacctggataaagctgtctgtaaggtggcctggcaacccaaagcactattcacagtgccttctgaatgtaatctttaatacacatcccctttcttccttcttcctcacaaccctgtgagagaagtaactacttatagaggggctcactgaaacccagaaaggcaaagcagattggtggcagtcacagctagtggcagagtggggcctgagacccccatgtgatgctcacagtctggtgctgtgccacccggccatggcaggccgcgtgcctgtgtctgtggcagctcttagatgtgtgtctcctgggctccatgttttgctccaggtgcccagggtctgtgactggccagaaggccaggcggcctcccctcttgctcattgggcttgggaagaggacagtggtagagaggggaatctggccctgctcagtgctgccaatcagcctcaggtccagctgcttgaggggcatttctctcttggggctcagaactaaggaattctccagcctcagaatcacagcagggtggagaggaggagggctctcctgagctgagcatttgtaatctggagaatgacatggccagagtcagctgagctggggcaatgtggggagcatccaaggctgccctgggtggtataattagagacagcactgacacctgctcccctccaggggtgcaggcagcccaatactttcccaatagaagggaattagttggcaaagcttgcctcatgtcggcctgccccactccccgggaggcttcattcaccttcagatctatttgatggaacagtgctttgggggacattgctgccaagtctccactccctgctcacagaaagctctgcctcctggaaatgggccaatgggaggagtttctggatttccttctggcagtggcctaagttcctgaggtcttgcattatgagggggttaccaatatatcttaaccccaggcctttaaaaaaaatattatttggggtgggggccaaggagactaggcctcagagacgtcctagggaatgatttaatttaatagaaaataattgaggcttataaaaaggcacaaaaatcctggctaacacagtgaaaccccgtctatactaaaaatacaaaaaataagctgggcgcggtggcgggtgcctgtagtcccagctactcgggaggctgaggcaggagaatggcgtgaacccgggaggcagagcttgcactgagctgagatcgtgccactgcactccagcctgggtgacagagcaagactccgtctaagaataaataaataaataaataaataaataaataaataaataaataaaaagaataaaataattctcttttccccctcagaagaaaccacttgaattttttaaattt

SEQ ID NO: 40 - DNA, 180862 bp, Homo sapiens
gctttctgctggagtccttttccatgtgccagatgcaccttaaaaaatgagtttaggctggtggctcacacctttaatcctagtactttgggaggcccagaagggaggatcatttgaggccaggagtttgagatcaacctggccagcagagtgagaccctgtctctactaaaatataaacaacttagctgggtgtggtggtgagcacctacagtcctagttacttgggaggctgaggtgggaggattgcttgaacccaggagtttgaggctgcagcaagctatgattgtgctactacactccagcctgggtgacagagtgagactctgtctaaaagaataaaaataaaaataaaaatgagcttaatgccagacctgtctgtatttcagtcctgcctctcctataacttctaggtgaccttgggcaagtcacttctctctggttcttggatgcccatccgaaaagcaataggattagaccctacaaactctaggcttctttctcaggataatcttttttatccatgagaattttcttggttctttagctagcatagactccccacagaaggtcccagaggaataagagtttatgaacagactagaactggagagttcgtggcagatgtgccaggttgtcagggggataaagggccgctccttggttctgatttcctcagcagcctgtgcttgatgccaagtggtgttgtccaacccagacctgattcctcccttgactgtcctccgaccttccaattctagctgcatggacattgcacacttggtctcaggagactccagtttcagtttcttagctggttctctgagtgaggtgatggggaatccctagcatttcttagtactgattgtgagcttcccctctgcatgttagcatgcagttcgtgacgattcactacaaatctgctctttatggagggagagtatagggggagcccagtatcactttccaaatcctacccatcctttgaggcccaggcaggccctacctataccacagtttgtcctctgaactctgagagcacttaacttcagggacacccaaattgacatttacatcaagggcatgtgaattattttctattttagaatagagtttgtacttcttgaaaataatattgtaccatgtagctctttttggtaatctttgcattgccttgaatagtgctgattttaaaactagattttaaaatataatttggcatagttcaataagtctgggtttcatgtgctgtcttctctatcccaggagattctgtctcatgttattgttaagagcatgtgtggcatgcctagcaagaaacctgaagccagctccttgagattgctccctctttcactctggagattcctaaaagtcaatgcaagaattctagaaaggagcccctgatggatgccaagggtgtcatttgaatgggcaccattgttgctggagaggatgtggagaaataggaacacttttacactgttggtgggactgtaaactagttcaaccattgtggaagacagtgtggcgattcctcaaggatctagaactagaaataccatttgacccagcaatcccattactgggtatatacccaaaggattataaatcatgctgctataaagacacataaacacatatgtttattgcggcactattcacaagagcaaagacttggaaccaacccaaatgtccatcaatgacagactggattaagaaaatgtggcacatatacaccatggaatactatgcagccataaaaaaagatgagttcatgtcctttgtagggacatggatgaagctggaaaccatcattctgagcaaactatcgcaaggacaggaaaccaaacaccgcatattctcacgcataggtgggaattgaacaatgagaacacttggacacagggtggggaatatcacacaccggggcctgtagtggggttgggggagggggagggatagcattaggagatatacgtaatgtaaatgatgagttaatgggtgcagcacagcaacatggcacgtatacatatgtaacaaacctgcatgttgtgcacatgtaccttagaacttaaagtataaaaaaaaaaaaaagaatgggcaccattgtgtccaaggtgtgctgtggatatagtttgtgtcataagtgaaggagagctctctgagttcatgttctccaattggagtgccatggacacttcaaagtatctgtccaaagaacatgttcataagagatgccaaaaagcactgtgcttgtttatatccggggcatctttgggccacttggtctttagtcttccaaagactgattgccttatggaagtagagactgttcaacatggaatacttaataagcaggtgcttaataaacatttgattgattgatgaagggactttaaacttttccaaagatgctaccgctccctttacccctgtctggagaatgcctttcttccttactttcaaatttcctttgttggacactgactgcagatcctggtatcggcagtagcttgagtatcatggcagagcagagaacatcttgctcctaaggaatggactctagggtacctgttttcacctgcagtgttgtcatttattcattcaacaaatatttagtgaacactatgtgccaggcgtggtgctggactctacaaatacaaagatgaacacacatggtccctggccttgccaagtttacataaagcactgtgggtgtattactgtgctccggatgctgtaccaaaataccacaggctgaatggcttaaggtccagcagggttggcttctggtgagggccctcttcctggtttgcagatggccaccttctccttcttgctatgccctcacatagcctttccttggtgcatgtgtgaggggagagggagggtgttctctggggtctcttcttataagaacacatcttattggatcagaaccccacctttatgccctcatttaacactaattatatccttagaggtcctatctccaactgcagccatattgggggttagggctttaacatatgcatttaggggggacataaacattcagttcataaaaatgaggcacatgaacaaatgaaaaagcaattacctgtaagcagtaaaagcataaaaacaagcaggaggtagtatacactaaatttaggatggggagggaaggggatgcaaagagagagaggtatgcaggggcttaaactggtatttgctatatctactggtaatgatttgtcttcattcaagacctacaaaagtcttcattgtattattctttacacctttaagtattaattatttcacaatatttaaaaaataatagaagacactattattgtgcaatgtagtaagaggtaactaggggggcatgctcaacatgctgtaggagcacatagaaggggaatcaggaagggtataaaaaagatggcatctacagaggagtagaaggggcccaggtgcagggggaaggcagtggtgagtggtcagtagaaggaccaaggccaggctgggagtggtggtccatgcctgtaatcccagcattctgggaggccaaggtgggaggactgcttgagcccaggagtttgagtgtagtctgggcaacatggtgaaacctcatctctccaaaaaaatccaaaaattagccgggtgtggtggcgtaggcctgtagtgccctctacttggaaggctgagaggcaggaggattgcttgagcctgggaagtcaagactgcagtgagctgtgatcaagccactgcactccagcctgggcaacagagcaaggccctgtctcaaaaaaaaaaaaaaaaaaaaaaaaattaccaaggccagaagtcttgccgggctgacctcagcaagcttactttctctgagttgcttaatttgggaattcagaagacagggtgagctatactgtttaacttggcttttggggtgatgtggcctgtggggccaatgtctggccttttttgcctgctcagtggtgtggctgtgtttggcacgtgaattatgtttgactttggccatgtctttgaaggcaatctctctttgctgctgtggcatctagaacaggtggtgtttacagcgtttcccagaattgcctgcttcctaggactttacctatccatttgtccctctattcattcatccagcatccattcactgagcacctactctgccaggtattaggccaggtgctagggcttgaaggcccatcaacctagtcctgggccttgaggagcttgacaagcaatggaaaatagcatgggcatccacatctccaagcacatccttatacctcatctcatttagccctcgggctgccctgtgtggcaggtttccattctatgattgaggaagctgagacttgaaaggaaagtgacttgatatttgactctaagctaaggggcttttcccactatgccaggctgcctttactgatgttgggcatggtcggaagagctcagaccacggctgccccctctcttcctgggaaagacaccctcagacaggtctttacatcccatcctgttttacgaaggtttctgagaatgagcagggagaaggacctacaagtaacctttatagtcattcagtccaaccacctcactgatgacttggttacccagaggataaagaaaagcttagcttaccagaaactccagcccctgttattatgaaaaagaacaggacaagtcttgagacccctagaggaggcctctgatctggagagaatcgacagaggagccagacccagagtcccctggagggagccaggtctgcagaagctcagaaactcagtcctgcctttcttgcatatggagtccatggtcatagtagcagtgtcctggctctacccagagtgtccaatggcttcctgtccctctggacttgtcatttagtgggcaaagtccaagatcacacctctcactcctgcccccacctcttgcccctgttttatctcacttgggaataatctgttcccatgtgaagccaacgaaaatgagcctccaccagtgtggggtaacccaacaggcagatttggtatggacacagggccccagccagatgaagacatcccaaagttgagaagagttcagtaatcagaaaatctaaaaagatgctcttttaatttcagcacacatgtacattttgtgttgtctggtgagtattaggaattatatttggagagagactgcaatctttatagggttcagggccttttaaggtcttactcggaccttggacaaccaagagggaaagggccaacaggtgtgaggaaaataagttgtgaggctgcagggaggaagaggatggctcaccaggatgaagaaaagggaaggagaggagctctcagtggtgcaattggttagcgtgtggcacttacatgaaaagggaaggagggcttggcacaggctagcgggaagcctcaggtcaccctgacacctgttgccatggcccggcggcggtttcctgacttgtcaggacgtgtgcacagagagaacaatgggtttgccttgacaggaagatgcttcctgttttgctgcatgggttcattgttgggcattaagagggaggggtctatgtgtctgtgtttttcgtgttgccaaaagctctctgaggggagaagtgggggtgagtgaggacgggggtctgaggaaaggtgaaagggaaaggaagggagcagttattcttccagaattgctcagccaaacctcacgccattctagtttcagccaaccagagagggtggggctggccctgctgtcctactgtccccaagagctctaagcccagagcttttgtgcatgactgagggctgcccagaatccctccttttgttccccagtgagacccggtggtgacctttatcttggcaaggtggcaagggcgacaggaaacttggactgaaataacctctgtggtgaaagcaggggtgggaaatgttgaggctggtctcatggcgagtgataaattagacatccaagatgcccactccccacctccagcctgcccattgctgggccaaccctgcacattcacaaccgaaattgtacatttttaaaatttattttttattctttttaaaaaattttccatacgttattggggtacaggtgatatttggttacatgagtaagttatttagtggtgatttgtgagatcctggtgcacccatcacccgagcagtatacactgcaccatatttgttgtcttttatcccttgccccttcctgctcttctccccaagtccccgaagtccattgtatcattcttatgcctttgcgtcctcatagcttagctcccacatgtcagtgagaacatacaatgtttggttttccattcctgagttacttcacctagaataatagtctccaatctcatccaggtcattgcaaatgctgttaattcatctctttatggctgagactaatcagatggaatactattccattatacatatatatactacagtttctttatccactcgttgattgatgggcatttggattggttccatgattttgcaactgtgaattgtgctgctataaacatgtgtgtgcaagtatctttttcgaataatgacttcttttcctctgggtatacccagtagtgggattgctggatcaaatggtagttctacttttagttctttaaggaatctccacactgttttccttagtggcgtactagtttacattcctaccagcagtatagaagtgttccctgatcactgcatctctgtcaacatctactgttttttgattctttgattatggccattcttgcaggagtaaggtggtatcgcattgtggttttgatttgaatttccctgatcattagtgatgttgagcattttttcatgtttgttggccatttgtatatcttcttttgagaattgtctattcatgtccttagcccactttttgatgggattgtttgtttttttcttactgatttgagtttgttgtagattctggatattagtcctttgtcagatgtatagattgtgaagattttctcccactctgtgggttacctgtttactctgctgactgttccttttgccatgcaaaagctctttagtttaattaggtcccagctatttatctttgtttttattgcaattgcttttggggttttggtcatgaaatccttgcctaagccaatgtctaaaatagtttttccaatgttatcttctaggacttttacagtttcaggtcttaggtttaagtccttaatccatcttgagttgatttttgtataaggtgagagatgaggatccaatttcattctcctacatgtggctagccaattatcccagcaccatttgttgaaaagggtgtcctttccccactttatgtttttgtttgctttgttgaagaccagttggctgtaagtatttgggtttatttctgggttctctattctgttccattggtctatgtgcctatttttataccagtaccatgctgttttggtgactatggccttataatatagtttgaaatcaggtagtgtgatgcctccagatttgttctttttgcttagccttgctttggctatgtgggctcttttttggttccatatgaattttagaattgttttttctaactctgtgaagaatggtggcagtattttgatggggattacattgaatttgtagattgcttttggcagtgtggtcattttcacaatattgagtctacctatccatgagcatggcatgtgtttccatttgtttgtgttgtctgatttctttcagtagtgttttgtagttttcctcgtagaggtcttttgactcctttgttaggttattcctaagtattttatttttcttggagctattgtaaagctatttatttttcttggagctattcttgagttcttgatttgatctctgcttggtcattgttggtgtatagaagagctactaatttgtgtatattaatcttataattggaaactttgctgaattcttttatcagttctggaggagtccttagggttttcaaggtaaactatcatatcatcagcaaacagggacagtttgacttcctctttgctgatttggatgccctttatttctttctcttgtctgattgctttggctaggacttccagtactatgttgaagaggagtggtgacagtgggcgtccttatcttgttcctgttctcagagggaatgctttcaacttttccccattcagcattatgttggctgtgtgtttgtcatagatggtttttattacattaaggtatgtcccttgtgtgctgattttgctgagggttttaatcataaagcgatgctggattttgtcaaatgctttttctacatctattgagatgatcatgtgatttttgttttaaattctgtttatgtggtgtaccacatttattgacttgcatatgttaaaccatccctgcatcccttgtatgaaacccacttgatcatggtggattatctttttgataggttgttggattcggttagctaatattttgttaaggattttagcatctgtgttcatcaagaatattggtcttagttttcttttgtggttgtgtcctctactggttttggtattagggtgaggctggcttcatagaatgaattagagagggttccttctttctctatcttgtggaatagtgtcaagaggattggtaccaattcctctttgaatgtctggtagaattctgctgtgaatccatctggtcctggactattttttgttggtaatttttatttatttatttatttttgagacagagtctccctatgttgcccaggctggagtgcagtggcatgatctcagctcactgcaagctctgcctcctgggttcacgccattctcctgcctcagcctctccgagtagctgggactacaggtgcctgccaccacgcccagctaattttttgtatttttagtagagacagggtttcactgtggtctcgatctcctgacttcatgatctgcccgccttggcctccgaaagtgctgggattacaggcatgagccatcacgcctggcctttgtcagtaatttttaaagtaacatttcaatcttgctgcttgttattggtctgttcagggtgtctaattcttcctgatttaagctaggaaggttgtatttttccaggaatttatccatctcttctagattttctagtttctgtgcataaaggcatttacagtagccttgaatgatcttttgtatttcagggtgtcagttgtaatatctcctgttttgtttctcagtgaggttatttggattttctctcttcttttcttggttaatcttgccatggtctatcaattttatttatcttttcaaagaactaggttcttgtttcatttatttttgtattcttttgtttcaatttcatttagttctggtctgatcttggttttttcctttcttctgctgggttggggtttggtttgttcttgtttctctagttccttgaggcatgaccttagattgtctgtttgtgctctttcagactttttgatgtaggcgtttggggccatgaactttcctcttagcaccgccttagccatatcccagaggttttgataggttgtatcattattgtcactcagttcgaggaatttttaaatttccatcttgatttcatttttcatgcaatgcttattcaggagcaggttatttaatttccatgtatttgcatagttttgaaggttccttttggagttgacttccggttttattgcattatggtctgagacagtgcttgatacaatttaaattttcttaaatttattgaggctcattttatgacctatcttatggtctatcttggagaaagttccatgagctattgaatagaatgtgtgttctgtggttgttggatgaagcattctgtatatatctgttaagtccatttgttctaggatatagtttaaatccattgtttctttgttgactttctgtcttgatgacttgtctagtgctgtcagtggagtattaaagtcccccactattattgtgttgctgtctatctcatttcttagactattagtaattgttttataaatttgggagctccagtgttaggtgcatatatgtttagaatgtgatattttcctgttggacaaggacttttaccattatataatatccctttttgtctcttttaactgctgttgctttaaagtttgttttgtctgatataagaatagctacccctgaacacttttggtgtccatttgtggtcaccagtggtgagaaataccttttcccaccactttaagtttatgtgagtccttatgtgttggtgagtctcctgagggcagcagatagttggttggtgagttcttatccattctatggttctgtatcttttaagtggagcacttagggtatttgcattcaatgttagtattgaaatgtgaggtaccattgcattcctcatgctctttgttgcttgcgtactttgttttctgtttatttttgctttttaacttgtatttttgttttatatgtcctgtgtgatttgtgctttaaagagattctgttttgatgtgtttccaggatttgtttcaagatgtagagcttcttttagcagttcttgtagtggtggcttggtaatgatgaattctcttagcatgtgtttgtctgacaacaactgtatctttccttcatatatgatgctgggttttgctggatacaaaattcttggctgataattgttttgtttgaggaggctgaagatagagtcccagtcccttctagcttgtaggatttctgctgagaaatctgctgttaatctgataggtttgttttgttttgttttttaataggttacctagtgcttctgtctcatagctcttaagattctttcctttgtcttcactttggataacctgatgacaatgtgcctaggtgaagatctttttgtgatgaatttcccaggtgttctttgtgcttcatgtatttgtatgtctaggtctctagaaggccaggaaacttttccttgattattcccccaaaacatgttttccaagcttttagaattgccttcttccgcaggaacaccgattattcttaggtttggtcatttaacataatcccaaacttcttggagtctttattcatattttcttattctttttttttgtctttgttggattgggttaatttgaagaactcgtcttcgagctctgaatttctttcttcaacttgttcaattctatcgctgagactttccagagcttttgcatttctaaaagtatgtccaaagtttcctgaatttttgcttgttttttctttaaggtgtctatttcctctaatatttctcccttcacttcttgtatcattatttggatttccttgcattggacttcgcctttctctggtcccttcctgattagcttaatgactaacctcctgaattctttttcaggcaaatcagggatttcttcttggcttggacccattgctggtggactagtgtgatttttggggggtgtcgatgaaccttgttttgtcgcattactggggttggttgtctggttccttctcatttgggtagcctctatcagagggaaggtctagggctgttgaaggctgttgttcagatttttttgtcccacagggtgttcccttgatgtagtactttcccccttttcctgtggatgtggcttcctgtaagccaaactgcagtgattgtctctcttccgggtctagccactcagcaagtctacctggctctgggctggtactggggatttctgcacagagtcctgtgatgtgaactgtctctgggtctctcagccgtggataccagtacctgttctggtggaggtggcaggctgtgcaatggactccatgagggttcttagctttggtggtttaatgctctatttttgtgctggttggcctcctgctaggaggtggcactttccagaaagcatcaactgtagtagtgtggagagggactggcggtaggcggggccctataacttccaagattatatgtcttttgtcttccattaactaccagggtggacagggaagaaccattgggtgggggagaggctaggcatgtctgagctcagactctccttgggtgggtcttgctgtggctgctgtaggggatgagggtgacattcccaggtcactagagttatgtacctaggaggattatggctgcctctgctgagtcatgcaggttgtcagggaagtgggggaaagccagcagtcacaggcctcacccaggtcccatgcaaacccaagtgctcactcccaccgtgcctccccctacagcaccgagtctgtttccaggtgaagggcgagatgggcttgaaaacttgcctgaggctttttacctcccagagtatttgggttgtctcctgggtcttgcaggagcagtccgcttccttcagagggtttgtgggtcctctcagggtggctggtttgttcttgcagttgatctggagctaaaattcacaatgcaaacctccacatggctgctctgtccagagctgcaatctagtcctgcctcccatccgccatgattcccacttggattgaaattgtccattttaaacatgattagaaagcccaggtatcttgatgctcattgatcctgagaccatctgttgcagtgaaaacgtgtgtggggttccagtcttggctctgccagccaaatttccatgaggcccttttctcctggttccttatctggggattgaaccagatgatcttgtctgtcctctctggtctcacatttggggattccattgatcatctcctagtgggactgtggcctcagagaagcttaggttatgcacatttaggaaatcccagtagagctttggtcagaaagaaaagatgggtgaaaggtggagtcctgaaaccctcctgttcctccccatacaactgtttaaggagaccatatctatttcatcctcctcttgtgcttttaatggcattcaaagcccttctctatctggcccagttgacatcactgacctcaatctctctactcccccactgtagctactttgtgctccagccattccgagtgacctgtgggttccctaaaagcattgtgcactttcatttttctgggattttccacatgctcttctgtcaggctaaggtggctccagctccttctctcccgtgtcacactctaactcattattcaagacccagctcaaatactctcacctcctgaagaattcttgaagtccctgaacccacaaatgctgttcacactgctaggatagcacctcttagtcaaatttgtatcatgggcatgcatgcatttttctccctctatcagcttaccattacgtggcatcttatttatttcttacatatttaacacagtacctggcatattcttggtgctcagccaaagagtgctaagttaaaatgaaggatatttctgttgatttgaccccaaacaggctacactcagagtgcataaaatagtggccactctttgagttgagttggatctgataattaattggtttagatccagttagaggccttttatgtctgcctgggttagacagaaactgatagtaaatggaaatattgcaaggggtgtaaatttcagcttttggaaatttgcaaggatttttatattctaccttctttatttctttttcccttgtgtgcttaggtagggaaaaatcattggctaggttgatcaaggggatcctcaaatttcagtatcagtcttagctttcatgtaatgctcatgaggtccttgctgtggggaagttctcaggctgcgcaaggcaccacagcccaggattcagggagctcccagagtgataggcaggccaccaatgtcaacgctcttacatactgtttgaggattaactggagctaatacttattcagcacctactgtataccagaccctgaatcacctcatttaatctcacaacaaccctgcaagttaagcagctgtgatgtccattctacagataagaaaatggagactcagagaagttaagaacttccccaaaggacgctcatagctagttgcagcaaaccaggaatggaactcccccatccatcctctttcccccataccacactagttgataagcaggaatgcaacttcacaaccactgaaagccctgttaaattaagcttagcctaaatctgccttcttacatattctaagtccagcctaaaggtttctccatacatagtgaactacaacttaactggatgtgtgaacagactgtaacctactcctgtgcaagtcactgagttttggccaaccaaggttgccaactgtacagactatgttcaaataaggcaatgctaagataaacaatcctgctgtttctatgcctcacttccattttctgtaggtcactttccattttctgtccataaaccttcttctaccccatggccatgctagagtctctctgagcctactctggctcaagaggcttcctgatttgcaaaccgttcattgctcaaactgttaaatttaatttgtctaaggtttttctttcttcttcttcttttttttttagatggagtttcactcttgttgcccaggctggagtgcaatggcacgacctcagctcactgcagcctccgcctcccgggttcaagtgattctcctgcctcagcatcccaagtagctgggattacaggcatatgccaccatgcctggctaatttttgtatttttagtagagatgggctttcaccatgttggccaggctggtctcgaactcctgacctcaggtgatccacccgcctcggccccccaaagtgttgggattacactttgagccactgcgcccggccagtttctcttttaacagatgctgtcagaagtaggatccaaggccgggcgcggtggctcatgcctgtaatcccagcactttgggaggccgaagtgggtggatcacttgaggtcaggagttcgagaccagcttggccgacatagtgaaatcccgtctctactaaaaacacaaaaattagccaggcatggtggcatatgcctgtaatcccagctacttgggaggttgaggcaggataatcacttgaacctgagaggcggaggttgcagtgagctgagatcacgccattgcactccagcctgggtgggtaacaagagtgaaaccccgtctcaaaaaaaaaaaaaaaagattgagtctcctctcttatcaaagagtaaaggtttttgcttttaaaaatctcttatcactttggctaaatgaatgatttttttttatggtgacctgtgatcctattttggtcaattgtctgaatcttttgacatacttgacaggcttcctgaaaatcaaatttcaacttcaaaattaagtggtttgtttttttttgttgtttacctgtacatttggaatgctacagagggctcctgcagcatccaaaagagagataagtaagattacgtgatatattaaattacaggaagcactgtcaaataagaaataatgtttaatcttcttcaagttgtatttttataaatattttattaatatatgttccaaaattgtatgggattcctaaaattctgatatgtctggatatatgctatcaattataactatggttatgttacataattttaggccacaaaaataaccaaatgtccttgtcaattgtatctttatgaccattttaaatcatttccacagttaattcctgcatttagatgcagtttctgaaaactcttcacaagcaagcaaaatcctagagtaatgtgtcttcaaagaggttcatacaatgatggaaaggactctgacaagcactcttgaatacaggtttaggatcctatcatttggactggctaagaattcccagaactctaataaaaggactgactgatttataaaactgctaacccaagtagggcaagaattaattgacaaccaaaaaaatactttgacagattttcatgctaaaatcagctagcactaaaattatttagatatataatttaaatgaactccctggtccaagtcaaattacccatgaaaaccatctaataaacagtgctatgcacctaaattggagaaacaaaattggtatttaagatgtaagtccagtataagcatagactcatggagaacctggaaggcttcctggtccttcctgagtccttcaagttcccattattagaagctctgaatttcaagacttatcataaaacagataaaatgatccaaattaaaaatatatatatattggtgtggtgactgttatgaattgctaaaatagtttatgatcaatatttgatttgtcaaacccataattcttggaagacaataaaaacttcaggtacatttctgttatctgatgggccatttaaacacttatagggggatttggctgggctcagtggctcatgcttgtaatcccagcactttgggagcccaaggagggcgatcactcaaagtcaagatttcgagaccagcctggccaacatggtgaaacccagtctctactaaaaatacaaaaattagccaggcgtgtgatgtgtgcctgtaaacccagctactcaggaggctgaggcaggagaatcacttgaactgggaggcagaggctgcagtgagccgagatcataccactgcactccagcctgggtgacagagcaagactctgtctaaacaaaacaaaacaacacaacatttatagagggatttaattcaattgtcatttttgatacatgctttctggttctataaaagctttcccatacaagagggctaatattacaacaatagctaaaaggttattaggaaatgtgttttcctcgtgggacattcccagagaaatctccagtgatagagatacttgtttcactggacaagttgtaatatagttaaatacggtattacatatatgacagcattaggcaaagctaactgaactgacttgattgctttggtcaaaggtattagagattgatgacaatcagacccacttccagtggaaaacataagctgatcccttatgaaatagtcactgaaatgcctatgcactaaataatggaagctcatatatcttctgctactaaactctgatacgactaaatgctgcaagtctttagtgcgttgtgccatggtgtattttcaccggtaaagaaagcgtttcatggttcactgactaatcaaacccttcatgatctaaaacccagagactgggtcttctgagaacaacatcagaaaaagattgcccttgttacccacactgcagaaaactttgggaacttgaaccttgttcgtatctcataactcagaagggcacctccagactcttaattgtacagccactggagacctaaagatagagataaccaaggaagtttctccccagaaacagatggcatcccagatatgaacaactttttcccaagatcatggatcaagacttctctgctaccgtgagacttgtatctctcagtttttccttgcttttgccttgatatggtttggatctgtgtctccacccaaatctcatgtctaattataatcccaaatttggaggtggggcctggtgggaggtgattggatggtgggggtggtttcttaggttaacgtaagaaaccccttggtggtgtcattgcaaaagtgagttctcatgagatctggtttaaacaaaagtgtgtggcacctccccactctctctctcttgctcctgctctgatgatgtaagatgtggcctgctgcccctttgccttctgccatgattgtaaatttcctgaggcctccccagaagcccatcggaggccagcattatgctttctgtacagcttgcagaactgtgagccagttaaaccccttttctttataaattacccagtctcaggtatttctttatagcggtgcgagaatggactaatacaggcctctatgaaaaatagaactgaaaataaggtctcttttgtacactcatggagtatacttttattagtggaggatttcgaagcaaaccttttatatggacacccttacgtcttgacagatgaaggataaagggccaatgtggatgaaaaattttattggtatctttgttgcttcataatcactcagaaacagaacactggtccactcctcttaacctatgtcataggttaaaacattgccaagaggccttcactcttctagataggcatcatttattagatctttttttcttggtttagagtaaatgaggcaatgattaaaaatttatccctcataataggctagataacagattctactacagagactctggttacacaacagattttaaattctcttgctaaagttgcactaactaatagaattgctctggtttacttactggctaaacaaagtagtgtctgcagttgctgacacatctaattacacacggaggaatacatagggtattatagagactcagttgtaggggattaatggacaggctgcttggttgaaatgagtaaactctttatcgagtttattgtttgatctatttgattttagttggtttggttcatgcggaacctggatacagagcatactccaaactcctggtgttatccttctgatagtcataattgtaatctccctggtgtgctgtattctctcaaaagttctaaatgtttgtacgtagccatctccagaatgtcagatggtctctcctagattggaatgacaataactcaaagaattgtgtggccataaggacaccgtaacctatgaactatgtgctgagactgaaaacccaaaatgatggtaagcgagagtggagctcatggcctaagttttggtcacactctcacctaagtgagaacctgaccagaagggggaaaattttaaacaaaattataggaggcaattgttttggactgagattgtgcattagaccccagcagaccagaccaaaccaaaacagagtcactcaaatgtgacatgatcgatctgaaactttaagaaaacagaccaaaagttttgcttttctcttaaaaacaggagactgcagtacaaagaggtccctgctactctaatccttaaaaaaaaaataacctgaagtccttgtttccacctcacaaacccactgttctgctatttcccaatgggatttaggaccaaataggtacctttatcatggtgacagagtgacatcagtgcctaaagttttggtctatctctcaaaattaagaggatgaccaaaaggggggaattatcaaattaagtttagcttaaagctgcttccttacatattctaagttctgtctaaaggtttctcctacactgtaaactgcaacctaactggatgtgtaaacagactgtaacctactattgtgccactcattgaatttcagccagtcaagggcagtcaactgttcaaagcgtgtttaaataaggcaaatgccaactataaccaatccagccgtttctgtacctcacttcctttttctgtctgtaaatctcccaccaagtggctgtgctagtgtctctctgagcctactgtggctcaggcgaatacctgactcacacattggtttttgctccactaaattctgttaaatttaatttgcctaaggtttttcttttaaaagccccaaagttaaatgcctctgttgtctgcacaccagcaaaatagaagcctcatgcagccctcgtgtcaatacagtactcatttgtgaattagcagttacctgagtgcttctgattggtggagggtaggtcacatgaatcaattcctacatgactgcttctgattggtggagagtaggtcacatgaatcggcacctacatgactgcttctgactgctggagggtaggtcacatgaatcaatgcctacatgagtgcttctgattggtggagggtaggtcacatgcctgtgtcctaactgcaggggataccgggagtttgagttcttgacttctatttcgggaggcaggacaataataaaggaatttcctccagaaagaaaagctgtccgtaagatgatgagccgccatcatgaatgtgacaggtgtccattacactgactcaccctgaatgtcacaccataggaagtgaagttagatgtccgaacacattccccttttaaaatcctgctcctttcttaaaatatggtttagagcaaagagtttttattacatagttttttgaggtataattttacacgcagtaaaaattacccattctagcgtacaggtctagaattttttaaaaaataaattcatacaattatgtactaccaccaacaacatacggtatataatagtttcatcacacaccactgttccctcacgtgtctttgtagccaaccccttcctctaccctcagctcctcacaaccactgaactggtttctgtctgtagtttttggaacaaagactttctaagcaaagaacaaaaatggagcagaagagagtctgtgtgtaaataccaatgtatgcatgttggaatctccccctccttggctcctgtcctgggggtgaagaaagataaagattattgaaaacaaattgaaatgatcaaaagtataatttcttttcaatgtcagatttagggcttaactcaggaagatggatgagctcactattgtggctccggctcactgcatgaattcctgtttagagtgataggtaaatagcacctgaacaaatgcagcctgccctcagattcaggtggaggaacccacaccttagaggtctttctctggccttcctcagacggtacccttgtcaggtgaaggactggtccatgtccccccttctatgtcacactccaggtctcaggacccagtattcccggcccaaagagtcctcagccactttcaggcttgcatgggcctcttcccagggaaaatcctccacagggtagactgcacagcttggtatgcacccctagactctgttgatgaccacgtcctggctgtttatggtggctgtagatgacgcttaggtatccaggctggggagtagagaaggggagctgaggggagagtctgagagttctcgaaggagtctgagaattctaaatttaaacatgaccctttaggtcgttatgaaaatgtatagtttcattatgaaatggaacctattttataagtctgttagctctatttataatgtaactatctgggcaggtagtgcgtaggcctctgtttgtactcttgcctgggccctgcaaatatttgagacaggccgaaatgaatctaactgtgcttcctcagagagttaccaaagctctctgcaggccaggctccctggtggcagccctgaacccctttcctgaggatgtgggagaggaaaagagggagacatttcttggatgtctgctatgtgctggaatctgacctgggctgtttccctcacatcatctcatttgggtctcccagctacttgccagataggtatgtcattgccaatgtatagatgaagaaatggaggcctagcagcatttaagagccttaagtgcccaagctgggattccagcgcagatctgcgtggcttcaagtctggccgtcttccatgctgccattagagttctgtccaccttggctctcctccccgacaggattcccagagggcccgaagtcagttacttaaatgggttgaaatcagacatgtactatgctttggggagaaacgaaaccaaaccataaatttcccgaaccttctctggttggccctgtttttgttccaaagcagaaaagggcaaagtacaggagggggctggggcagagagagtgcaaacacatgggtacagaaggcacgtgataattcgctgtggaagcaagagagcgggtgggtgcggacgtgggtgggagtgagggctgagaccaagaagtttggcttttgagtcagtcctggttttaaatctaggtcccaccacttacaaattgttcaacttagaccaagttgcttaactacatagaatctcggtttcactatcttcaaaagataattgataatagggtttcttctaagagtctttgtaaggaggaaacgaaatcgcatcagtaaggccccagcccgcagcaggttctcgacaacattcattcccttccaccctctccttcctcctattgacagagttgcttcagcccattttggcattctgtagatttctacagctgagaaatccaaaaataaacttgaattatggtgggtttagcaccgaggcacttctgtgtaaatagcagaagtgaaaagaaaaaaaaggccatctcatttctagtatttgaaaccaagcaccctcatcgtgtgggcgactcatagtagagggggcagggggagcgaggtttggcattttttctctgctgtttttgtttttgttctgtgatgatgtgggggactctccagggacatcatgcgtcacagagcaggggagaaaggggaggtgaagacagagcaagtagggaaatttgatccggtctctgacgttgtagggcagaattggggaaagagggagtgtcggtcaatgggtggaaaaggtcccgtggctgtcatgcccttcttacctcctgccccgagacacagttgggcaagtcccttaattcatttttcagtgagtttcccaagaaaggccgtcttccggaacatgtgttattcctgaaatacatggcagactcggttgaaagggtgtgtgtttgtgggtcacagagactcacaaaaagagaaggcaaggggctggcccgcttgacgtgagcccacatggatgggagtcacaggtgattattattattattaacaaaaggcttcccttacctccccaaacctaacttttcactattcataccatccatgtcttataggcccagggagatgaaaaagtgagtttacccaagggaattcacaagggcctaagtagaagagccaggatttgaactggctgcccctttctctctatggggctggcattggccatcctaataatgggggaaaagttgggttaacgaccagcggcctggggaattcaggtcaccttgatgtttgccctatggtcttgagttttgcaacttaaaaaaacaaaaaacaaaaaactatacacacacacacacacacacacacattatctatctacctctatttttttaagacaaggtcttgctttgtcacctaggctggagtgcagtggcacgagcacagctcactgcagccctgacttcccatgttcaattgatcctcccacctcagcctcccaagtagctgggactaccagcacatgccaccacacctggctaatttttttattttttgtagaggcagggtttcattatattgcccaggctggtaaatggacatattgacattacaagtcgatgttgtttttatagaaggagcaaataatgcaaaagggaccaactcatcagtgaaaacatatcataccatgcttggtgtttgccttggctagaagtctctggaggtgaatttatggagaatgcattcaagctgcctcccattcccactatatagataacgagaggaaggggtttaagctgcaataggaggctgttggagagactcaaggagaagcttcctgaccgtagacggttgataaatataggagccactggagggtggaagcaataactttccaatcccccgagccttccagcattttttggtgtttgccaaatatcatcacctcctacctctcaccagcgcctggactcaacctttctagagccagctcaaatgccaccccttcagacttcccagcattgctgtgaggaatcgtgggcttttctttcctgctcccagtgtgactttggtacctttatttagcatctatattgtcctcccttgacttaaagccaagttgttaattctcccctttcttgagttcttagagggcagggatgcattccattcatctttatcaccaacacctaaggtgacacctggcacatagtcagtgctcgttaaaggtgtgctgaactttgaaacgaagggttgcctgttggtggttgaaaacatttttttttcgaaccttgttaagtttgaaaagttcaatccccagtgccaacatgcatataaatataggtgctttcatgctctgttgatgggaatgtgaactggttcaacttttctggagagtcatttggtaaacatttaggagaagtcttagaattttctatgccttttgactgaattcttttttttttcttttctcctaaggagttagtgaatggcttttcataaagacattgtattttttcatagcaatgtttttaaaaattatagcaaaaatggggccaatattaatatgaatttggataaatagtggtttatatgcaatagaatgtcatgtagccattacaattgatgatatatttgttaatcaaataagtaaagtgacaaaaacattacaaaataggaagcatagtaggatttcaattttgaaggaaaataaggctctatccatggaaaaatgccttgaaggatatacgtctaagtgtttcaaccctttttctctaggtggtgggattttaggggattttgactttcttctgttcatttctctgagttttctcaattttctcccatgtgttacaacgaacatgcattacatttagaacatagaaaaacattttccagcatcttgagttgattctctaagtaaattccttgctccttaaattctgaaaactgtagagaccagatcaacgtgtaggatgtcagaggtggaaaagctgtgggaagtcctttgggccagagttttgcaaaactggctgtgcgtgagaatcacacgtggggctttcagaactctggctctgcccatacccagtggcaataaatcaaagtcaccagggatggctgcaggcgtcagagtggtttaaagctcccaggtgattctaatatgcagcctagtttgagaaccctgcttttgagttgtgctgtctaacagtagccactagccacacgtggctatttaaattatgcaacactaaataaaaaattcagttccttagtcaaagtagccacttttttctttcttttttttcttttttttttcttgagacagagtgtcactctgtcactcaggctggagtgcaatggtgcgatcttggctcactgcaacctctgtctcccgggttcaaacaattctcctgcctcagcctcccaagtagctgggactacaggcacccgccaccatgctcgcaaagtagccacattttaagcactcagtagtcacatgtgtggttagtggcactatattgggcagtgcaagttaagatctacctctcacatttcaggagagggctgggcatggtggctcatgcctgcagtcccatcactttgggaggctgaggcaggagggttgcttgagcacaggcatttgagaccagcctgagcaacatggtgagacccctatctctacaaaaaaaaaaaaaaattagtcaggcatggtggcacgcacctgtagtcccagctacttggtaggctagggtgagaggatcgcttgagctggggaggtcagggccgtagtgaaccatgatcatgccgcttgcgcttcagcctgggcaaccaagtgagattctgtttcaaaaaaatttttttctttttttttcaggaaaggcttttgcaggtgggtgccctccttctagcaggcctgaggctcagggaaggggcaggcctctgttcttgcctgttttagggcggtggaaaagacctcactcggccgtcaggagagtaatcttgtgcctagaaagttctttctgctttctcgtgtctaccccatcctcctccctgagcatggtgaagctcagtgcagcatgtttattttcaaaggcttgacaggcccaggcccttcctatctgttcagcctggtccaggccaccaggcaagctgtttacaagggatccaagtgctcggtggagagcagaacaggccgagagtgttttccacggctgccgagaaagatgagcgagtggaggcagaataacaaaaagccacttcaaaaacacaccagaaaaagtcacaaagcagagacaatcagaggtttgagacacacacacccccaaaaccctgacaagagagcgaaaacaagtcatgagggagcctctgatggtttcaagacagtcgcggttgctgattgagaacaggcctgtcccagcagttctcagaggagtcgggagctgcggctgtggggggtcagaaacttcacctgagttctgagaattgtggtgggacagtccctgagggctccgtctctctgggaagatggtggggggcgggtgagaatggcaggcccatgctggctgggtgagagtgtgaggctgttccagcctagagactggccaccggtcaggaagcagagtcccacctggccccaggcttctggcacctactgcctgagagcgtgaggcctctatggccatagtccacctgggaattcaaaggcgtaaggccacctgcatctaggaagctccttctttgggatctgagctgaggacccaacagtgaagaagccaagccagaagggaaacgctggtgctccgctccaccttgccccattttgcagtgaagtccagtgaagagagccctgggggtggagcactggagctcaggtcccaggcactatcactcccttgctgtgtgaccttgggcaggtcagtttacccctttggactttagtttcttgacctgcaaattggagggttggtctagatgaatggctttcaaccctggctgaatattggaatcacctggtgagctacaaaaatcaacatgatgccagttgttctgggatacaccctgggcatcagcatttttaaaagctcttcagatgatcccaggccaggtgtggtggctcacgcctgtaatcccagcattttgggaggctgaggcgggcggatcatctgaggtcagttcgagaccagcctggccaacatggtgaaaccctgtctctactaaaaatactaaaattagccgggtttggtggcatatgcctgtgcacgagaatcacttgaacccaggaagcagaggttgcagtgagcggagaccgtgccactgcactccagcctgggtgacagagtgagaccccgtctcaaaaaacaaaacaaaacaaaaaaagaaccattagtctgcctaatgcttatcaaaatttagagtgcacaggagtcttgtaaaaattcgagtggaattcagaaagtctagcatagagtctgagattccacatttccaacaagctcccaggcgatgtccatggaccacaccttgagtagcagcaagtctgtgttgaatgtccccttcccttgaacttgcaagttggatccaagctccaatctactcagtctgctactgttcttgttttggtagctggctgtagttgcctatttctgccaatctgccaataacatcattgtttctaagttctttctttccccccaccctctctcacaagaattgtttaaatcctcactcatcatttgaattctaatgagatgctgtggattgaatcaaatagggatcttcccttcaagggcagtaaataagagacagagccaggctgtgatgtgagttcaaaatggggcagaggtcatttttagctgagaggattggaagggatctacgtggctgataataacagtgtaccactgtccaagtgctttgtactagttgtctcattttatcctcaaaacaaccctacaggtaagcactgggaacgttccccagtttacacacgaggaagctaaagcttaaagagaagcagaggttttttgaagggggcatagcaagcaaggtgcagcgctgtagcttgaactcaggtgcctgtgctgacttttagtccacttagggcatgggtggtatttaagctgcatgcctgactagacccaaccagacccgatcagactcagccttttagcaccaagtcgtttgggctaggatgcggtttgtatgagtttagtctacccctcactcaccttccataccccgacagccagaaaaagacaggtggtaacagtttccacctctggtttctgggcccagacctccaggcctgtacacagagcctggggcctggactcacacttttccccagttggctgcctgtcccagcatgggtctctgctgcctacatctttgtctgtttgtatcattttatttccttggcggggagcaggctgtgtgtccaggcttttgtaggcttgtcccttcttaggcacataaccccaaatagtgcttcatagaaggttgcccgaaactaccatgatgactgcagatcctaaactcctcagattctgctgggttcttagctaaaatggtatccaacagcccagccccatggtttttccaagttgacgaaacccagcttgtctcaccttttgatatcagggttacagggttggggtggaggtgaagggtgagaaggatcggagacctctgtgttcccccactagaacttgagttcctagagacacgaactttgtcttctcatttttgaactcccagtgaagaatacagtgctgggcagagagatgtgtcaccgccttgtcagacgagtgcatgacagagacttgggtgcattttctttgtgcgtggggtgaatggcagtgttggtagtgtgtttggcttggctctcacacaggagattcacctgctataggtttcagcttgtaggccccggaaccctgtgggtgcagctactgggaaatctgtctttcaccacatctttttgggttctgtagctgctcaggaagatgaggttttcttatatagccccagcccctggagatgctgggtgagttgtagaatgccaacttcgagagcattaagagagaccctgtaatgattaggcagccctgggattgtagaatggggaacccatggaaggaggagacccccccactttcttacctttcagagaagggaatcatcttattgtagcagaagtttcttaaaattttgcttggacatctaaccttgaaaactgaggttaagaaagtgaagggcttagtccatagaaggaattttcctctgcatgtagtttttctcctatcactacaaaaaaatatgaagaaaagaaaccaaattcgtaccaaggtgctaaatgtgccctagaatgtaaagcaactttgcattggtcaaccggacccagtcagggaaatatttccatttattcaacttgtgtacctaagagaggttttttttttcttttttgagacagggtctctctctgctggccaggctggagtacagtgtcacagtcatgggtcactgcagcctcaatttcccaggctcaagtgatcttcccatctcagcctccctagtagcagggactacaggtgtgcaccagcacacctggctaatttttgtgtttgtagtagagatggggtttcaccacattgcctaggctggtctcaaactcctgggcccaagcaatccatctgcctcggcctctgaaagtgctagtgttacagaaaaggggtcctgatccagaccccaaaagaggattcttggatctcacgcaagaaaaaattcagggcgagtccgcagtgcaaagcaaaagcaagtttattaagaaagtacagtggcgaaaggacagctactgcatagacagagtaggatgttcccaaaagttagaggaggaacgcatccaccctaggtacaatgcttgtctatatgaggaggtgtactctgctataagggtttgtgataaaggattaattttcttaattactatattttgcaagagtcgatattattatctttaaagtaaaactaggaatgcctttgttctccagatatcaggacatctggacactcccaagtctgggtctgttttagtaaacattattagtttgttcccttaatcgtaaacatctagaggctaggaatgcctaactttctgggaatgcagcccagcaagtctcagccttattttcctagccctcactcaaaatggagttgctctgatttgaacacctctgacactaagattttaggcgtgagccactgtttcccgccttaagtgagaaaatcttgttgagccaattctttaagactccctcttgtctctttgagtcttacaagaaataagccaatgagaggttttccccggcctcttaggaaccttttctaggaggagagtgttcaagaagaggagccaaagctaggagaggcccacagagcgctggcactgaattcagaggggtggtgctctcctggagcccgtgtggctaatccatttacaccatctcctccgagaacttcatccagcccaggagggtgtgctgtggccttgctgggtcttttaccctggggccaaggatggcttggggtgtaagctggcgatcagtgctatttccacccccttcttcaagacataggctgctttaaaaaattttaattgtcagggttagaggttttgatggtgtggaactgggaggtgggcctgggagaatggaaattggatgtaaatgattgaagctggcccacagaagtcattctgcagtacatattcagtgactccatttccaggtagggaagttgaagccacaagatgggctgtgatttgcctaaagtctcctagcaaatagtggcagaattgggaccagagcttttccctcgaagccctggatagaacattaaagtaatggcagtgtaattgattcatgtctgcttaggtcttgaatcaatcattatgcacccacctgccctccctaggagatggctcctgagaggcagagaccttctcttaatcctctctgtgtccctgcacctcccagtgcagtggccagtacatgctggggggtcctgtggggtgtggggagttggattgggtggttaaacctgattggcgagactctttgctgcaaagagcactcggagcggggggttgggggagggcaggctggccccaccgcatcctctctactcagctgtgtcaactctcaccttgttgtcagaagtctttccagaccaactcagcctctgagttttggagcaatatctgtttatgccccacatttagccccctctataaacttatttatgtgggaagaggacggcatgcattgtgattcagtgtgggctgtggatctatcagcctgagtttcagtctcagctctatcctttctgagctgtgtgatccaggcaacccctctgagcctcaatttccttatctgtgaaatattccttttccacgggctggtcatgaggatgaatggggacaaggcatgcagccattcggtgtggcaccaggacctcagcacattcccgcccttatcgttgtgaagttttcatcattaaatgtgttgttctgcacctactctgaggatggttacctcacccatgagcaggaggaaatgatatgtaacgttggcagattgttatggcaaccaaatgagagaatatacatgagaatgctttgtaaactcctaaggcttgggtgtgaagtatgactgaccccaaaaatcacacaattggtaagaggtggcattttcctgcaatgaccacaccctcccccaaaacacatacacacatgtacacactcacatatgcacacacatatacacatatatacatacatatatatacttgcacaggcacacacaccaccaccagcatcagcaccacgaaacatctccatagtctgaccccgcccaccccccaccccaacccctggcatcccagggaagttgtcctctcattttttcaacagcctctaatgagccctcccagacatccagacaagcagtggtggaattaaaaaagacaaatgagacccagacctcactcttaggaagcttagcaggggagaagggtgagcaaaggttactctaaacaaggccaaatgacacaaaagccatagccacaaaagcctgggtggaggggaagtttgggaatgggcggtttcgtggcaggcctggcattggagctggtctttgaaagatgggtggtatcttagtttcctagggttgctgtaaacaataccacagactcagtggcttaaacaacagacatttattttcttatagttctagaggccagaagtccaagatcaaggggtttccagcattgtttcttctggtttcttctgaggacactctctgtggcttgcagatggccaccttcttgctatgtcctcatgtggtggtctgtgttgtctgggtcctgatctcctcttccttttttttttttttccccaagatcgagtcttgttctatcatccaggctggagtgcaatggcgagatcttggctcactgcaacctctgcctcctgggttcaagcgattctcctgcctcagcctccctagtagctgggatttcaggcatgtgccaccacgccccgctaattttttgtatttttagtagagatggggtttcaccctgttggccaggctggtctcaaactcctgacctcaggtgatccacccaccttggcctcccaaagtgctgggattacaggcatgagccaccacacccggccccgatctcctcttcctataaggatgccagtcatattggatgagagcccaccattgacttcattaaggtaaaatgaggtcatatccatgggccccaatccaatatgactggtgttctttatctccaggaaggccttgtctccaaatacagtcccattatgaggtactgggggttaggaattcaatgtatgaatttgagtggggagacacaatgaagcctgtaacagataggatgttttcttttcacatttgttccattacaaaactactcactgtggccaggtgcagtggttcatgcctgtaatcccaacattttgggaggcagaggcaggaggattgcttgagcccaggaatttgagaccagcttgggcaacataggaagacccagtctgtacaaaaattaatacataaattaaccaggcatagtagtgcatgcctgtggtctcagctacttgggagactgatgtgggaggattgcttgagcaacccagaaggttgaggctacagtgagctgtaatcgtgccactgcactccagactggacaacagagtgagaccctgtctgtctcaaaaaataaaacataaaaacacccaaaagtactcattgtaaaatgttgtgaaatgttgaaaagcacaagagggaaaataaaaaccctttagagatgaccatatctgtccatgaaaaaaacagtttaaaatgggtttatacttataacacctgttgtttggtaaactatttttatagtataaatatgtcatgaactattaaattttctaccacaacatcacttttaatgcctgcctcatggtccatgataagggtgtattgaatgtgtttaaccagtggagagtggggttttgattagccaagactgggatggagaagtagcagcctcatggaagggaatgatgtgagctccaagggcacagtagttggttacacttcagcaaactgcaaccaatgagaacagttctcagaatcaggtcgattacacttataagaagatgtaattttttgtgtgtgttgggggtggtcagggaaatagactgtggacatgagagtgctgctgcttctgagaagtcctgaagggtcctgagaatgagccagctccatgatttatgtctgactaatcagtctcaactagacctgatgggggcaactgaaagtcaaaatttgactctgcagggtgagactgaactcgatgaacatagtttcatagttttaattgagatgctgctttttaatgagtgactgttagtgatgagtgattattgcttttcccatcactcacttccctcactcccctctttccttccccaccctttatcccagatgaggaaaaatcattggtaaaacaaaacaaagagaaagggatttagtgataaagactcaccttgtttcacactgaagactgaaggatctaaaggagaagttcaggttggaccaggagggcttctaggggagagaagaggcagagagagcagggagagagcacaagtccccagctggagtgcagtggtgcaatctcggctcactgcagcctcgacctcctgggctcaagcgatcctcccacctcagcctcccaagtagctgggaatataggctctcaccaccatgcccagctaatcctttttttttttttttttttgtagagatagggtctcactattttgcccaggcttatctcaaactcctgggctcaagtgatctccagccttggcctccttaaatgctgagattacaggcatgagccactgtgcctggccccactgtgaattttgaatgatccaataggtgattcaatagggaaaaaatgcttattcctgttaatttcaacaactgagcctttcaagttgtgtttatatagccagcatggacttaggtttcatttgccctactgtgcaagtggaagaagaggaatgtggcagtgactcctgatttcatagagaaagcccacaaaacagtttagaaatacagagatgtcagctgcaatgctccttccaagacaaccattcccaagtgagaaaaccagtcagaattacagctctctttgggggtttcttattagaggacaaggcaactatttctaaagccttaggagtcttggctgggtgtggtggctcacacctgtaattccagcgctttgggaggctgaggcaggagggtcacttgaggccaggagtttgaggccagcctgagcaacatggtgagacccccatctgtacaaaaaattaaaaagaaaatagccaggcatggtggtgcgtgcctgtaatactgggtactcggaaggctaaggcaggaggatcgcttgagtccaagagttggaggctgcagtgagctatgatcgagccagtgcactccagcctgggcaacagagtgaaatcctaactctaactaactaactaggagaaacgaaaaataaagtcttaggagccttgcgagatcccttttgttgaacgaaatgagtccagggacagatttattcaacccaagacttaccaggaacagtgatgaatattcacatgagtctgcttgttgccccgaagagcaagatttatgttcttgtgaaagttttcaacctaacactttatcatatctgattctttgaactggctttttaatgtagagtggcagctgtctctccccagctggaggggaaggaggccatcttctgcatctccttctgagacacttgtgttaatgacgatggcttgcatttgggaggcaatttcatcagttggcattataaggaaaatagcaggcctgccaagctcaatttactggcagaaaaagaaaaggagtgaagaggatattacttattaactatgaaatgcggaccgtacagcacaacactatcttttgaattccccatgattgcagaatcataaggctttcttctggtgtgggagcatactgacacccctcccttgtgctgtggttgtgaaaaggattatgtaaagatgattgctactttcaggagccaccagcctctcaactttatcgaggatgcaggaaaaggtaattcaggaaggatgcaattcacttcaaacctttaacaaatccatgtcatgaaaacctaattcagagaaggtcatttgctggaaggtatattattaaataaaaagaaacaaatttttttaaaaaaagatcatttgctataatattgttttgcaaccattcaccacatgacaacttagacagttgttctcaggcattttgtatcttttttttttttttttttcaaattaatgagtctttattgagagtgtgctgggtgcctttctttgtgggaaaaccatattggccaagtctctaaagctgatgcacaccccctcattctgtgcaagtgagtctctcagagcctttcagcacccgcctccagtgcctagtgaggtagtcatgccacccgggaaagtgggcaatgctgcctaagaacagtgcccacattccagcaaactgtcatcccagagccttgcaacctcctctccaaacgcttgcaaaaaaacaagtgtgagcgctaacagactccttgccggaaaccaggtagccagagaagctagtgacgcacctgaggaggaaaccagggatcaggacacttcaaagacccagtgctggcaaggtgccccgggcgagggtgactgtcaggacatttctgcatcatccagttatgaaagctgattctatttaattcagtttaattaaaacaggggggccagttccacccaaaggcagaagacgctgtcagcggatgcagagtgagatctgaggaccaggaagcaaaagtagcacctccctcgaatctgccactgatgactgccatcaccccattactcccttccagttacccttcgcgactcactcatcccttacccctcgggaagacactgtccagggcagagtctcccagtccagggccctcggctctggtgaccacatgctctgcactaaaaatcagcaacacatgatcaggcaaatgtgaaggtccaaggcactagggggccagcatatttgaaatcgagatgcccaaagggcaatgagaccaggaattcaggtccctgttcccattgccttttgggaaaggcagtagtgtggcttagttgaactgaggacagacagggacttgctgggaaggggaaatcaaggtgcaggttctcttggaaggaggcaggatcacaagcgggtcctggggtggagagggggaaggtgtgagtggaaagagcaagtgtgcgtgacacaaccggcacagtcggcctctttctccactggatgggaactccctaaggcagagggctttgtgttttgtacattgttgtgtccccagcacctagaacagagcctgatacattgtaggagctcagtaaatatttattggatgagttgtaatatttattgtaaatattagtaaatatttattgagttgagttggtctttccagtgaagtggttgcttctctgtgaagctctgtgggaaacataaatggtgggagataggttacctgtcgttagggctggccatatgtgagccctataaccatttggtattcattcattcattcattcattcattcattcatggaatatttgcccagcttctattctgtaatatattgtattagtcacttggggcacaaatatgaaagccaacacatatttcttcaggacaggtgcagtggctcacacctgtagtcccagcactttgggaggctgaggcaggaggatcccttgaggtcaggagttcaagactagcctgggtgacatagcgagaccttgtctctacaaaaaattaaaaaataaatccagacagagcagtgtacctgtagtcttagctacttgggaggctgaggtgggaggatcgcttgagcccaagacttggaggctgcagtgagctatgattgtgccactgcactccagcctgggtgacagagtgagaccctattgttaaaaaattaattaattaattaaaaatatttctttaatacccatcatgagccaggctctgggggataccatggtgcctcaggctggaaacaccttctttggtagaagacacagactgtctaagccacagacgggggcgcgtcggtctctctctggaagtggagatgctgggaaaggctttgcagaggaaggcacatttgggctgcatcctgacagcagggcaggcgttcgtcaggctggggaggtgtggggcagcaccggagcagagtgtcagtgtgtgtcatggcttggtttccctcagaggcctgctggggccaccttttagctacactcttcacacctcattttcccacttcccagaccctctgaacatgtccttctctcttactggttgctcccagttttgctcatcccagggccttgcaccatgtgtagcacaaagattcattacgatcaataccagttagtctaggaactgttctcagagctcggtgacatccctggtgtgggtgcagctggggacagcagcgggactttgactcccatttcctctcatgagctccttggcctggctcccccgggaacttgttgtgagaggaggatcacaacaaggctgggcaggatgagggcatccctgggttctctgtgccattgaaatacaacacggcccctgccgcaggtgagtggatagtgggcccatgtggtttagcataacccagagccaatgtcctcaacagggctgccgatatggtagtgctcacccttcacctggaggcggctatgctccagggcacaatttgacacactttaacaggacagcgtgttggtgcattggactagagggcctttaagatctcttccaactgcacgcttcattctgatccagtgattctttctggccttgagctgggaacatcagaacccagtcccgtggtggctgccagaagatactgttaaaatgcaactagaagaatgttgttttggttctttcacacatcagctgctaatctttgtaggattttccccttcccagggttaagagagagaagaggaagtgaaaacaggaggggagaattttcttaaagcacctcttgccttgtagacaacaaccaaaaaccccctagggtttgaacagtgctgtgtacttttttttttttttgtagcttgttcccatctacagcctgcctcatttggttctcagagctcccccaggtgggaggcagaattctgaactgccccaattccactcttatttgcagacagggggcattcctggggctggagggaagggctgaggactggctcttctggcagaaggaggtattttacagtcattctggagaggcactgggggtttctgagtttcttcatgaaagctgggcagagccttctctacacctggtggagaaaggtctgtgtgaacagggattaagctgactgtcctctgggtggagcccttcggccatggaaggcggaggagctggacttccgagcaccgattcagcatctgctgatctctcccaaccaccagcctctcctggctattggagatctccgactccaaggcccaagccctcccagttgagagctcccaagtgcagtatctactgccaagacaggggtatcttccccagagtccagtaggcatgtttccaaattttcttgttgtttaacagatttcattgacaactcaaaacatgcagctggctagtgggaagcagggagaatctggaggcaaatgagatggagccctcgttctccaagaggtggctgttctcctgatgcagacagacatggacacaaacacagtgtgaggatggaatggaagcgtggtggggaggggaggagagggagcgctacacaggaccaaggcagcctcaccattgcacgttggagccctgatgcccagtcccagggcatagtctcccaatccagggccccctgctctggtgacctcatgctctgcactaaaaatcagcaacacacaaccgggcaagtgtgaaggtccaaggcgccagggggccagtgtatttgaaatagagatggtcccagaaattcaggtccctgttcccatcgccctttgggaaaggcggtagtgtggctcagttgaactgagaacagaaaggggacttgctgggaagggagattaggtggtcctctcctgcctcctgggagttttggctggggattgggaaactgggactggaagagaagctggggatcagggatgtcaggagagaaggggcagtcttcactttgtttggcagagatcaagcgcagggccatttggcatgccagcagggctgaaaatgagccactgtaggacctgggtacacagggcccctctccccctcatgcactccgaggcccattcttatgcctctcagacaagtatggtgagttgatcctagattcagtctgggttggggatcagagccctgagcctctcccagcctgcactggccagcccctcctgtccttctggctagtctctgctccttcccatctctgccctggactttccccatagagccttcactccctcatgcaatccccttctctccacttccgctgccctctcccaactgctcagaagctgtgcttccatgaggccttcccttaggagtgcctgtcttccctttctgagctcccctggttcagggggccatgcatatgacaactgccagagggttttggttcatttctttgttctgtctccaaggttctgactccttggggctgaacccaggtctccttcacctctgagtttcccccatcacttggctcttcattaagccatcagtaagtactgcatgagcaaaaggacaagatttatcattggatctcagaggatggcctctgtctaccatcttattttctgaagaagtggctgtttgctttccaggaagaggccggggagagagctggaaggagggtccatagcagatttctcccaggaatctggaagagctgaagtctcatgaggatcaggactgtgggctcagggggcacctagccgggcgcttgggaacgacagaccagtttgctggtttaggcaggagaaagggggtagaaatcttgttaatttctggcagtgtagaaatctacccagtctaccagtttgggagagggttggttttcagggtgaggccagaagaaattccacacagatgtattccagctccttctttctgggggtacagagtagggtgagctataaagagtgaagggatgggaccacctccaagagcagccacctctgacccaagaaccatgtttccaaatggacagagttgatttaacaacgactcaaatatcctacaagttaatacctacttctttctcctcaatcaaggcccagtcatccctggggagaagccttgagtgctgggctgggccctgggtggggaatttaatgtgctgtcattttactgacatctgtagaggtttgaaactggacaaacaggaagtgtcctgtctttaacacttgcacaatctcaagccttttgtgaaatatcaaggagtggaggtcgcaggggcccgtggtgtgaggtgctgtgaggtagccctggacctgtctctgatcctgagagctgggccctctgcagctgagaacgtgccctgcagccgctttccctccttagccgtcgtgcacaacctgtgctgtgagacgctgctgcttgcctggcactgctgttgaatcagtctccatctcctcattttgatggcagcctgggtttgttatccttcaaagatcgtctcttggaaggacaccagcctctgattacatttccgagcctgcctggaggcagctaagctaatccgacacgatttgggtggattcccttctggcctcatgttctgacacaacctctggcagcagtagggtgggaagatggacaaaataattacgccctatgagttgaaaggagaattaaaattaattccctcgtgcaactttttttttttttttttttttgcgccaggtgtggtggctcacgcctgtaatcccagcactttcggaggctgagacgggtggatcacttgaggccaggagttcgagaccagcctggccaacatggcaaaacactctctctactaaaaaatacaaaaattagctgggtatggtgggacatgcgtgtaatcccagttactagggagaatgaggcaggagaattgcttgaacccgggaggtggaggttcagggagccgagatcacgccactgcactcaagcctgggcaacagagactctcaaaaaaaaaatttctttatgagtacctagtagcagataattcagggctgttctctattccttttgtaacaggtctaatttatggcagtaatttttttaaaaaactatttttttcagtagaattttgtacatatgacttctataacatttaggacatttatccttgcttattataaaaatgatttaattgtagtaaacccggttttgaaaagagaagaataagagatcgcccataatcttaacactgaacacaccggatccagtttgttttcccaaccagtcttcatctgatagcgtgtttaattgcatgatcctaatatacatttactttttgaagaaacctagtttgcacggtcccatgtggctacataatctttctcatcatcgttaaggcacaaaatacctttaggatcataatttactcagccaacttcctgcagctgaaaatttaattatttcttttacctttcaaaccaatgtgtttgcttgtcttttctggactctgccctggggccccggcagagaggaggtggagccgtggaacagggttagacccaactcatcttcacgtcctgcccctcagcccggcccttggcccgacccctgccaaatggctccggctgtgttcaggtgcctgcggaaaggcgctcctacctgtcagcagtgtaagggcatttccaggtcacatctgtcaaggactttcattcatggagcacttgcccactggacacttgccacttgtgtagacacctcctctagcagggaccatgccatactgcatcttttattactggtgccaaggagggttcctggcatataaaaagtgctcagcagttgtttgttgagtgaatgaaagttaagagtgattgacaactcacgaggaatcctgtaagtcaccaggctcttgcccagcttgggctgcagaatcggacactgtgctgcttcacaggccttggggactttgactaagataccttccccatcccccaacttcaaccatacatttatgaaggtttaatagcgcagggtccccaccagaccctccagcgtaggtctatttttttttttttgagatggagtctcactctgcctcccaggctggagtgcagtggcgtaatctcggctcactgcaccctctgccgcccaggttcaagcaattctcctgcctcagcctcccgagtagctgagattacaggcacctgccaccgcatctggctgatttttgtagttttagtagagacggggtttcaccatcttggtcaggctggtcttgaactcctgacctcgtgatccgcccgccttggcctcccaaagtgctgggattacaggcgtgaactaccgcgtccggcccccttttttatttattagggtgatcagcttgtttccgttttcccgggacttgcctggttttatcactgaatgtccttcctcagtcccaggtaagcggggacagagttctcctagttctcggcatccagtgcttaacaagctcctgtagagggcgctggaggaaaagctcaggaggcaggtgccggatggattgagcagttgctgtcccaggtggaagatatcatgtcacccggacaccatcgcccggaaaatatcacgtcacctggacaccatcagactcaggagcgggttagaaaacaaccgatctccttaaccctcccccaggaaacgcttgtgtcaggaaactgatgcttattggccaagagggagtgaccgtgtcagacaagtctctgtttcttcatcctgagaaagcaaatcatgtataaatgaattgtggttgtttcaggctgtcaaactccaaatgtgttctggctgcaactaccctgacagcaggatgctccagttgcattgacctagaacaatctaggacagagaaaaaaaaaatcgctttgattttgttggggaggacacattttttaattctgtctttccaggttcttggcaggatctctgtaacaaaagtcaggctagaaagagagaagcatatatatttatttaatacacgttttatgtgatacaggggcttttgtaaggaaatgaagacccaaagaaatgtttaaacctgagtgtttttatacggggtttgatgaagagtggaaagtcatggaagaatatgataggacagaggggatgagctgagggtgggaaagcggggggaagctcagcaaggcctgtttgcccagtttctcttcttcgcagataaaaatgcgctcttcccctgagtatagggagggcacctgtcacctgaggttcttatgacctgcttcaagggaagttcagaaattggttcagcttaaaacatccactattttcaaggtgccatattttgggcctgaatcccatccattttttttcaagtgtgtctatcctgacacacattttttttcaagtgtgtctaaaactgtccattttcccctggtttatgtagacctatccaattcccttgggaaactcagtgggaaacatgaaatttactttcgaagtgggtggtgataatgaaaaattaatcttgctacgattctggtaagagaccagacccacacagaccctactttgggcattacctggctgaagccagcagcaaggcagcgcacccttctgacacgcacaggttgccaggggctccacatgcatcagccccctgctttggtgcatcacatatattgctgttgatgtgttcaactctgttgcaaagtgtttggaacagataacatcacagtcggatcatttatcaattctttcactcgcccaccttttgttgttgaaccacatactttgggtaataactacagtttattaggtatgctgtgaacactgtttttaaggagtgcctggctgaaaacacccacaaaatgatttaaaaacacaaagctaggccaggcagagtggcttacgcctgtaatccaagcactttgggaggccgaggagggcggatcacttgaggccaggagttggagaccagcctggccatcatggcaaaatcccgtctctaccaaaaatacaagaattagctgtgcatgatgacgtgtgctgtagtcccagctactcgggaggctgagttaggagaattgcttgaacccaggaggcggaggttgcagtgagctgagatcactccattgcactccagcctgggcaacagaacgaaactatctcaaacagaacaaaacaaaacaaaccctccgaaacccacagagctagtatttacaagttggaatgtcatcattgtgaatgtttccatctgcacaaatatctggaaaacgactattaggataccagcctttattactgctctattaagagaagccatttgctcctaagcccttcgctctcttaaaaaaatcattttaagaactggagtggttatgagaaaagcaccggtgcttttaaagatttgcagaagggggaaaggtcacttggctgtcagtttgagtttttatctcatagatggggtacctatcactcacagaactggagtcggatagacctgagtgggaatcctgtctccatcataaattaactgtgtgatcttggacaagttatttaacttttctaaacctcagtttctccatctttaaaacagagatgatattcataatatgtcattaaaaagtataacattagaatgtgtcgcacactgaagaacgtccaactcttggcaaagttcagtccaactaggcttgaacatgtttttaaaaatatcctgaggctctgctctccccggaagaagctgtaaagaacaattccagccctggcactgagacaattggatcttagatgagtcattcacttctcttttttggggcctcagtttcccctttggtaaaatgaagagattaaaccaaatcagtgattctccaaactttgctagtctgctaggcttctccttagtagcctctaattcagtagtcttgggtggggttcagacagcttccctaggagattctgtgctcaatctgagagccacccacctaagaaccacaaccacagccacctagactctgactgacatttgatggcttcaaggaggtattttaaagctattgtcccagaatacgtggtgtgttttttgaggaggaggaagatctatccacggcacacatcaggaagaggtggttaaaggtcagagagttattctgcagaaaatccatctgatttggtacttcctgaaatttttgacacccaaccagggatgtcttttaaaaggttccccactgctcacagattgacaggaaaccacaacaggggtaaaatgcacgcataacacagcatacatcagacatgagggtagttctctatatagcacagtattttttattattgtaggcttacaaatgatttaagtctgtgtgtttgtgtgtgtgtgtgtactttttcattttggtggtatggaaagctttggagggaagaaggaaaggattccacaaggaatagtttttccatatacatctcccattgcaagaacactgatctccgagtggattcttttgtcttgagtcttttgaattattgatccacaatgatgaaatccctagcacagatgttcaatcttgatgtcatttaatatctcgtacaacagcctgaggctaattttcctctctccaggaaaaatggtttgtaagagttgattgatcaactcaagcccaagatcacaaatataaacttcattggtaaagtgatctactctaatattatcttcagggattagaaaataaaaagtataaaaagtgcatgagcatacagtaagtgctcaacaaatgttggcttttattattattaggtgatcatggaattaactttcactaatttgcccttgagttataagccgctgttgacccggggatagtttctaaaaagacaaatctcctgcaactgcaggtagcagaagatagaccttcccattagtgctgtcttctcctaagcgtgttatccagaccaccatgtgggatccttgggatgattttgggtagtacacagaccatttaaataatgttctttgaaaaaaaaaaactttatttaaaaaatagagacagggtcttgctatgttgcccaggctggtcttgaacttctgaacacaagcgatcctcctgccttggcctcccaaagtgctgagacttggccttaaataatactcttttaaatagtacgtatttaggcctaaagagaactactaaaatatttgcgttaaggttattttcttttttgacaaaagacaatggttttaacatttatgctgatatacagtttccctttaaaataaatcattcaagtggaagaagctgattcaaagaaagctgctaagtaataatagcacaagttgtacccagaaatggtaaaaattgtgatggtggcatgcaaatgaccgagtttgagaagtactagatcagtgaactgaacctgtgtgctccccgttgggctacatctgaaaacattcgtcaacactcatttcatggagcttgaatccgtagtacagttacaaaacttctgtgctgtacaggaccttgaggtcatcgtgggaccacccctgtattttaggcagatggtttccatgatctggagatgttgtgtctcaagtgcaatacactggggaggaaacacgactttaccagattagagaaaaccatgtttgaaaagagacagtccttctatcccaggagagacacattggaggggagacgacaggacaatgagaatgtaaactatctacgttccaaatttttctgtacattaaaaaaattaaaaattctaaaaaagaaaacggaaattgtcttctgaaaggatctcaaggagcacatgtcttgaaatacctgaagatcttttacttggaaggtgatgacatgtactctaattgacttcaagttgtgtaagagggaggctgaaattataggaagacagatttttagttcagtgagaggaaatacctttagtgaactaaagaaggaatgagctatcttaagacatgatgggctccccaagactagaagtatttatttaaacagaaccatgacgaccttaggggacctgggaccaagtgctagacgggtgtggaggtggctgaccgagggtccttgctgccccttaaagtcaaggagtttaaggcagcctttcctttctttcaagtggctcctcaaagggagccattatctgcagctactgtctcagttttatgtaaagagtatttatcatttgggaatttcccctccccatataatacttttgactcctgaatgcatgcaaaagagctgtaagaaactttctggtgctaaatgagaaaatgtgtgaacataaatgagctagtttaactaaaagttcaccaaaatgtattttaaacatcaggctcttaaaaactcaatagtttgaaatttgcattttaatcagcgtttggctaacaatatgagataaactattagagaagtgtaggtcattctggcaaatagaaagttccatcatttcacacttagaaagctgccacgaagagcttattcttggagtataaaatgcagaatttaggttaagccagtcattttgtagatgaaattgtacactggcaatttcttatggttcaacctaatagtaaaacatttataaacaattgtatcattacaaatacatttagacatcgttttctgctaaactcagtattttcctttccatcctgatcaaagaaacattattgcagtaagccacattataattcagcacgatttcttctaaaaaggctccgagttcctttgagcttgttattgtacagtggatttttcatttgcaaagacgttaagccctccaaatgtgcaaatcatgaagtcagttgttgttccagcaaggtttgcccagcggtaaaaaacaagataaaactaatgcactagctgaaaccaggtggggagaccatgtgtggtagtgcttgggggtggagggaaactatttctgaaatgaggacttaaagtataataccagcttcactgcctgttcacgagaaaccaaagcttcaatttaactgcaggcaataggagtttcacactgtcagcaccaactgtctaaaatccaaaactagtatctaaatgtgtaggatcaaaaccaaaaatctggagggatctagttaaacttcaatatgcatgaccccagattcccctttaaaatatagtccaagtattttatcttttccatagggcattgacattattgtgttaatgtgaaatagctatttacctctccaaacctcggctttatagaatagataattatcacatcctgtaggagagccatttgaaaagacagccttgtttacagacaggagaagttacagaatttaaaactgttagaaaattgggggactatggggctgggcgcggtggctcacgcctgtaatcccagcactttgggaggcagaggagggtggatcaggaggtcaagagttcgagaccaggctggcaaacatggcaaaatcctgtctctactaaaaatacaaaaattagccgggcgtggtggcgggcgcctgtaatcccagctactcaggaggctgaggcaggagaattgctgaaacccaggagctggatgttgcagtgagccgagatggcgccattacactccagcctgggcaacagtcagactgtctcaaaaaaaaaggaaaattgggtgactatcgaggattcccctctcccatttgttaaaaaaaattaacaaaatttaggccctcagactttatgcattcatactcaaaataaatgcactaaaaatcaaggagcagtaagggcaccaagaaagagcagtttgatctattttataattaaaacaggctcgagttcaagctacttgcccagcaccttttgggacatgggaaaaaaacaaagacctctaccatatcccacattctctaaactgagaaccatctcaaacatcaagtctacatatatcactctgaccaagtggatttttacatcaatcttcccctgctgaggttcagagctgtcaaatcccaactgaggccgggcacagtggctcacgcctgtaatcccagcactttgggagactgaggcaggcggatcacctgaggtcacgagttcaagatcagcctggctaacatggtgaaaccccatctctactaaaaaatacaaaaattaaccgggcatggtggcgagagcctgtaatcccagctgctctagaggctgaggcagagagaattgcttgaacctgggaggtggaggttgcagtgagctgagatcgccaccactgcactccaacctgggcgacagattgagacgtctcccatctgacttaattccctcatcaactgattgccagtgttgtatggacaggcttggtctggatagacttgtcttcccactgctatttccagccgggcaaaagaaccacttccattctcttagagctttcgataccacagtaaataacctggtatcttgctggggcagttttccacccatattaaactacatctgccccattttgactactagaaaatgtatcaaagaggctgtccaatttgtctgagatgagatggctgaagttcttagccaaataatggccaaagctcaaaacagatctatttgatacaaattcgttctttgacacacaaggaaacagatgtcaagagttgtttccacccagtatcaagcttcctcccctcctctctcaggaggctgaacacacattcctagtcactaatgtgctatgaactgaatagcagtgaatccacttaaattaactcatgctggtacagagtcctctccatataggcacaggacttaacatttatcatttagccattctttcaaagataattcaaacgttacagatttctccatattcctgttaatgtagaaacatattccctttacttttggaatcaaagaccaacttccatatgtgacaatgactataatgtaagaaaactgattttcacaagtgtcttgtacaaataagctactgcagcagtttatagagatagttgggtgagacaagggccctgagtacacaaatttataatggctgagtggtcattccacactgtcactgcattacagaaaaaaactggatgcttgtcttgcatacaaatatgtagtgcattaaaaacactgagacctttttttcatttttttttttattacatttggacctttaagaaacatataccatcagatataccactattcagtaaaaatctattctagtttttgggaagcttatgtgtcacaaactatcttgcttctagtctccaagactttactaagtttatcaaaaaggtgggctctggtctatgggatcctgagccttgaggtttggatgttctgattattgtaaaacaatttcaagtggattaacttaattcccagctgtttttcttctggaatgggctaatcagtttgaattatctagtccattacaagaatattaaattccttgagctttgtgatctattctgtctttggaaaacctggtaaaaaagtaattttttttctatacaataaggatggatttaccagaacatacccagtattaatcataacaaaaagcagtatagataatgtatatgtgctgtgttcactttaataaccacttcataagtaactactctaactatggggactatttctggatcagtaagatccaagtgtagttagttacacactacactcagcttaacacaactcttggtatctgacattgattaaaagtaaaaaagggtaagtgaacaaatacatactcatacatgatcacgtttttaagaagctaccctttgcagaagtaaacaagagaggagactttcaggaagctactgatggggactgggaaggtttaaagctatggctttggtaagcaccccagtgagctgtaggaaggcattgtaagagtagattctgcagcatcaaaggataattctctaaaagaggtgggtgttttctcaattaatctaaattctgaggctttcagcagttgagggctagaaacaagatccaaagaaaagagccatcttcacaacacttaagaaaggtgactgactgagccattaggctcatgatgctaaatggtccaaaagcctttggtggtgtgatatggacaagaaaaaaaattaatacacaaaccacgtaacaccattaaaaccaaaaaacattttttcattaaaaaaagtatttagaacacacaaaacaaggcaacacttattcttttttctcatcttctggtatgggatctgttggtggctcctccactgttgcactgttgctctccgagccagtgttactatcactggttccttcctctgccatactgtcgaccccctcctgcccactctccttgtcctcaggagtagacgtgccttcttcaccattctgttggctctctgttgtttcttcaaggtgtgtctcctctgtaatcacacatttgtcactgtcagttccaagatgaaattttactctagttatgctgacagtatacagctgtgctgtccaatatagaagccactagccacatgtggttattaaacccctgaaatgaaccagtgtgactaaagaacttttaagaatgttggaacaatttgggtatgaaaatctactttttagctgtaaatgaatgaaatttattaaataaatgcagatcaaatacttccgatgaaaatttagcttctgaattgagatgtgtataaagactgtttaaaaaaaggaaagctgattttaaaaatgttccttctgtgttgaaataattttatttaggatatgttgaattaaataaaacatattgttaaaacacttgttttgcttaacttttaaaaatatgtcactagtagaaaatataaaatttcacgtgacttgcattttatttctgttggacagtgaatgagagttagtctgtagtgctatggattaaacgaggagaaagcagttgtagaaataatataaggttggtcttttagacactttgtttaaagtcatgctgggctgtttcctgtaagaaattaaaagcatgaggttttagctctaatagtctcaaacgattttcttcaggttttttccttgaactaggacagaatctgagtaaagacctgcaaaccttaagcataagacatgccccattcatagatgccaaaacagaggcaaaggactgagtgtttgtctagttgcaaaattagcaaaaatcagttattttaattttcaagctcgttttaaccacaaaaatgtgctcatgctccaaattcattacaataaaaaacacattcatacaaaacagaaagagactcagatactgaaacttaaaatatgaccatttcaaatgttaatctgctggattaaattttgcagaaatacctggtaaagatatctatattccattacatgttttccagatggttgtcatctgagtaccaagtatgactactgtccctcccacttcttgcaacgatgctccaggaagcctttggttttgttttccataactacttttagcttagtcctgtttacacagtgtactaggcagtgttaaaacagtgccatgaggtaaggtgatctcaaaattacaagtgacgatcaatgtaatcagtactttatgtaagttttatttatacaagttattattattattttttaccttgagggatgcttttaatcaggaaaatcagtatacctagaagtaagggtttttctaggacagagctggcaatttttttctgtaaagagccagatagaaaatattttagacttcgcaggccaggcagttgttgttgcaactactcaactatactgttttatccccaaagcagccacagacagtatgtaaacaaacaagtgtggctgtgttccagttttatttacaaaaacaagtggtgggcaggattggcttacaggtattactttgcagaatgctgtcctaggacaccaaagacaattaatcttaacggtaataaccacatcttgataaataatgtaagcatttaaaggttaaaatactgaatgtcaatatcatgtcaaatttagtactgggaatcaccctcagtggcaggtaccagaatacttgcacttagaaagaaaaacctaaattaaagacagccgtacaaagtcttggcactgcctctgcgtttgttgctagtgggttacctgtctccatcggaatgttctcgtcgtctttcttctcctcgcctttgttagctgcttgttcttcctcaggaacgatgctgctctgactgcgctcagcttgctctgcggcctccttctccctttcctcctgccttttgcgggcctgttcctctgcctgtgcaatctcagctgcaattttctccatatccacttctactttcagaccgcacaactaatcagaaaaaaacagaactccgtaatgttttttccttataatttttgagccagatatattctttcaaaagttggttttcttgcctataaactatatatatatatctatacacctgtatgtgtgtgtgtgtgtgccaaaaaaatgtggttctaggtcttctctgaaactcttgggtctacaagaaaaaacagcagctctagcagttgtataatataggatattccagagcagctggtgaggcaaaatagtgaaagttctggggtatacataaggcttccgttttacattttgggctaccaactagatttccttgtctgaatgcaaagtgcaaattataaattacatttaatgacgacatttgatgaataaatcacaataaaatgaaagtaattaatgactgtatgggagtttaacatatcagagggctctagcatttacaggcctagaagatatgtgtatactctatgatatttcaaatttattgcaattttgccagagaatgggaacaatcttataaaaaaaggatcctacaggtttataataaagttagccctgtttcaaagtgaacaacattcaataaaaacactattttggaaaaaagaatgaggaaaaataaagtaacaggtatagtgataaaagtatagttaacatattaaacagatacccttttaagttcattgttaaatgaatctgtgctttccaggaatttcctcttcttctcctggtgtcgttcctctatttgaagaagttcagcttctagttttcgctgcaagacaggatcaggcttcataattgtgtctcattttttaatggtccatactttcaaacagtgtaccaaataatgttttgaactttagatcatttatcacatgagtctagctaagatttaaaaaatacaaaatgcagcacaaagaaatgattatgatcaataggtaaatgttaaagaatactgtttcaggcctgagcaattccttgggaaaaaatatttagcatagcagtaaagattgataggatgcctcaaaattcttaagttcacacgtatttcttaacgaatatactttccattacaaggttctatattatagtttttaatgacaaacttattaaacatctgggaaaggtccacttccttaaacctcttctccaaatcaggaacaggttagattgacatatttaacaggtagatttaggcatggtgtaggaatcatatcacctgggatttgtggtataggcacatcttattgaaatgaatgttttatgactttacctgatgaaccattaaggactggacctgccgtttgaggacctgcattctagctgttgtgacaactgaccgaacgtctggcaccacactctcactaagaatttcactgatgaggcggtggtttctctggaaacgggcggtggctgtatgcttcattgaaaagccatcatcataatctggagtgaacaaattgttctggaaatcaggtcaccagtaaccataaaaaggagtgtaacaatgttaacacttaattaccaacgaactatggccctcactggcctaacaagtggacctgcccagcgtcatgggagcactggggcagttacttgataaaaaccatacagaggacgtaatgtgttcattggccaaggtagtaatttatctcacagtctttaagtgataatgttgtgtctgagaaggatttggctaaaacataaacgagatacaacatgtctcttctggcttcggaatcaatgtgaaggctgtatgtgatggcagtaattgaaattctgcccaatgtttcactctcttggtagtaacttaaggcatttaacaactaatgaacaacatatgaactgggcagtgactttgtcacttgtagcactttaaaaatgaatgaaaatgcccatttgtaaaattatgacagcagagaatacatcacctctaacaatattcagtttcccaggccctcaagtaattttatagaagaaaaataaatgtctgattccaaatttaatttttgtcagtttacacttagccagctgttgtcagtgtgtaatggtatgacccaagttcatacagtatgggtctggtttatatgcttctgtttcgttttgagacagaatctccctcttgttacccaggctggagtacagtggcccagtctcagctcactgcaacctccacctgccaggttcaagtgattcttgtgcctcggcctcccaagtagcaggaattacaggcgcatgacaccacgcccggccaatttttgtatttttagtagagatgggatttcaccatgttggctagggtggtcttgaactcctgaccccatgtgatctgcccatcctggcctcccaaagcgctgggattacaggtgtgagccactgcacacacactacaggcttatttttaatagctatctagtgtttccttaatctcagtctttgctctatcaccttcatagtttttcatatatctactaacagcctgtactatcgtttacttaatatttttctttaaactaactcacttaaaaaaaaaaagagctttctctttagtaatacatattaaaacaaacgctcctctctgaaccacttaatcacctcagtgacccaccagacagggaggaaccacacttaagaaaaccttgttacaggggaaaccctgttacagaggcctatgttgcgctgctatgtcagtttagcacctcccttattgtctggcacttaagtagttcctaaaattctcattattataaatactacagctaaaaactgttgtttttgtaaaaagttaaaaaaattacttttgtttccttttgagtaatttctttaggaaataaacttctgaaattaaaactactgggtaagatacagtttttttaaaactctgtaacctttctactttttaagagtttttcacctttagggttatatatggtacatctgtgctacatctgtctaagttatctgtttttgttgttagcttttgttttcttctttcatttatatggccccagtgttgaccacagatggggacataaggtctaagcaatttgggcttgttcttctttgcatgttagtcgtctgcttccttttttgggggaatggcttctctggttatgatctaattgaacagctatttatcctatgatgaagaggctctcactgaataaaagccttcattgtcttgtgtggataattgcacatgccctcttttttttttcttttttttgagactggttattgccctgtcatccaggatggaggacagtggcatgatcatagctcactgcagccttgaactcctgggctcaactgatcctcctacctcagcctcagctggagtagctgggactacaggcacaagccgccatgcccagctaatttttaagtatcctgtagagataaggtcttgctgtgttgcccaggctggtctcaaactcttggccacaaacgatcctcctgcttcagtttcccaaagtattgggattacaggcgtgagccatggcgcctggcaatgtctatcttttgatagtcctctgttaaagaagtcagtagctgttgtacttcatgcagatgccacctttctgttatgtacatttgacatacatttccacctcccaagtattcctctttctaatcattttcgtactggtatgctaaagacattctcatattggcatcttaattgctacctgaatttactagcaactttaagacccaatctgaaagttaaaaacatcataggcccaagtttcagactgtttctgagtgaatctctttagtccttctcagtgttcatggtgttaatgaaagctttagttattttctacttacgttgctagcctttgtttcctcttgtactgacctccatcctcccaatatctgtagactggattgtcttctgatttttagttctgtatgtttctcttgcattaatcaccccatttgagtaattaaagtgtgaggatgctagtgtgtctttagcactgctgattctgcttaacattcaatactgtttctattccatattctattctctatagtattacattccactgtctgtatttatgagaacatttgacaatattccagtacattatttttaaaaatgacttctgtttttccccacttttatcaacttattcttgtcttcaggtactattattgcttcctccctcattgatattgtctttaaagttcttatagccttcctctttgttactgctactttaagatgggatcttaaatcattttcctgatgttcttgtcgcttgcagctaaagcttctaaccttttgcacatcatagcagtatacagagaaactattaatgtttatacagcacactagatatgtggttgagtgtgttcacactgcaggtggctatctctgggtctcctcgcagcttcagaccctgcctggctgcacaagaccagaacaatcagaacacctgctaactactcatacagaatggcaattaggaagctctgccattcgtgtgcatgtatacaatttgtatgggtataccctcatgtacacccatacaaatagtagcatgagctatatttatacattcttattggatttctgaattaaatggaaaggaaacttcatgtttccacatactcattagcttctcccttaagagcctttaattcagcgaatttagtgaaccaataagaaaacaagatataattagaatgcatttagctttttaaaagcagatgaggcaaaatcctgattgtgatttaaaaacctttcgtgcattttgagtacaaagattttgataaacaatcaataatttttgctattttctgcactgaaaaggatatttctttttcttgtgggaaattcacatacaaatcttactcaatataaccaaaatactaagacgatacttaaattatactttcttttccatttaggataagaaataaaaacttatacttaagagatttctcatatcttaactcacagagaaagcataaacaaaaccccactttttttcttttaccatctggatcttcagcaggctgaatgctcatgtacggttctcctttctccatgcgagattgtctctgtcgactttcttcctctaaagcagcttctgcacgactttttgcatttatgtaagcaaggtacgcgggggaattatgataggccttcatagattcattgtactctatctgaaattcaaatgttttttggttttataattaacattttgcaggttataatgcagacctatgttatctcacttgaatatcaaaagatatgatgtaaacagggtgttgggataattatctcctttttacaggcaagaaatctgaggccttgagaaactgacttgactcaggtagacagagcctcagtactgcatcagtgttctgaccaaatcttatgttacttttataaatagtaagccaatgttttatgtactttacacattatctatcccactgtgagcccctaccctaccttttctgcttcgtattcgtttaaatattcttgtttttcttcatcagtgagatctcgccacatgccaccaataatcttgccaatctcccacaactttaggtcagggttggaagcctttacttggtcccagaccttaaaaagaaaacagatgaaatgttaatactgatgtctaaacgtatagacctttaaaaatagtttttaatgtggaaacttttcaacatacaaagcagagaaaacagtatcaaatttctaggtactcatcagcctacttcaaaaattatcaagaactggccaatctcaagttatctttgccctactggattactttaagatagatctcagacatcacgtcactcacttataaatacttcaatttgataagcaagaatatctccaatcactacagacacttaggatgagttacttcaataacatagtctacgtctctaaaagttcatgtgaatttagaagaaaagtgcttaatttgcataacacggtacatcatattatcaaatacaaatataatagtcaagatcaaaaggtttaacatttctagatagtggttataatgctctgccttttaataaagatattggctactttttttattttaagagtaatgtaggctcatcaccaaaaaaaaaaaaaaaaaaaggaaaacttgaggaaaagaaaataaaaactaccataagcttactgcttagagataattattgtcttctgtgttttcccccttcaaactaacatgtggttgctattatttttataaaaatgagatattaattcatgtagtcttgcagtcctccttcacttaacattttcctcacgtcattaaatattctccaaaagaaatgactttaatggctatagaacattctatcttaaggattttaacagtttatttaatcacgctcctcttgttggattttagttctggaattttgaaatcagaactaattgctttaaaaaccgtatttttttggacctttcctctgaatatgcacagaaaagctggctaagccgatctaaagttggatgttaagcaaagaagcagcaaagacagtgtcctcactccttaccaggtcctaagcacctacctttctgctgtacctcatgtagggcatcagcggcttatctggtggctttgggggttttggaatcgtgataccagaggatgcctacgaaagagttaaatacattcattattcaactgtaaggagttcactggcaaactgaaaagagagtcccttaaaaaattctaatgcgcctttcttctattcgtccaaatattttcttcactgaaaatagctatcactgcaaattcagaaatgttcaaaagaaaatgactttaagcacataatttttaaatgttttacttagcagtttattgccaatgctttgacaacctggctgcaagaacaaataaaatattacacagtaacccatacattgaaaatatatggttatatatcaaccgtctcaagttcaggacattacctggtaccctcttattctgctcaattaccattacacatacagtcaacacttgattatctgcagcaggatctgaacccttaacacttaccattctcacactgtctacaggggccttaacctattagcactaggaatgtactcccaacaccaccacaaaaacaacttcccaggttcaaaaacaaaaacaattagtgaaataacaaaccaccttacctcctttgccaggctagagattttatttctcttaaggttctgtctgttacctagtggttttcttgtaaaggggaatgagaagtgtgaattaaaagtcacacattgttttgtcctgagtcctaatcacagtgtaaaagcaaacaagtttatcaggaacagagaagtggcagatatcgggcctgattacgttatttttgaggtcttatatcaagaagctccattccattaaaaatgttcagttttatgggaaagacagaggaaaaggaaagatgtgatgtacaggaaaagagagacagaagaaaaggaggcggagggaagactgaaaaatattttttaaaaaggtaaagcaaaaataggtgaaagaaaaaataaaaaaagaaggaaagagaaagataaagtgatcagtttttcctgtggcttaaagtctaggtgagattccagacagcctctggtagaccacccagataacacccatctaaaagtatctatttctgaactttttagtctcctgttaatatacatgactgcatttgattaaagacccagaataagaaaaatcattgctatttcagacaatttgcaaattttcaggagatctctgatattgactctccctgctaggctggagaaatgaagtgttggctttattttaattatcgaaagacaggattggcaaatccttataggaaaactaaagtaacattttgttcgcttccccttctgttgttgctatgataaaaccccagagatactcctccactctgggctgggaccccaatcataaccttatttttcatttgagggctcagggattagcatgtttgtgtccttttccactatgatcaagaaatgtttcctcttcctacaagggtctctctccatccctataactctacttcttcaaagcatttcgccttggaagcagtatttcctctctttccattcctcccatgcattcttgtcacacctcatgctagtgcccaggtagacagacactgtttttggccagcagtgggtaagagagtgagatggccaggggcatggaaactgtcaaaagtggtaggatgggcagccaatacagggaaacctgtatcagggtctatagttctttcaaggggaaagagaattcctataagactaaccttatggattcagaggaacagacacacacaagtctgcttcttcacacataaagttactagaaagtatttccaactcatatccaacacaaaccttcagaattccatgaaatggattacaaataaagttggaattgtgcccataactgaggtggtaagaccactgtcaaaattttttgaaattaaagaggtaaagaattctaaaatgcctatgcttccgagctttaatatgaattaaaacactttaaaaacacagtagtatttgctctttgatatttttcaaagaatcacattttatattaatggaattgctatttcccctcctttctcccaaagaaaggtacacaaatcatctgtatattgagaccagtcaacttacaacaacaacaacaaaaacccaaactaaaaaaacaccccaaaacaataataaagttaaattccagatggttttcaggatagtaaagatttatatcattacacacctccaatttatttaacgtctcagacagacatctttctacaatgtcttaaacatttctttaaaaaaagctgaacatactttagaccctttctggataagattcaattagaaacaaccactgttttgctgtgctgtaaccctctgtcagatgtcaaaatctgttgttgactctttcaacggcctaggggctatgcttttggagaatgtgtttccatttttgaactgtttctttccttgctactatcaggaaacccacctctagcagcaactctctttccaattttctgctttcaatttccaatggggaggcgggtagaactgtgcttacagaagagcaaggtcctaggaaatctcctatgaataaagttcatggttttgtgaaatttatcttggttactcagttttttgttgttgtttcttttgcaattctcagctgtttctctagcaagaacttatttaagagctttcttctggggcagaatttctattaatgtacagaaataggctgtttttaaagacatttttgtctcaatgtgttttcacacctgtacttaagagaatgttaatcatcatctgaatgaagaactgactaggagtgaattccatcttgtagctatcataagcactccaaaaggtctcgacatgctatacaaagtatttactgtctgagaactacccaagtatactggagtcatcagggaaacccaatgttctctacagcctaccacaagctactggacagggcttcacagattcgttccttgaaaaccactaatgcaatctgcgcacaacaataccatacaggagcttcccctcacccccaaaagtaatgcataactagggtcatagtaaaatcaaaatgcttttattatggtcaaaatcagagccattgagtcctaacagcttaaactagatatagaaagcagggcaagtagtgtaaaacctccacattttctaggcccttcttcatatagcagtttgattatacttcaatttggtgttaagaggacaataatacaaagtaaatgtccacaaaggaccaaaacaccaaattttccatgtccaacaactctctataattaatctactatgtagctagtgtccacgccaaatgttcagttcttaacattcgccaagaaggaatgggaagaaacagatgagtgacttcagatagggagtacactttctcttcctagtctccatcgaacaatctcacttttttaactgagaatcccccacagctacatccaagttaagagcaaaatacttacacaaaaccaaaagacaaattactgtaatattatagttatcatttctattccattaacatagataatcaagaggtgactgtatagagctattaaatgcaatcattcttgtttactgcccgtgaaaaaattgctgcattaacattaagatccatgattgattccgttcattgtttaaactgaaatgttctttatcatttgaaaaccttgccatccattacacttgtgaaacaacatgtttaggccagggaaaaacatgtattgatgcacataaaaattgtatgcattgtgaaatgcatacatacacacactttgtcagaattctttttcagataccatgaaatatgcatggcacataaaacttgatatgcttatgaagtacatattatgcagaaacaatgaaaaatttagacaaacaaaacctatcaagctaagcaatatgcttatcaagatagacattcatttgatagctacaagctttcagttccagcttgactacagggtgagagggcttttttgaagttacattaatagaaggcacttgttatttatgaatacagcaaacaaaaaccaggtattaaaaactttacagccattctgggttgtataaattctcaccaacactacattccaatgtagtatttgacttttggattttttatctttagtaagtcatttttataattattggcattttttggtgcttaaacttttttgaatgaaatttaagatgattctaaactaaaagatttgaagtgtatcatccaattttgatatcttaggctgatcacttaaatgaaacatgctaagtttcagaaatcctatctcttatactaaggattagaaatgcacttctcgttgtacatatctagtctgatacttcaaattaatttcattcaaccttcactctgcatttctttgaggtgacattaaaacgtttttctctttttcactgtagagaaatgagtcttagttagaaggtcaactactaaatccaaaagacaaataactatgggtagcgattcaaactggtgtaccagccaaaagctttccagccctgaaaaagccaggtctgaaagaccagcctctactagaaactcaatccttgagactaatgccaatcaccttataaaaatgaaaaatactctttatgtcaaaaaggatatttttaccttaagaaattctgtttgtttacatacagtataagcatcaagtgctcaaggctttaaccctaccaaccaccaaacagaatggatttttcttttcttctatatacattccagatctcactatttattttttcagtgtgagatgctacaacgaatgttgaaaatactcaaaaagctaggttaaaaaattttttttaaatggctgtgcttatgattcaaaaagacctaattctgaaggcatttctggtcaattccagttgtttgccggatgctgtaatagttgattctcctaccgtgacccggctgttggtgcccgggttccctcccagcctgtagttgttgtaggcgagatgactgtatggattgtatcccacaaaccctggtgtgctgggcatttgctgatggaaacaaatgagacaaaaacacgaatgagaaatgagctcaaacgaggaaaacacagaaatgaaaaatgatctgcatatggcatgcaaaagcaacctgaatttaaacaagcaatgatgtgttgtaattgttctttttttccactgaggaaattaaatatttttctttcattgagaaacctgtctgcagtgtcttttggttgtttttctctttcttttttgcaggggctgggggtgtttgtgtgactgtgaatgtgtgttttgttttttgaggtaagcaacacactgaagtgtttaaaacattcaggattactttatggtcaacaataggataaaacaacttagcaatatatgaagactgaaataggaaggcttgaagtgtgatcaactagaactctgaaaacactacatgcaaaacaaaatacaatttatttgacatgtggatgccaccaatgtatttatctactaaaaacaaaaaaaagaaatggatctgatttcaacgacagttttaaatcattttatataatgtgagaaatgagtagagactcaaatcgggaagccaggatttgtcaattgaaaagaacatatgttggatttgatggatgtcacatacatgatttaaaacaaagacttgtaagaaatgcatggatttcattctggggtactatctgatctttttaacccagtcattcttttataggatttctcttccatttcttctttgatccatcttccactggtcaatcatgaaaacatttctgcattttgtctcaatgtgaactacttttctagtttatagacttcttttttcatctagtttcctgatagctctcaccctttcaaaatacaactgctcatttcagcaacagaacccttggtttttgtgaattatgtgttgatgtaatcacaaatgggctcttatatagcagtagccttggggctaatacaatgacactcaatgttcatgagaaccaaggcataatgcatagaaagaatatagtagagagagaccaaaattagggtattttaccttgtaaaattcaatcaaaatatgtgacaatttcatttttacatgcaattaacaatatcggtccttaattgtataatgtaaaatacacttaacacattccaactaagctgtagctgttacaaaataaacacaatttcctaaaacatgccgctgcacatatccttagtacccaaaagaaagacatttaagcagatattacatttgatactctttaggagaaaagagaacggctgatcaatttctagtctatacagttagaaaagacgcaaataaagcatatttaagtaggcaaaacacagttgaagtatcaaaggcatgaaagaagtgtatattacttgcagcggtacatttgggtggcagaggtgatagtggtgatagtgttggtagtggtggtgatggtggtggtggtggtagaagtaatggaaagaaaaaaggaagaagaataattcatttagtatccattctgttggatgttttaatccctagtcttctatattttgtgtgttaatgtgaaactataatgacacaaaaatataactaaagaaaggcaaaaaaaattcctttttatgcataataaattataaggggacacttggtttttgaaatattttaatctcaaaaaatcaagtttgtcaagatgatgcattgtcagaggcagtatttttgtcaaaatgacaccttcaaaggtagcataaataataagaatcactgttcaacattatgaggcaataatgttataaaaataagggaactaaaaaaaaaaaaatggaaagcaaaacattataattataccatttccaaagctgaagtacatggttagctctttgaggtcagaatctcaattgttcagctccacctgtatagccactagcagaatgccatggagatggtcataacaaatgttcttcgatttaagaaagaaaacaaagcaagcataggactttatagtctactggaattaactttagagcctgtatatgacataaattgaaatgagaacatatggtacggtatctcttttctaaagtatctcactaaagaaaaacaaattgttgataaatgtaactaaaatatgtatctgagggttagtaaatatgagtagttttttagcggagaaaactaagttacacaaggacctaattagtagtgaaaagtagactagcctgaaatttaggtggtgggggtatggaaggaaggattaatattaaagaactaattttgtagaatttggtcatgctaacagtgtttttttaaaaacaaacaaaaccccccctcccaaaaaaccaacaaggaagccatttcagcaagacctgaacagttactgctaaatctgttttgtgggttggaaaattattttacatgctgaccaagctgggccagagcttcctgggtgaaaaaacacgttcacaactacttaaaacatatatacttccaaaccaataaaatataatttatggagtggaataagattcaatagcaagatctgccccatagataatgaaatctttacttgaacagcttgaaaatatttacaatgagtagtttcagaagctttattgtttaatatgaaaattttagagagagacaagaaaggagagaaaaacataaccagttgaaggttaggtttaacaaaatagccagaatgagcattcactcagtaacaacttaaagactcttaatagtgaagattaataagaaagaaatggtaaaactttcacttatttcccatttacaaagaaaaaacaaaacaaactgagcacaggaggttggagttttacagtactgtttctttaaatgttggggttggttcaaggaaagatgcaaataattattttatttagtaggaagtgcttttttttttttcttttaagctgaatttcatcctgttgctgtgatgattgagtgactgtcactggaagacatctgggtttttgtatcaaggccagagttggctattacattaacaagaaaattaaaacttactgttgcaggagctggggtgggaggtggggcataagatggtctttctgtttgaaagaaaataaataacttcttgtaaacaactgagatataatactatgcaacaaaactaccaatggtcctgttttgaagaaaaaaaaatgagagtattttggaattcccacttgctagggcattagtctcttattaacatagattgataaatataaaaattgaaacttacttgacattttggaagattaagttctcagttccttaagaatgaatctgagacactaaaataaaaaaaaaaggaaaaaaaaaagagaatcaaaactcagcaagcatacgagaatgttttcctaatgaatagggtaatttaattggtatttctgagtaaaattacttcaccttaattcctagtaattaagccttttgtgtattttaactagttcttataggtcatttggttgattagaattaaatgactaaaataaagtactggggatatttagaaatgtactttcaggttttttcttgtgatactaagctacctcttgtatggaaaacattttgctgacgccatgtaaacatttcatcagactgatacaaggatgagaatagaaagtgatgtattatcagggtccaacgcaacaaggcctaccagatactgacagctccctgatcagcaactgtatcatgcttttgggataacaatttttattaaaattaggcagcattttattcctggaagcagtgcaaaaggtaattggtatgacaatgaacttcacattctcttataatggtaaatagcttcataaatgctgggaataaattttgagagtctacctgaaaaacttttattcatcattcacagcccatttcaaaatttttctcctcaagggaactttcttgatacattacctgggcagaattaactgctcccccatctgtattcctatacagtttacacagatctatattattataacttttttttaacttatcaatatggctagattgtatgctacttggaaagagggaccatgtcaggacctagctcaattcttaggaaattttttcctagtattaccagctcacaacataaccaggcacatgtgagcttgttctttacatcaacatacatcacaaatagtgaggtacaaaaagacaaaaattcatctttggaaagaaggcaaataaacttctatgactattggaggtatttgcaaccaaacatgtggaatagatctgatttttcgcttctattattaattttaaggaaattccctggagcataaggaatgagtcctggtgtggaaagaaacagctcattttctcaatggtccaacctgagtctttccctcttaaagaacagccagaaacctttgactctggtgtagatttcctttctgctcacattaagggagctgtcaacatccagcaggcctcgctgcaggggaccctgacaactaacataagctccctgtacgttatacttcattgttaatactttaaaattattgctctcttttgctagaatacaaaatttaagagtgggcttgtacatttgtccaccgttggatccatctttggtgcctggcataaaaataaatacccgataaatatttgttcaagaaatactttatacggggtacgcttatgacactatttcgcttaacactcacaagtactttatatgtacagctatccccattttacagatgaaacaagggagtctcggaaagtttaaacaacttgtctgaagccatatgcagccaggaagtgccaaagttgggtttcaaacccaggccaaactatttcagagctctgctcgtcctcaagtcgctgcctgaaccaatgggggaaccttctgcccgggtggggggtgaaccacggacctgccttgcccacggcttcctgaggtcgctctctttgtcttggagaatgtactttactagcaactcccctaaaacggggtattcacaggtgctttgaccaatttcgggggactggccttgcctccaaggagggggccccagatgggactccctcccaaccctcgctctgctaggcctcaaggaggcctcaaccggctcctggctctggccccacggccaaggctgaaccccagcaacccccgggaactcggggtctagccaagcggggacaccacgacttgcacccaccgacccggtccgtcccacttggaaacactcacccgcgggcagaaaaagcgcccgcagctccggcttcgcttccctttgtcccgcgctcgccccgcccctcgcgtccggagcttccgcactcgcactttccacactcttcttaatttttttttttttccgggccccacccgaccctctttagaaaaactaaccttctagtgaagatgcggtgatgcttagcacactcagggatttttttcaggacccattggatcctcaaaactccccgaattttgatactttcccagccgggcgctgattcgtcacggcgaagagggccgaggaggcccgacctaacacagaataggcctgggtttagcggctgtgaggagccggagccgccgcagcgaccgaggaagtggcgggaggtgccgagccttgcggaggggcggtgggggccgcggtgggagacggcggatggcgctcagcgcgaggccgcggaaccactgtggcagcaagcagttcggccagactcccgctgagcccgctcctggaggggccctccccgactccggtcttgctttcctttaggctgtgggtcagagtctacacttcactaaacctgggatggaggcgtggaggacttgcttcgcggcgtttgcgtcctcgcaggcgcctcgcagggcttcctgccctcacggcgggggagtagctttggcgaaaatcagcacgagttctgcagtttttccaagcgcttttagggtgtaatcgtcccaggtttctaagccaaggcccggagagttgaccccctcgcaacagcttgtgtgtccttgcagcgccgcgggtgccacctggtctccgcctcagcgctgcctcggctccttcggttcccaccagcgggaacgaccgtccccactttcagcttaaactcatctgtccttctggatccagctcagaggtctctttgtgatgccctcctggaacttcccccctagtaatccttcctttgtattcccgtggctctttgataataatggttggagtcctgaacccgaccctttgtatcggaccgtgtttgtcatctccagtgctttatgaaggccttgaaagcaaggttcagccgtctgtattggtcatcttcccattgccagtgcctacgaagggcttgacccattcattgttagacgctcagtaagtgtgtattgaggcagccctctgtgccactccagggctctttccactaaatcatgagtatgttggtttaccagatggaatgagtagcctcttctttggatacataaacacccgatggatattgtgggtcactgtggagggagaatgaacgtatgggatccctgacctgtggttactggaaaacagttgacatttagagagaggctgaattcttgggcttcccgtagcccccatcctgagtgtgccaacagggactagaagcatctctagtctgcaaagcgaggaacaagtgatactctgtccaatttttccaatattgttatactcatgaatagagattaatgaaattgaagagcatattcaagagaaagactaaaggagaagtcgtctgccccgtggacaggcagcttgagtggtgcttgagaaaatgtacatgaaattgcttgttaaaaaatattcacgcctgtaatcccagctcttttgggaggccgaggcgggcagattactaggtcaggagatcgagaccatcctggctaacacggtgaaaccccgtccctactaaaaatacaaaaacaaaattagccgggcgtggcggcgggcgcctgtggtcccagctattggggaggctgaggcaggagaatggcgtgaacccgggaggcggagcttgcagtgaacggagatggcgccactgcactccagcctgggcgagagagcgagactctgtctcaaaaaaaaaaaaattatatatatatatatgtatatatccatcagagacatgtaaaggattaaagtacgatacacaaaggcctcagaagggatttcagtacattctttttctggcttcgtccagcaactccagcctggtttcttccctgcctttgggattatggtgggaggattgggcgagtgcagtgctggggaggcgctgtgtgttgtctctaggcagtcctctgaagaaaaactgcaggttttggatgttaagaataaagcaccctatagtaggaaaggggtggcccaaaaacggcaaaaagggaaaggaggggacctaagtggagcagtgacattgtctgatacactttctcactgggtttctgctcagatgtcaccttcttagtaggtgtttcctgacctttttaaaattgcatctcattccccaacccccggtgtctgttcatggcctgtgctttactttttctgtagcacttgtcgctacctaacatactatacttcttatgaatttattttgttttgtctttttcttcttcttttctttttttttttgagacggagtttcgctcttattgcccaggctggagtgcaatggcgcgatcttggctcactacgacctccgtctcccgagttcaagtgattctcctgcctcagcctcccaagtagctgggattacggcatgtgccaccacaccctgctaattttgtatttttagtagagacgaggtttcaccatgttggtcaggctggtcttggactcctgacctcaagtgatccaccgcctcggcctcccaaagtgctggattacaggcatgagccaccgcacccagccgtcttttttttcccatcagggtggagattttgacatctggaacagtacacagcacatttagatgctcaatacttgtggagtaaataaatgaatgactcattttcttcgcttggttctttctctaccaaagatttgaaaaattaagaaacaccagcctggcaacatagggagaccccatctcttaaaaaaaaaattagccaggtgcggtggtgcacatttgtggtctcagttatttgggacgctgaggtgggaggatcgcttgagcctgggaggtcaaggctgcagtgagccatgatcatgccactgcactccaccctgggtgacagaggccctttctaaaaaaaaaaaaaaagaaaagaaagaaggatataggcaagagataatagaaaaataatctgttctctagtcctgaagaaactaaaactgaagagtgaattatccagcaagatggactttacttattatgagtttttttcccccaaagcaaacaccagaacatatgctcttgcctttagaaggatatttatggtaactacaggacagatgtttggagttgtgattattcccagaaaatttgggatacagcatcaatatgactatttaaactaaatataactataagggtagttgggagcactcacgtgggaccagtggttaaccccagagataatcttaggcccaattaagacctaacttaggccttagttttcattctggcagcaagatccagaaacgtggcctgctttcccctctgacactactcatacttttttggggttcttctttccccaagacagggaagccaaaactaagtaagctaaggttctagtccaggtgtctttgagttctttccattgttctgtgggaagaaacgggtgatggagacagagttaggggtaggactgggaagaaaggagaaaaaaggagaaaataagacagaataaggaaaaacctgaagtccttggacacccagtagtccatgaataggctctaagtgatctatgaaccctttaaaattatactcaatttttatgggcttttttcctgataggttaattctttcatgagattttcaaagaggtgcgtgactcaagaaagattatgaaccaaccactgagccatggagtttgtagtatgttcttttgaagcttttataatggattttttttttcttaaacaagggaaagcgagagcaaagctttacttgacccaaatagcctatgaaagtctgattatagacaacatgatgaaacaaactaattttctcagctgtttctgtgagagcagaaggagttatgggtattctgttttctgtagctggaaatagttgtgaaatattgaagtttagcagctttccaggacagagtgatccacactgttttacagaatttaaaaagcacggtttgctttgagaaccctctatgttgccctcaaaataacctggaggatttgggacatgagtgttgccccatggtgtggaaaaggatgaacgttgaaaacagggtagagctggagaatctgggttgtggggtctattatccactgataatattgggagtctagggcacagtagccaaacgagattgttgcaggccgttatctgggctgcctcctgtttttgtaataaacccttatttggacacaagcaccttcatttatttacgtattgtctttggttgcttgtggttacaagggaagggttgtgtagttgttacagggatcctatggcctgaaaagcctaaaatatttgctctctgggcttcgatggaaaaggttgccaagcctggtctagagtctaagcatgtgagggaaacttggaaagccttgtactgattttcacatataccttattttagagcctttatttgtcatatgcccacaaatattggcaatctgtgtgtacatgccggccataacttgtaaacatagaaccaaattctgccctgtggacaaactttcctttgatttcatgtgttgataatttgagtaacgtgtatgcatattgtttaactaaaatttaattttggctcatgtatcataatacatttccaatggaaactttcaaattaatgtaagcattttttgacttcagagattttttatttttgagacagggtctcactctgttgcctaaagctggagtgcagtggtgcaatctaggctcactgcagtcttgacctcctgggttcaggcaattctcccacctcagcttcctgagtagctcagactacaggtgcacactaccacactgggttaagtttttgattttttttttttttggtaaagacgagggctcactgtgttgcccaggctggtctcaaactcctgggctcaagcgatcctcctgcctcagcctccctaagtgttgagattacaggtgtgagccaccatgcccggccaacagatttttaaaaaattctaaaaacgtaagaaaacaaattgaaggacaaactgaactttgccaatacaaagatctctagcaaatgaataagaaatatgcttatgtgcagtattagttgtatatttctgcataacaaattatcccaaaatttagtggctcaaaataataatcacttattatctttagagaactatttttttttttttttgagacacagggtctcactctgtcacccaggctggagttcggtggcatgatcttggctcactgtatcttccacctcctgggctcaaacaattcttccacttcagcatcctgaatagttgggactactggtgtgtcaccatattcggttaatttaaaattttttaatagagacgaggcctcactgtattgcccaggctgggcttgaactcctgagctctagcaatccttctgcctaggcctctcaaagtgttgggattataggtgtgagccactgtgcctggcatagagaacatttttatactttagacactgtgcttggcatagagaacattttttgtactttaaaagctatcatgacagaacagttcaaattgggtgactcactgggaaagaataactgttctggaagcaattgaaaaattaaaaatagtatctttacctgttgtgttttgaactattaatcattgtccgctgtaatttcccccacacattctttaaagacaattttcttccaaatagtactgtatatctgagcagtgctttaacaaatatttttgcttgtatattatttcaaacaactgtaaggtaggtagagtaggaattattatccagctttaccttttcctttgttttcaagtgtaaaacttgaggcctaggaacttaaagtggcccctcctggttacatggttagtgacagagccagggttaggatcctacaattgttagtaactggaattactctttatttttgtatttttttatggaagcatgcatttgaaacatttcagagagattaaagaatattaatttctactcatgtgtaaagcaaggataatattattcattttgtaggattgttgtaaggaaggattagggattattagggataaacacagtgcctagagctgagtaagtgctttgcaaatggtgctgccattattaaactttttccagaactatgggattatgtgattattttgatttttaaaaaactagaataaaatattgatataccattcttaactcttttgtaaaacaagttaaaaaccattatctatctactgtgattgcagttttctttattccccaaatgaactaaccatactggagtaattagttctttgtttcacttaaccatgcagagatatttttgaactaaaaggactgcgttcaaactcacatacaatgcagctttagcattcatatttcaattttttcaatttttaatttttatttatttttactttttagagagatggggtcttgctatattgcccaggctggccttgaactcctgggctcaagcagtcctcccacgttggcctcccaaagtgctgggattacaggcatgagccaccgtgcctggccatgtttcatttttttaattgtagtggaatcattaccttggtaaattcatatcccaatttaaaatgccccaaagcaaataaagcttcattataaattcaaatactgtattttaaaatctacatgttatacacccaatagatgcatactggaattgctacaacaagcagttacattcatgacgaccagtactaagttttttttaacactgcaatagattatgctagatatattgctttattatgatcactgttgcttagtacagtaactttagtacaatagcttatatgattgcatttttaaagctttaataaagttagtagcatttagcaatatcaaatgaaacattttttatgtataggatgtattttaggtcagatgcttatgcaagaataagcacttaacatgctgttatatccttgacaaaacaaaatcatcccttttcactaaatagaataaaccagactaaaaggaatctgaagtaattgaaagaaaattaaaaattttatatccctgtattatgttaaagattatttaacataatattttcctggttaaaacatacatttttctggttgaaatatatatatacatatatataaattatatatatgtatatatataataagtatatatggagagagagatagaggagaagagagaggagagagagagagaaatattttaaaggctgtactaaaatgctaacgtagctatagcccttagatgatactttagctgggaaaaagtatggtgagttgtactcagctactttttctgcttagaaaagaattaagaacttataaatttctaatgtcttaaaacaggtatttattaagatcttaaatatacctgtattaaacaaattaggttattttaaaaactttgcaacaatacctcacttattcacaaatatattttctacccatatttattacaatttgaacgatttaaaaacaaatcctctaaatactcttagcttagataacaataccgttatcttagttcacataaatgattgcaagaaatatttataatacttcatatagtatcttatctacggcttatagcaaacaatctaatcacatttagctttacagttggaaaaactgggatggtgggtaactgttctgataactatagtaactaccttttcaatttgcttttcatgttttgtttgcgcagttggccttctgattttttttctttttttggtgggggatacaacctttaaagttccttgagtaaagtaaatcttccggaaatcagatacttattacaaaaaaaaccttttagatatatgtagattaacttaattgtacttatctcaaattagccctggggtgtgttctatagtttgctcagaatttctcatggaaaataactcatttttctcagtatacaaatgatttatctcaaaaagaagaatcctcattaggtgaatagtgagtccccctttaaaaacttgtttataattgctctttttgaaaaatagaacaaacattgtaggtttaaccagtcatggaataatggtgaataactcagtgtgactcttaacacaatcctattcaaacaattcttttttccttagcgtattcagccattgaaaaaaattacaaagactttactaaaccaggttaatgcttacagtctctgatgaagtttcaagggaaaaagaagactattgggagaatataaagaaagagactgtactggatttgtgattttatttttaagctactccctctcattcatatatatatatatatgtctatctccataattagattcagagaaatgtcctttattgtttttttcttctgaagagaaccacatattgatcataacattttccatacatacgtaataacttacattttgggacagagggagttggtatggcccaccttggtccatcctaacattttccaatcaagtcaaatactatctttggattaattagctgttgatggaggtttgatagagggaatactgcatgatcttctcatgataagcctgacttctatatctggtagattatcctgcttagtctctaaacacccttcatcagtggctgctaaatgaagatcaaatcgaagagaaacagactttttcctcaatcgagggttatctttaaagaaagaaccttcccattctttaataacttcatccactttctctgtcctgaaatgataaaataaaccttttaataatgaagaagtatgggtctattaaaaatatgtattatatatttcatatctatggaaaaatcaagaaatttgtataatttatagtgtatagaatttataatgtacatactttaaaaatcatatgaatagaatttcaaaggaattgtatggaatttctctttaggaattctcatgtttgggttgtatttttggaaaaaaacggcaaagtaaggattcagtactcttccatgagtttttatgtatatatgtcagattaaaaatcacagtataggctgggtgtggtggctcatgcctgtaatcccagcaatttgggaggctgaggtgggcagatcatgaggtcaggagaatgagacaagcctggccaacatggtaaaaccccatctctactaaaaatacaaagaaaaacccagctgagtgtggtggcgcgcacctgtagtcccagctacgtgggaggctgaggcagaagaattgcttgaacccgggaggtggaggttgcagtgagccaagatcgcgccactgcactccaccctggcgacagagcaagactcaatctcaaaaaaaaaaaaaaaaatcacagtatactaaaactatgtttggaaacatttaaacaaagaagagtaattactgggattacgcaaagttaatttctttacatatatttattattatttcttagtcaaagtttctttacttactgaatagtgccatgagcttcagtgctctccttaacgatactcccatttaagattgcctgtttggttactgtttctacattttcattctcatacttttgtgggacttttgtagtaaaagatatttcatttataatggctgtgaaaatatcatttatgatatattaaattacagtattgaattactgttcacaaattatattcaaacttttattcaaatattgcttgttttttttcgactttaaagtatttaatttccttataaagtaatccctgtaaatagtacatcacttttcaaatgagtttatttatgtcagaaactcacctgatggtaaaacaaaaccaactctacttgtggtaggctttttgtcttttttcccaccttggatacaaccataatatctgaaatcagaaagaattttattttaagagcaacactgtatcagcaaataattaaaacaaacaggagaatggataaatcgtatattcacgcaatagaaacactatttaactgaaaagaaatgaactaaggcttcaccgtatctttatggattgatcccctaagaataatattgagtgaaaaaagaagttttatagttttataaagtttagaataatatgcaaaacaatttcatactttgtaggaatacatacatattaccataaataaatgtatgggactaataagcatcaaattcagaagccaggtcaggtagagggaggagcatgagattagggtatgtggcttaggtgtccagggaacttcaacaacattggaaacattttactcttttttttttttttggaactatttttcttcttaaactgggggaagtgggtacagaggtggtcattatatttttttgaaattttcttgtatatctcaagtgtagcctaatttttttaaagttttactatgcaaatattaaagactttgatcaatatcttgaatgattaggaattaaataaaattcacaaccattcattttatttaacaattatatagttacatgtatataggaactggaatgattaggaattaaaatttataaccatttaactatatagttacatatatacatatacatatgtatatacatgatatgtatacacacacatttacatagaacttacaatgtgccaggtattgttttaagcactttacaaacattaactcatttaatcctcacagcaatcctatgaggtaggtagtagtattattcccattttacagatgagaaaactgaggcacacagaggttaagtaacttgcccaaggtcactcagctagtaagtggtatatttttgattcagtttatgttttttcaaagatttaataaatgtcaagatttattataggctaaagttgtttcacctagttttcatctagttttatagaggacttagaatttggaagcaagcaagaataaagattttttcatggagaattggaggttatgtcatgctcaaagcaatatgaccttataagtcattacagattatgatgtatgaattaacaagaattcctcttttgatatcttttcctatcaggatatctggtagtcttttaaatcatgactcaaaataatattgctttccgtggttgtaatataattacgttagagtaatgattactgttttgaggtttgatgtgtggtatagggtgagcccttgatcagggggattgtggtgattgtgaattttccaggcttttgttatgggtgatccttagaaggcacagactaatcctagaagagatgaatggcaaggaaagtgagaaagttaggaaaggtctctctctctctctctcttttttttttttttttgaggtggagtctcactctgtcgcctgggctggagtgcagtggcgcagtctcggctcactgcaacctgcctctcctggattcaggcgagtctcctgtctcagcctcccgagtagctgggattacaggcatgcaccaccatgcccggctaatttttgtattattattattgtttttttcttttagtagagacagggtttcgccatgttggccaggcggatcttgaactcctgacctcaggtgatccgcccacctcagcctcccgaagtgctgagattacaggcgtgagccgctgcacccagctcaggaaaggtctttttcatgattagctcattgtaatcccaaactccttaagcaatcctcctaccttagcctcccaagtagctgggactacaggtgtgtgccaccatgctcagcgaattttaaaattttttgtacagatgaggtctcactatattgcccaagctggtattgagctcctgagctgtagtaatcctcctgcctcagcctcccaaagtgctgggattacagcagtgagccactgcagctggccaagactacaagatcatttttgtagtaatctagaattgtttacattttgttctaggtgactttggctgtttggttcctaattttggaagactagaaatggttctttcatatattctttgcagtgcataccttattgtatgggctcagtgagtacaccatgatgatgatggggtttttggatttaatttctctgactacatcaacaatggcataagtggctctgtatttctggccccttgtcattaactaaatggatttaggtacctgatttcttctttttctaggaggtggcgataagttgctatttcttgttccagcctcatcttcgtgttgagaagcatctcgtgctcttgaagctgcttttcgatgccgcgccttacttcctgtagctctttttctagtccttcaatcacagtctctaggtcttgcagctgcatctggtaatgctgctcgctggcatgtagggagttttcaaggcccctttcctgttttatatagattttcatcagtgaatcagtaacacagaatgtgtttctgaaatctgatttgcaatatcttcatcttttttttttttttgagatggagtctcaccctgttgcccagagtgtagtgcaatgccatgatctcggttcactggaaactccacctcctgggctcaatgattctcctccctcagcctcccaagtagctgggattacagtcgcgtgccaccacgcccggctaattttttgtatctttagtagaggcggggtttcatcatgttggccaggctggtctcaaactcctgaccctgtgatccgcccgccttggcctcccaaagtgctgggatgacaggcttgagccaccgcgcctggctgtcttcattctatgttctatttttttctttaaaaagattgcaataattttattatacctatgcaagaggtgtgtttccttacagctttgtgtgacccctaattattaaaaaattatattttatttacataactagagatcttactctatttcaaagacatcctgtgataattcttactgaaaaaaaaatcctctgcagtgtgattaacttattatcactctgaattatctgatttttaaattattgaaagtatacttcagaggtaggctttgtaaaaaaaaaaaaaaaaaagaaaatatagtacattgagtatcaaggccagagcagactgctcataaaaggcatttaggaacatgcttaaatactttttgtttgtttgtttgtttgagacagtctcgctctgtcgctcatgctggagtgcagtggcatgatctcagcttactgcagcctctgcctcctgggttcaagtgattctcgtgcctcagcctccagagtagctgggattacaggcgtgtgccaccatacctggctaattttttgtatttttaggagagatgttttcgccatgttgctcaggctggcttcaaactcctggcctcaagccttggccttccaaagtgctaggattacaggcgtgagcaactgtgccttgctccaaacatgcttaaatatttttctttctttttttttttccttttcttttctggagacagagtctcgctctgtcacccaggctggagtgcagtggcatgatcttggcttactgcaacctctgcctcccaggttcaagtaatttttgtgcctcagcctcctaagttgctgggacaacaggcgcgtgccaccatgcctggctaatattttgtatttaatagagatggggtttcatcatgttgctcaggctggtctcaaactcctgagctcaggcaatcagcccacctcagcctcccaaagtgctgggattacaggggtaagccacagtgtcagcctaaatattttttattcgacgtctcaatggcatggataaaagaatctccactgttaagactttggataataacgaatgctctattccctatcttcagcaactagaaaatcccaaggtaataagaaaggatttcttcatttttacaggtctgaactaaaccttgagtgagttggtaacagccactgccacaatggagggaggggtgagtaattaaactaggatcagggatagaattcagtggccttgatttccagtttctcatggtaaataaacagacattcatcttttccttctcttaatcaaatcacatctgaggactcgatgggtcggttacttttgggatcattctcaccacagcatggagagattcaatttccacttgcaggtggtgccactggcgtcgggcctccttgagttctgcttgagctgccttcaaagcctcttcatctttgtccatttttttgcttatgtcttcttctagctaacaagaaagccaacagcaacaataacaaacaaaaaacaaggagtgcttctgaaaatgagatgtgtaaaagcaattatagaaaaattgtataggaatcaaagcatttttccttaactcattagattataatgtgtgtcctagtgcctagttaactaattaaatatgtaagtccattgcgttcttagcccgttttctcctatgttaaatgatttcaagaaatcccttccaactatgacaatctgtgaaatatggaaaaatacatttacatgaatgaaaacagtttgcaggaccaagattcgtgatctctgatttttaacttttcattatttatggatcactaggaggaaggattgaaaattagctatttccccccacattttcttgtaggctgctttgcagaagcagataaacagccgtacccccaaaactgatcaattctgggaccaggtatagggatagggcgtaaatactgctaggaaatacattactagtaatttagagaattaagttgttataggcaataaggctcacaaatagacttccatattaagaaaatctgttgattgacctttttcaagatgatctttttaaaaggcatattaattttgggtatctgggtaataaaatgaataaataataaaaatgacttctctaaggattgttttctaaatattctcctattaaaaaagtagaatattttatatttagctttaaatgtttttatgttgatgttgaaatgaaaagaaagtatctgttgacagaatttttaacatttggccccaggaacagtgagaacaatgtatagaattgattgtagcattttgaagcaaaatttataacttttaattttcttataaaaatatattttaacatttaaaaatttaattttatcatacattagatttttttaaaaaaacgttgaagtaaatgaaagtttatgaataaagtttagggcaaggtattggagaacaaaattcgtacatttcttttggtttgttgaaaatctgttcttagtgttaacttggcaaagtcaggcagcaagcaacacctaccagagcaactacagaaggtaaagtaaggaattttggagagaagaaaacagaaaaatgctggtatctgctggtcttgtggctttcaaatatggaactggcagctaagcttgttcggtaactacagtcccaagatggcccctaaagaagtctatctcccaagatgagtcctagggtgatccccttctacattgactctgggctgacctgggtcttgctttaaccagtagaatgaggcagaaggaatgctgtgccacttctagacctaagtcttaggaagcctgatagcttccacttctatgcttttgggagccttgggccaatatgcaagaagtctggataccctgctggagagatcctgtagaaaggccagatggagagagaccctgaggctacgtgaagtgagagagaaagtcccagcagagccagcctttcggcaatgccctgccaaagtgccagacacataagtgagcccagtcatgccccaagacgattgaggtcccagatgagttttggggtgttatacaacaatctgtaactaaaatagcttatttagaaatttaaaaaaataactaatcaggctgtcttgaatttatttcagctgactttctgagttatttggaagaaaatcctctaaagtagtttcaaattaaaagacactttaaacaaaactcaccgtagtcttgctttttcatttgaatttactcattttggccctgtgacttgtaaactaaactcatatttctactactgcaaagttaagtgttttgtttatgatttttagaagttgtcatctattgatttttttcttctgtttgtaaaggtgaatgaactatcccaatgcttacctgtaccagtgactttgcttaatctaagatgttgatcattctttatgaaggctgaaaatgttatctagaggtgaaatttacaatggaactaaaaatgagtggctaatggaataaaggcctgacatttttctaccaatttttttttttaaaattttgggtgatattcttaagtaaactttttgctgtatttcagggtttggaagataacttgaacccatatatgataggtaaactaaaaaatcccctaaatttcttaatctttgtttctaaaatatttgtttgtaaatttgtttaaagacttgagaccttaattacttgctgaaggtgattgttactttaaaactaagtctatgaaattaggatttagtccttatctaagtaggctctctttctcttttttaaatacttaaatattacaagctttgtaatggaaagaaatgtttctcatcttatagtacagaagcaaaaatcttagtggagaatcgttaccaatttggggaatttcaatggtcataatttatatcattgtttctgaatgccatgttcacacactcagatgatttctatttataacaatctggtataaaatggaactcgttaaaaagatgatagaaaccttttagaaatatctctagaaagtgtacatgctaataaatcttacttaaagatttttcattttaaagatgttatttaaattatctctgtaaataactccaataatatctttgaagggtatttggaatggttccttcctgaagattgtaagaggttagagtgcaccattttatggtatgttgaccccatgttaatgataggaacctcacaatttatataaaaatcaaatgcatcaatcaacacttacttaatggcaatttaacaatataatcacagtatttccccctgtagtcccagtcacactgcagtagaagctaaattccttccccaatagatgctgcatcgaaaaggaaatactgtacctcagagaggccgggacaggaattgggtagacatggactgtctccttattctggaaggtgcctgtctgtatgaaatcattacctggatccttgttgagagcaccgtctctatctgatttctggtgaggatcttttcatagtttgccctgatctcattgagtagctgggacagttccattcttttcccatcctccaccttggctaactgaaccttatcgataggatgagtcgctgcggcagtctgctcggtctgcgcggaaggcagggagcctcgcagagttttaaagatgcagagctcctttttcggaggccacggaaattctcatctttctaactaattatgcaaatacagggtaaactctttgctcctattgttattggtatagtagaaatgtcagattcttcatgaaggaaaggaaaatttcaaaaacctgtactggttccctgtaaaaattgagcactttgaggggagggggagttcatttttgtgaaaaggaaatggggcataacataagaaaattgccgggcatggtggctcatgcctgtaatcccagcactttaggaggttgaggtgggtggatcacctgaggtcgggagttcgagatcagcctggccaacatgatgaaaccctgtctttactaaaaatacaaaaattagctgggcgtggtggtgggtgcctgtaatcccagctactcgggaggctgaggcaggagaattgcttgaacccaggaggtggaggttgcagtgagccgagattgagccactgcactccagcctgggtgacagagtgagactccatctccaaaaaaaaaaaaaaaaaaaaaaaagaaaattatatttagttttctcaaaatgttgcagataagtgctggtagactatgagagttgtgagttaacatttccaaagttttaacaaggatgaagaaatagaccttttggtgtattcaccaaaagaacccttgagtcctttggagggtgtagtcagtgtaccattccatccaatcgttgcaatcacttgagcccttcggagggtgtatttggcgtatcattccatccaatccttgcaatccctgacattttctaacctgtaaagatgaaaagactgaggccagagaggttgaggcatcttgcccaaggttgctcagtgatgtatgacatcactgggactggctctttgacaacttgcttgtgttccatgtattacccctgcatatctgcctctgcgttctctctctccccttctaaattcctggtttaatcttgccagctggttgctagatgtgacagaaatatgtcgtgagagtggatctatcattattgttatttgtggagtggctttggctgaattgtatctggagcacagttcaggagataatcagacctgggttctagcccttacagggcctttgcatgcatgtcctgctcttttaatttctgaattaactcacatctggccaggccagtctatgctgggcattctcacagccctctccaaacaaagctgtcctacccacagctcctggtgagaggagaggttccaggttatttctgacccacccctccctacctcctgcaccttccccatcagtcacaacttgattatctatagattggtcagagacctttggagtaggctgagacagaaagctctgactaaagagagtcattaatgattatctaggccaaactgattctctttcttggtaactgggactgagaaatatgaagagaattaggcttgggagtggaggagagagaagaaagcaatgaattaaattcctaaattaaattcagggagcaatgaattaaatgcttcctgctactttaggtagctcctgctaatatccgcctgaaacacagagagctgaactagattccctggagggtcagtcctggcaatctgcattttaaataggtctgccagcatttcttatgcaccctaaataaagcagcactgtccagtggaaatataacacaaaccacaaatgcaaaccacagatgtccttccaaactttctagtagccatatcaaaagattgaaacaaaaagaagtgaaattaattttacgactatattttatttaacttgatatatccaaaatgcagcaacccatataaaatgttaatgagatcttttacattattcttgatactgtctttgaaatccaagtgtattttatacttacatcgcatctcagcttggaacagccacatttaaagtgctcaatagctgggcacagtggctcacccctgtaatcccagcactttgggaggctgaggcgggaggatggcttgagctcaggagttcaagacaagcctgggcaacatagagagacccagactctacaaaaaaaaaaaattaaaaaattagccaggagtagtggtgcaagcctgtagtcccacctacttgggaggctgaggtgggaggatcacttgagcctgggaagattgaggctgcagtaagccagatcacaccactgcactccagcctgggcaacagaatgggaccctgtgtcaataatttgagacataataataaatatttatttattgagacagacagaggggataggatttagaaaggtattttacaggcatgtgagtaatgcagtaaactatttctagatctcaaattttatttttcaaggaaaaaatattattactttcctttacaaaaatactaccctttatttaaataaaacagtaacaatacctcattaaaggctatggcatatataaaattgtggggtccctacaattcttggtgcatggactgagattatgatggagattgtcataaatccattatagttattagaaaagtaaataatttaaaaatgttgactttattaaaaggagaaagcttgttataacacatctcacaaatgccaaaatactgtgtttggggaccctggctccagggacattcgtgtgtctgtgtgtctgcacactgaaatcacttctggaactttaaaaaatggtgatgactgtgtcctcctcccagaaaatctgatttaattggctcaggacggggcctgggcatcagaatttttgaaaacttcccaggagtctaatatgtagcaaagtttgagagccattctgataaatgtaagttttcttccactcatttatccctctctcttcagccagaggaaacgagttgttggtacaatcatctgaagttaagattcctgcagttaaatattggcaagtagttcatgctgcagctatcacaactctgggtgcataggctcaggcagaccttattgctttatttttcttttttcatgttaatctttattttgagttcctattctatggaggatgtgtgttaaatctcatcatctcagtctctcgccttttctccaaagcattgcatctaagttttaggggagcttatatagttgtgacctggggcggggagcatattgtccttagtgtcatctgtccaagctgtgttcactgagacagtcattattcttcccatctgtcccattatcgttggttggagacatataactaaaaacaaaaatcttccctcaacccagaaatcctctccacaaaggtagtacggaaagaaaatacttctattactgaataagcactaaactagaatgtgatgtgcatcacaggtaatcttctaggaaattgcaagatggaaggaaatctcacctgttacatagccaagcagcagatacaacctattacatactttttgtttttttttttgagatggagtctagctctgtcgcccaggctggagtgcaatggcgcgatctcagctcactgcaacctctggctcccaggctcaaccaagtctcctgcctcagcctcccgagtagctgggattacaggcgcacaccacaatgctcagctaatttttgtattttagtagagacagagtttcaccatgttggccaggctgtcctgacctcaggcaatccacccaccttggcctcccaacgtactggcattacaggcatgaaccaccgtgcccgacctacatacatattttcaagataaacaatagttaagttagagtaagaggacttgacagtaccatagttacacatcgttcatcttaacttcacctggtaatttggggtgatcatctgtgtcagctacttggctttctccagaggaaaaacaaaactttttatatctttatgacaggtggtagttttgcaactttgagtaaggtacccacagaagttaggctcctaccctcccacagaaactgggatataggggtgtcatctcttttgatgtttacatttcaaagagatggctcccaggtacttgagaaatacatccctggatcataaagctaatgaaaggcctatctaggcttcaaaaggatttacataaatttcaaagagaggaaacagtacatataagttttcaaaagttataattacaaataaatgctccctgattttaaattatatttggaagctatagcaatcaaaacagcatggtactggcataaaaacagaaacatagaccagttaaacagagtatagagcccagaaataaatctaaacctaatttaattaactacattttggcaagggcctcaagaggacccaatggggaaaaaatagtctcttcaataaatggtactgggaaaactggatttccacatgcaaaaaaatgaaattggacccttatcttacaccatattagaaaatccactcaaaatggataaaagatctaaatgtaagacctgaagccattaaactcctagaggataagagagggtaaaagctccttgacattggccttggtaatgatgttttggatattacaccaaaagcccaggctacaaaagcaaaaataaataagtgggactacatcaaaataaaaagcttctgtacagcagaggaagcaattaacacaatgaaaaggcaatgtacaggctgggaatagatatttgcaaactgcatatctagtaaggggttaatatccaaaatttataaagaactcttacaactgaatagcagaaaaacaaataaaccagttaaaaaatgagcaaaggatctaaacagatatttctccaaagaagacataaaaatgggcaacagatccatgaagaggtgtttaacatcactaaccatcagggaaatgcaaatcaaaattgctatgagatatcaccttacacctgttaggattggtgttatcaaaaagatgagagtgacaaatgttggcaaaggtgtggagcaaagaaacagtacactgttggtgggaatggagattggtgcagccattagcaaaaagtgcatggaggtttctaaagaagtcaaaaacagaacttccaggccaggtgcgctggctcatgcctgtaatcccagcactttgggaggccgaggcaggtggatcatttgagatcaggagttcgagaccagccgggccaaagtggtgaaaccccgtctctactaaaaatacaaaaattagccgggcgtggtggtgggcacctgtagtcccagctacttgggaggctgaggcaggagaatcacttgaactctggaggccagggttgcagtgagccaagatcacgccactgcactccagcctgggcaacagagtgagactccatctcaaaaaaaaaaaaaaaaaaaaaagaaaagaaaaagaacttccctatgacccagcaattccccttctgggtatccacccaaaggagatgcaaacaccaccttgtaaagatatctgcacttttatgttcattgtagcattattcgcaatagccaagatatggaaactacctaagtgtcaatgaatgaatggataaataaactggtgagtgtgtgtgtgtgtgtgtgtgtgtgtgtgtatatatatatatatatgcacaatagactattattctaccctaaaaaaggagatcttgacatttgtcacaacataaatggacctggaggacactatgttaagtgaagtaagaaagacacagaaagataaatattacatgcactcatttatatgtggaatctaagaaaaaaaagtcaaatatgcagagaataaaacagtggttaccaggagtgggggtgggatgggttaggaaatggggagatggaagtcaatgtatacaaaggaggagatatgtaggatgaacaagtctagagatctaacctattaaccaggactagagctaataaaattgtatgctaactgggtttttttttttttaatgtaagtagactttagctgctctcatcacacacaataaggtaactgtgagatgatagatatgttaatttgcttcaccagggtaaccattttactatgtatatgtatcccataacattgtgttgtaaaccttaaatatacacaatacaatttattttttataaaagatgaagtaaatgctcaaagaaaatttaggaagagagaaaaatctcttcccttgtttccaacagtgagaatcaagcctcttattttaaatttgcttcatcctagcagtgtccagctgctctctcccatatttctttccatgcttaagggcgtaagagtcattctgatgcttctgtgtgcctgtggcatggaaatatcaggtggactgtggctccatctgcccggacacactgtgcagccataacctatttggctcttgtccctttcctgaggttacaatccaggaagtaaggcacagttctcctaaatagttcccccaacttacctcccgttttgctgctttgtaggggctctgactcagaagcaggacctggggctcccctctcagggaccccgctttgcccttcctcagcaatcctttttttcttccctctcctttcagtccaaggtaagttctattcttgagggtgggacggaaaatcctgcttttactactggaacctaagctccaagacctgtctgctcactgctggatcaccactttctagctctgtgcctagcacagagaaggcaggcaataaacaagcgccaaatgaataacgtttctttaggacattttgtgtgggccctgagtcctcttcattctaagactagactgaaggaacacattgcttttgtttcatcctcccctgagacaatgagcacagattaatttatttgcctgaagaaggtaaaggaaatgaattaccagaaggatggtaagtggctcaaaaacactatagtccccaaatttgtagtgtttacaaacacaagcaaatcagacaggcacccatcattcatcttggtgaatttttatggagtgatttcctgggagtttggaattaaactctgggagaaataacatcttttctaacctgtttgtccttaacaaatgtggcacactcaagaatttgagttttgctttgaagaggaaaaaatattaaaaaggaaaataatggattatttttatgtaatgcatttgggcacatacatttcaccctgtaaatcaatcttgtacacaaggatgtcaaactcaagccatttaatgtttttcctgtcctgcacataaatgttgtgatctgtttttattctaaaaagtataaaagatagaatgatggcaatgtaagtttatattaagtgtttttttccttccaggaagttgtaaatatgaatctgttttcttcagctagacagaacactccaattgatcttttataatcccaaagagcttgggtattattttatttatgaagcataatttctttagcagcttaggattttgtgactccctcttcttaatcaagcatgcattttcataggattataaaggcataattagtcagcaaataaaggcttttttttaaaacttaaaaaattgctataaatgacagggctttactggcttatatcctttttgttatattattgatttttctactcataggagcaggcctctacgtgatatcatttaatcttttgttttatatataagttaagactataattagacgataaagagttttgtgtgggaatatgtttgtcagcattttttagcatgttttcagagtatgtgagagatgcttacatgcctttctatacacactgaacatgcatttcacatgaactgattaagcagagtacattatacatgcaatcttagtcctggcagatgctcacttcattctttgctgctgtaactcaagggcaaaaagcagggcagttttgccaatcaaggactttgccattgggtcctattttctctggcatcttccagatacttccaggtgcttctccttcttaccttgttttttgaggcccaatacacacagatggtcaaaatgagctttactagatagagggtgagctcattttagaacacccagtttatacaattttggtgtattacaattcatgatttttttctagcttagcagactataggcatcttccaaaactattcagaattttctccattccttttttatctggagtgcgttaagtcccaatctttgaagtcatagttgtaggttgaaactgtgctcccatctactcacttgagctacaatatttacgtctcctttcaaatctctagaagggaggtctttgttgggttctaagtacattgtcttcaccaatttgacaggtgttcccttagctcttcctgtctttgaaatattgatttttctaaacctgctttctataacttacgacattggccctgctgtcttctattctgtgtcctgatactctagtcttagtcatttctctgcatcttagtttattctagacaatttatttccttgcacttgcatttatcctttcttgcttttttttttcttttttttttttttttccgtagatggagtcttgctctgtcgcccaggctggatggagtgcagtggtgtgatcttggttcactgcaacctctgtctcctgggttcaagtgattctcctgcctcagcctcccgagtagttgggactacaggtgcccgccaccatgcccaggtaatttttgtatttttagtagagatggggttttgccatgttggccaggctggtctcaaactcctgacctcaggtgatctgccaccttggtctcctaaagtgctgggattacaggcgtgagccactgcgcctggcctcttgaattttccctctgttgtcttttctctttttgaaaatttttattttgtttaaaaaaatttctacttaggtcattctcacaggctttctgccctgcatatcaatttttagcaccctgacagtattccctggaccctcaccccttaacattgcccaaatcttcccaggaatgcagctgtgagctttcttctcctcagcccagactgtacagcattctggactttatgatgttccatagccattattcagtggtttataaacacatgtttttagtcattcaaaagcctttttcatttttagctaaacttttgaggtaactgtggattcagttactgtaagaaacagtacagagcaatcccacatatcctttactgaatttccccgatggcaacagcttgtaaaactagaggaccatatcacaaccagggtattcacaccaatgcagtcaagatacagaacatttccattgcaacaatgagctcaaggaagggctttctctcaacgttggctctggctcacggtccctcgcaccatgaaggacacagaaggaaccagaccctgaccctgccgcactgctccaattcagggtagaattgcgaagtgccacaagtaaggcatctctgaagaggaagtaattgccttttttttttttttcctgaggggatcagagaaggcaaataaaggcaaacataaattaaaaataagagacttaattcttcctgttaaaaataagggaaaagacacccctgtactcccctttcttcgagcatttactttagaaaacttgtaaattctttcgctgtctctttgaaatgtgagtaaatcttttaaaaagtaaaataaatcttttgccaactttacaaccaaggaatgcctttctcaagactgggaatcaagccttttgagcgtgaccatccaaggaaataaacacccctgtgtcccaggttctgtgggagggcaggacctaatttcggcaggcaccttgctccaaagctacctcctattataaagatgtgagaagtttactttccctgtatataaagcctattaactaacatagatggtcacccaaattatgggtaaagttaggataaaccgtgtgtgacatatggtgctgtgaagtcctcttatgtgaagagtagctgttgttcatcctgagaacatccacgtaatgggctgtgtctgcttggctatataaaggaagagctatctttctgtctttgcagtctcttagtggattgcttgtgacgggcatcacattctgttttaacgcttattcaatagtaaaatgattttctttctcgtttaccttggtggagaggatttctaggttaggagatttttttactattttttattttttttgagacggagtctcactctgtctcccaggctggagtgcagtggtgcgatcttggctcactgcaacctccgcctcttgggttcaagcgattctcctgcctcagcctcctgagtagctgggactacaggggcccaccatcacacccgactaattttcttttcttttcttttctttttttttttgagacggagtctcgctctgtcgcccaggctggagtgcagtggcgcaatctcggctcactgcaagctctgcctcccaggttcacgccattctcccgcctcagcctcccgagtagctgggactacaggcgcccgccaccacgcctaatttttgtatttttagtagagacggggtttcaccatgttggccagactggatattttgtttttaattgtatttccatagcagatttcatggaggaggtagcgtctgaccttggctatgaaggatgctgcatacatatgttataggcaatttattttaagatatgtaacatttctcatttgtagtttaacccacacatgggaccctgttttagacaggtggcagggggtctgcctggaaattaattttaaaaaatccaagtgaaattcacgcaacgtaaaattaaccattaaaaaatgtacagttcattggcatttagtacactcaccatgttgtgtaactaacacctctgtgtagcttcaagctattttcatcacccccaaagaaaacccaacccatgaagcaatcatttcctatcctcccattcccccagccccttcaaaccaccaatttgctctctgtggatagcagcactattcatcatagccaaaagggggaagcaacccaagtttccatcaatgggtaaatggacaagcaaatatgtgctacgtacatacaatgcaatgttattaagccataatagggagtaaagtactgatgcatcctaaaaggtggacaaaccttgaaaacattacactaaatgcaagccggaccccaaaggtcacgtcttatatacttctacttatatgaaatatccagaataggtaaaaaaaaaattgttttttggagggtacattttagcacatttgggaagacatttatatggtagactttgaacccttatgggggatggtgtggagtgttttctgggaaacagaattagtaaagtggaagaggcaggaaatagaaaacttaaggggtggccgatgacagaggaagcaagagtttacagaaatccctcctcctggctttcaacgcccaccctacctgagcaagcttgtgtctcagtgtgaagtttctctgacaacagggactggtccctgtccagtcttggatatatgccctgcacaactcttgtaatagtaacagtctagtcctcagaatcaaacatttagtttaactttacgtgtttgaaatgccttgaatgcaggaccccgctttagttttccattttcacccactctggtagcctccctagaaagactgcgtggacagcttgaggacacctgtgcagatcatgatcaaagggaccacgtagttctagtttttaaataaagttcacgtatctttttgtattatttttgctaattatttgcctttacccaacggcttgaatgattgaactctattttcaggcttaaatattccctctgcactgctgcaactggccggataaatgtgcctactccagcagcaagctctccacatcccgtccccctttctgtctcctccttacttcatgcccccactgcctccttagttttcagctgccagtgcaaagcaccccagctttctctaggctgtgctctgctccctgacagctgctgttctctccccatccctctcttcttcccttgctttcaacttcccagccagtctgagtatttgagcaccttccagctgcttcactgttgtgtcatgccgggggccatgttgcacagccgcggcacacatgtatatccacggggactcctttctgagcctactgggtgcatagaaactggtgttccagaagtgtacagttgagtttttgacaaagagaaattttacaaacaaaattgtggctgtacaaatttttttttaaaattatattttcccattggcttcacagaagagatagcacctgaccttggctattaaatgcacagtatttaaaatatatggattaacaaaattttatttgctcacacctttaagtggggttaaatatacttggtaattgttttcttcttaaccagattgtccttaagggcaaagagtgcgtgtcttacatttctttaaaatttgccccatttccgtcgtcccaccagccccttagacttagtgcttaatgtttttaaacaaacaaatgaatattaaagtaggcaatcttttattgactttgtatcttgtcttgaaaaggagttgattactgttaaaattctcttaaaaatatgttttgagttctgggaatatacattgcaaggttcaagtttgttttgactttctaattgtataattagagaggagtagctcactcaggaattactgttgtgaatgataagcttttcctcttggatgtgaggttgtgttcagattaaagacactaatatggtataccagcaattacacagtttaaggcaactaagttacatctatagaccatatcattttacatgaatataatacttctatttccataaataattccgaatgcttggagaaaacactagtttttattccccaaaatcattgtctttgaaacctccttaaatagccataagactagcaactcatgccttgaaaaaggtagtcactgatatcaacactgtttgagaattggaaaaacatttccaggacaagcacagtggctcacacctgtaaacccagaactctgggaggctgaggtgggaggattgcttgaggccaggagttcgagaccagcctaggctacacggcaagacctcgtctctccaaaaaaaaaaaaaaaaaaaaaaaaattagccaggcatggtggcacatgcctatagtcctagctcccaggagtttgaggttacagtgagctatggtctcaccactgcactctagcctgggtgacagagcaggacccaattttgaaagaaagaaagaaagaattaatttccagttctctttgataaattctcagtgttaacgactaagacagaatccatccttttttcaactgtatggttctatatgatacctttgatagttaagctatattagtttattaccatacatttggatagttagcaatcaataagttttgtgctatctgtgaaaaataatctggtagtaagataaaagtgtgcataacttattttctgcttcagtacttaacatagttactattttcttgaagactgtagttttgtaatactatgctctttggtgagacaaagcgttctgaaatttgtgaacacttcttatttcctggtaattattttttttggcccccccagtttgacttttctttctttttggcttcttatatcactgtcccacgttaaaaaatttaacagattttaagatgtcttttggcttaaattgcaaacaattacatttgaaaattaatgaacttcgcgaaatttagtccagcctatatgaaaaagaaaactgttgtcagggtgagaatagatgattcgtgatttcagattctgccacacctttacaaatatttttcacactgttgccttcagaaaaattcattatgctaatccatcaagcttcagttccttcttaattgtttttttcaaacgtctcttctcactggtggcttggcgccatctctcactgctgacttcagaaatgaaatgtgatgatatgctgacataccagtgtcacaagctttgttacctttgaaaatcattatctttgaaacttctgcaagtagccacaaaacgagtgactcataccttttttatttttttccaacttttattttagaatcaggggagtccatgtgcaggtttattaccagggtatattgtgtgatgctgagggttggggtacaagtaatcccatcacccaggtactgagcatagtactcaacagttagtttttcaaccctgttcccctccctcctgtgcctcatacctcaaaagagatggtcattgaagtcagtactgtttcagaattaggaaaacattttcagttgtctttgagaaatcctaagtgtcaatcttagagcttgaggaaacaaacaaacaacaaccagaattcaccactttttcaactgtgtgctttttctttgatacctctgataatttagctatgttaccttattactgtacttgcatgttgtaaatgatcaatacatggtttttaaattgagtagggtatctacaagacacacttaactgcataatttgtgtctaaatatgtcatgtatgtattttttttgtgtgactcacttatagaaaggacttccctgttgtggttcttcggttgagataattaacacctcaaaatatcatatatagttctgaatttctagagttttattagttgtaaagtgattttagaaatgcactctgattctaaatgtttgtcatgtggatagaaattttgctatgaataatacattttcattaaaataaagacgtgtttttcatgctatatatatatatatatttttttttttttagtgtaattgcccatttgttcttttttttgtttgtttgtttttttgatatggagtctcactctgccacccagtctggaggggagtggtgtgatctcagctcactgtaacctctgcctctcaggttcaagtgattctcctgcctcagcgtcccaagtagctgagattacaggcatgccccaccatgctgggctaatttttgtattttcagtagagatagggttttgccatgttggccaggctggtctcaaactcctgacttcaagtaatccacccacctcggcctcccaaagtgctgggattacaggcgtgaaccaccacacctggcctgatttttttttattgtatatttctagttaggtgttcctttgttatatcaaactcagtatacctatagcttgccatatcatcttttcttctaattctgctcttcctgccaactttccaacttttattccaccttgaaattttagaaattttgcttaaactgtcttagctctttaaggtctaataagccaaatcttgtctcccagatttttcacttctcctgggattatttcagtccagaaaaatttcaatttattgttaaattgctaaagtaaccttctgacttcatctctagtttccatccctaccactccaattcatctggcatacagatgcatattaattttcttaggcaacccttgcatattttcttttgcaacccctgatagattactacaaagcctaagatttcaagagttccctgtgatccttaagatgagtctgtactcctcaaagaagctcttaagagtctccaggagatctccaggagatctcactacattgcccaggttggtctcaaactcctgacctcaagtgagcctcctgcctcggcctcccaaagtgttggcattacaggcatgagccactgtgcccagccccagctgcttcctgttcatgttaatacttggtatagtctttttaatttccacttgctggtgggtgtaaaatgctataatattggagctttaattcacagcttcatgagttttttactggcctctttggcccatattgaattattatctgtgagttcccaggcacttatcatctgtgctacttactacttttagttctatgtgacattctgatgccattgaattatttcaagagtatctcccacatctccagatgggctgtaccttctagaagggaatatttgtctcttattgtttactgtctggagtctggagtgcttagccaagcactggacccaaattgattgcttcagaccagagctaaaaactgcaaggttagaccttctgaattagaagtgtactcatttttgttaagtccacaaagattaaaaaattccaaaatgtagatgggtgcattcacatgacattactgaagatgagcaaaaacattccctaaatatcctgctggcttttatttttcctagtgtaaaaagatgagtattgttgaaatacattcccttgtcttcatggcttttgcaaagtttcactctatacattgcttcagttatccaatatacgtgaccaaggttaaatggttcttggtgctttatttgtcttagtttttgtggctagcttgtgtggtgctccttaaactggtctttggtgaacacctcttatttgtgataaaacaacaatgccatcaatcagttctttaacaattgtgttgtgccaaaacatttcgttggttctgcgaaaagaaagtgttaggtcaattacatattgatggaaataaagtaaattgataaagcatttctctttaatcaaaagtaagacagctttcgtattgggtacttattaacttttctacctactttcaacagtgagaaagataagcatataaatctcattgattttaatctttgcttttctaaagcttcacaaatttggagtgactttgataaaattcagtcagaattgtagttaatactttatgttagctacatgtttgcatatatttttccttctagactgtaaattctccgagagagggaccacatctttgtatctccaacacttaacacaggtgtttattaaaggcataacatgatctacaaccacatcagtagcacagacgaatcgcgcacacggcgtgttgagggaaagaagccagacacgaaaaagaacatactgcttgattcagggtttgaatcctaactcttcccaagttactgtataacttgggaaaattatagtgtccttatctgtaaactggggataataatagtactcacttcataaagtgttgagaggatgaaaaatgggaatgagattatcacttggaattttggaacctcaaaaggtttgatcctggcttactctgtcccagatgagctttgtgatcatgggtgagctatttaacctcgctgaacttcagtttcctcatctatgcaatggggatcatgccccatctacagaattgctgtgggaattatgtttacatagtgggtgctccaaaaatggtagttgtctttgttatcattgttataatacagcaagtcctatgtagagaggcattgcaatgatataggcaagaaagtggcatatggtgaaatcatagtgaaattagctcaacaaacgatgaagggtttgaattcttctaggaatgccagtgaattctcagtcatagagaaggaagtgacatcaagaacaatagcaaacagattcacaatccctttctctttctttctttctttctttctttctttctttctttctttctttctttctttctttctttctttcaatggagtctcactctgtcactcaggctggagtgcagtggtgtgatctcggctcactgcaacctcctcctccagagttcaagtgattctcctgcctcagcctcccgagtagctgggattacaggcatgcaccaccatgcccagctaatttttgtatttttaatagagacgaggtttcactatgttggctaggctggtctcgaactcctgacctcaggtgatccacctgccttggcctcccaaagtgctgggattacaggcatgagccaccacgcttggcccacaatccatttcatacaattaagttcaagtaaaaactgaaaggaaaaataaagaaaaatctatagtaaaggctgtaacttttcccactgcaagccacaagaacaaaggcatcattttacatcatggcccagtacacctgtaatcccagcttcttgggaggctgaggcatgagaatggcttgaacctcggaggcagaggttgcagtaagcagagattgcaccactgcactccagcctgggtgacagagtgagaccttgtctcaaaaataaatacatacatacatacatacatacacacatacataagtaaatggatcgcagcctgcagcttgaaaaacactgccttaaactaacctacaagttgaaaccttcttgtttaattaactttttgtcttcaattatgcatctttcttcagtctatctcctttccttcttcacctcctttgacctttcaaagaaaatatggattaaaatgcatttccaccttttgattttgaggtgaacgatgttgaaggaaagccatttaaatgtgatatagcaatagcttctaagatatttattactgtttatttaggtgtaagttgaaagaaaaaaaattacaatgctattttgacaaatgtctcagtaaaagtattccacaaccagagtcttgattttatgactctaactgggtaatacaaacattggattcatataaaaacaacacttttagactttggagtacgctgttcctctgaagaaaatgaaatagaataatagaaaacttgtatttagaacttatccttgattttatttcctctttttgatccagtttcaaacttatgactgaaaagaaaaataggatagtcttatactctggttttgattgttgtaggtatcataaaaattgtaatatctgagatttttttttttaaaaagctctatgttgaagtctttgaattttagctttttctatgttttattcgttctgtttttgaattacaccaccctaaatgactatttatcatctaatatgttggatataatacacttgtttccacagacggtctggcagaacaacagttctgcctaaatttcaattcaggtgggcaaacatttgtggtgcaccttgtagccggtggtaatgcatggactaggggctgggttcataaatcgaggccgtggtcattgctttcctagagctggaatggggcattgaaaattgtccttactggtggctcacacctgtaatcccagcactttgggaggccgaggcgggtggatcacttgaggtcaggagttcgagaccagcctggccaacatggcggaaccctgcctctactaaaaatacaaaaaattagctgtgtgtggtagtgcgcacctttggtcccagttacttgggaagctgaggcacaagaatcacttgaaccgggaggtggaggttgcagtgagcggagatcgcaccactgcactccagcctgggtgacagagtgagactctgtctcaaaaaattaaaaaaaaattatccttactgaatgaaccctgtggaggttgttcagccctggttgtatgtccttgttgcggttagctaaaaatgtaaataggagtcattgagacctatacgtgccccagtcctaactactctccttctttaccatacccacagcttcttgcagaccagctcagccctgtgagcaggcagtggttggtcccagcttcattcaccaggcacgccttgaccttcagcagctgcatttagcctggctctggtccttggtcttgcaatgcccttgaaggagctgggtctccaggcactaacctctacctgaggctggcgcttggcctttgattccatcagcttggctttgagggctgttttctgagagtggagcgaagattgcctaagagaagagatgaaataaagagtcatttgggtagattagcatcagaaagttttcctattctctctgcaggaagggaatatacactggatggatgttactgtctcatcttctaacctcttctctttcaagtaaaacagagataatcttctatgcagatgctgtgttttaagagggcgaggttttgatttaactggaaggaaagtatctcaggatgcctgtcttctgtacctagtgcatccctatggtgtaggaaaatcctgctttcttaaggtagagcagtgattttcaggtgattttgtgcctcccttccactctcatttggcaatatttggagacatttttggctgacataataaggggtagggggtgtactattggtacctactaggtagaggccataaacttccataaacccacaggacagctccccaagaattatccaaccaaaaatgtctagagtgccaaggttgagacactctgccttaaaacctgacatttggatgttaggcatttcaaaagtttcaggaaactgcttgaattagggtgaatctgatctaattttaattccctgtaacattaattctgccactttgattttttttttaattcaaacagtttctatttgcagagtcatagattttagagctagacgataagtaccttagtaatcaccaactcccttgctttgcagaaaaaaatgaggcttagagatagatacttttagaggaatgacttatctaaggttacatggtgagctttgagacaacctaagactgagactcaggcctaccaagtcaatgaaaaatacagcaacttccttatgtattattagtttgatcaaagtttccctatggctaaagtgtaattcccagaagataaagatgctgctgccatccttgttcctattttgcttctcctgaaacattggacacttaataaattcttatcatgaatgctcctaagtgaaaaattgattttaaaagtgacacatagctattcaagtttgtttatttatttatttattctttgagacagagtcttgtcctgttgcccaggctgcgatgcattggcgcgatctcagttcactgcaacctccacctcctgggttcaagtgattttcctgcctcagcctcccaagtagctgggattacaggcatcaccaccaagcctgggtaatttttgtatttttagtagagacagggttttgccatggtggccaggctgttcttgaactcctgacctcaggtgatctgcctccctcggcctcccaatgtgctgggattatagaagagagccacagcgcccagcctgttattcaagtttaaatatgttaaatcgtcttaaaaaggagcatatatacttcttgatattcaatgaaatcctagctgacctatacgcaggaattttatctagattaattcttttaagctttcagccaggagccctgcctaatcacctacctggagagagaaacagtgatctcattctgaacgtgggccaacatttccctaacagcaagttcatgctgacatttgtggtatctcagctaattcagtggctgtcgtgtttgcaaaatagggcctgacatgtgcagttaataattttgtttccaggtgtttttcacacattaaatggaaattttcctgtccaagttactaattggaaaagcccaagattttggctttttcttaagaaccctaaaaaaaaccctttttaaagggaatatcatgttttggaaacatattgctgagaatttatgtgaaatcgtgcagttgtctgtgtgggcaattggtttatggtgttttcacccagggaaagattttttttgtttgtttttgttttgagacggagtttcgctcttgttggccaggctggagggcagtggcgtgatcttggctcactgcagcctctgcctcctgggttcaagcaattctcctgcctcagcctcctgagtagctgggattacaggcatgcaccaccacgcctggctaattttgtatttttttagtagagatggagtttctccatgttggtcaggctggtctcgagctcccaacctcgagtgatctgcctgcctcggcctcccaaagtgctgggaatacaggtgtgagccaccgcgctgggccccactcagggagagatttttatgtaccaagtctactgtagactgtagttcaatctccagggcctacaaggctggctcctgtacattcgtctcagtcttagcagaattggatgcagcagcggcaacctgccgttgcagcattcttttctgaaataccaaaataaaaacagagtcatttatcagtgaagcgaaattgtcctagatttattgaccttggctgtgttttttgtttactttattgttgaatctaatttcagcatcttggtgattgtgattggccatggcttcatagtgcattctcatgtcatgaggagctgtgttagatcagctccaggtgggctgacccattccacctgcaactcagagcctgcaacagctggctggcctttaatttcctgaattggaaacaaccctcgctcaaggaattcggccattatggtaagaaaataacttcatttattagaattttccttcacctcatcagactcaaattgaaggcaggaattatgtaagaaagaggaaagttacgacgtgctgtatgggcacatacctcttcctggttctttttgagatgagtgaactcctccgccgggtttcaatctgcatttctagatcatcttggacaaagtcatgtcattccggacttggtgcagactgttgatgtcagcttgacgctccagcgcagggtcagttcaatctcaaacctggaaaaagtttctaatgctttcagtggtcgttaggtttgtattattaatatcatgctgcattttaaatattttattagaatattatagaaatgccaaacgtctgttccttatttgttgttaatataatttgctattaactttccccatttttggcagtatgatggcactccatataaaatgctgcaagcttcggggaagaaccttttcagcatttttgtttcttagaacagagtgaccataccttgttggcctcttgtgtgttggggtcttctacacacacataaagtagggagttaaattaaagaatcctcagaaacacatgctggttcttttcagaaatctcacttgaaatatacctaactagaaattcttacttacggaagaaaattaagtggtggttccttcggacgtagaatcagcacagcattctcgtaaataatgtgcttccctgaggtttttaactaaaatatttttccattgtttaggattctgtttctaagaagaaaaatattcttttataactgtgattccagtgtaaaaagaagcatggcttcacatagtgttttttttttttttttttttttttttttttgagacggagtttcgctcttgttgcccaggctggagtgcgatggtatggcctcagctcactgcaacctctgcctcccggattcaagcgattctcctgtctcagcctcctgagtagctgggattgcaggtgtatgccaccatgcctggctaatttttgtatttttagtagagatggggtttcatcatattggtcagtctggtctcaaactcctgacctcaggtgatccgcctgcctcggcctcccaaagtgttgggattataggtgtgaaccaccacgcccggccttacctagtgcttatctccatagcttatgtttttcatcatgctgctaagggtaactatatcacacttttgtctgaagtccacagctgctagttttacgctgacgatctgtagcatgaagttgcattgtcagtgtttgcatctgaaatctggaaacgcaggacacaaaaagttgtgtctgatacacttgcattctgaacctctgtatgctggtgttgaggcatgtcaatttcaggtctttcaaacaaattttatatgtatacggttctttaatggaaaatagcatatacctctgcttttgagaataaaagaactgtaaggaatttagtttactttttcttaagtattttggaaacatttctagaattctttccgtaaaatgaactatacaaaagtaaacaaattaggaaaaaaaacatagctaagaagtatattctgttgcttgttaaatttcttccttaatctgccaaattgagaaaagtacaggtatatgtggaagatattgccaatcttttcaaattttgtcatttttagtgtggttctttgtctagcaaaacgtcttaccttgtttttaagttctgtaattatctggtaatacttcttgttgtcctgtttttctccttgatcattagcccaggctcaaatttcttattccattctttgattttatattcaagtgtactctttgcctgcaccagagttgagaccttgtccagggaaactgcaacatggtcatctagattttacactgcatccttcttcttaccagagaagaacccacccacctcctcccaagttggtagaaaatctccatctgggttacatttctgcctataattctttctttccaatgatcagtatctaattgccatagagtagattttggggctgcgtgtgacttgatggaagagcttagctctacaaagcccaacagagagagtggtaagggaatcatcaattagtaattcctcttatggttgataatgtggctgtttcatctctgctataattgttttaaatatttttaatgaaatatataatagtgttattattttgttaattattattattatttttattttttatactgtaagttttagggtacatgtgcacaatgtgcaggtttgttacatatgtatacatgtgccatgttggtgtgctgcacccattaacttgtcatttagcattaggtatatctcctaatgctctccctcccaccttcccccactccacaacaggccccggtgtgtgatgttccccttccagtgtccatgtgttctcattgttcagttcccacctataagtgagaacatgcagtgtttggttttctgtccttgcaatagtttgctgagaatgatggttcccagcttcatccatgtgcctacaaaggacatgaactcatcattttttatggctgcgtagtattccatggtgtatatgtgccacattttcttaatccagtctatcattgttggacatttgggttggttccaagtctttgctattgtgaatagtgccgcaataattatttgttaaactcaatagactatctttttattaaaaggcgcagaaaatgcctttaggtatttatttcatattggagggacaaagcagataatatttacatgatatcagcccaattaaatttgtgttttcccttatggaatttctgcacaaaggaaaatacctttttataggcacaatgcttataacacaaagtcctttggaatgatatgataaatattacttattttcagatgaagttatttgaaactaattttagggatttctggagaagtaacagaaaggggcagatccttaatttctgtatcctgtatattaaatatttgaagtatttaagaataaaatttaggaaaataatatgaaaataaatgacattcttctatttttttcttgaatttgattgattctaagaaaataaaaatttaaatttattaaagcctgtcttggaattttgaaatagctaatgatgtctaactttttccccttatcttatgaaagtatatgacctctcccctgcccaagagagttaaagaagaatggaggaactgacataatagagttttgtgggtggatttaatgttaaatagcaaacttgtaagtttctccaggttcttgtaaacctctgcagtggctgtgtcttgctccttttgcggttccttttgcaatcataggaaaaaaaaaaaacatgatttcttttttttttttttttgagacagaatctcgtgctgttgcccaggctggagtacaatggtgtgatctcagctcactgcaacctctgcctccggagttctcctgcctcagactccctagtagctgggactgcaggcacccgccaccatgcccaggtaatttttgtgtttttagtagagatggagtttcagcatgttggccagactggtctcgaactcctgacctcaggtgatccgcccaccttggcctcccaaagtgctgggttataggagtgagccactgcacccagtcccccatgatttctatattaccaaatgcatttttcttcatgtttgttgtcagtgcagtgagataaacccagaggttgatgaaggatgtttctatctatcgttcgtcaatcaatcaatctttaatgaaaggtgttagacaatattttttggtaaaaacaaacgtggtgtgagttgatgttctttctctgaatggcttttgcttcattttactttattggagagtctgagtttatccctatggcttcgaacatcctagtcactaaataaatatattttttaacacttttgttaaaattgaaacaacttaacactcattcttagaaaaaatattccaatgacaaatttaggaaacttatatatcaagctgatattgttattggcaagtgtggggctattggtggatgctacttgtattttagttctgttgcttttgcttttttttaatgacacaaaatatatttaatacgttaaatgagagactaggaaatatatttaaagatctttcaggctgacataatgaccgcaaataagtaagacaaaaaagctttggtaaaataagtagaattaaaaaaatgcagttctgtgaattaacacaagaaaacatcagatgaagaataaagtttctctgccaaagttccagctcaacagtgctgtgaatgtgatgtggctgctgctgttagacaatattaaaaaatttacaaagcccagaggtcgtcttcccccagctcttggcccttctgtttagttttgcatgtcatattctagagagaatatttaatagcaaatatgttaactacatccgaaacacctggcccatataatgaagagtatggaaacaatgccaaatgaggcatggctaaagaaattaggatttttgtctagaaaagaggagacacaatggccatttgaaaatagctctaaagggctaaaccagaatcaaagagctggaagttacacagggagacagatttggaaacgaagacatttctaacattacacctgttcttaaatgaaatggactgccttacaaagtcatgatctttccaagctccagggaccttcagccacagactgaagacctagaataatctttcagggacaatttctgttctgggtgggaggttggaataaaagtcaccacccaactctttaacattctgggaattttatgttgctatgattgtaatagaaatcacaaagcaatgatattgaatcttcatagaaaatttggatgtggaacagccagtggggcaagcaaagttacctcatcttgaatcggtgtaacaaagccctcatttgcataaaacccatcatggagatttaaaagtctagtgtcttggtcttagtcaaactaataaaaaatcacatgaagcaatttatttaaaattaataaagatcatacgaagcaatttatttacagacacctgcaagctaaaagcagagtgtgtctaaagatgaaagtgttagaattaattaacaaaagttgtgatagttatggaaaagctctttccacaggtcagtaaattctgggcattaatcatttcagttatgaattgcacaagtagagggttttcaaggatgagagaggatgcttggaaatgtgattacatttctcaaaatatatgttaattttttaataaaattctttgcagaggatcacctcaccaccttattgttataaaaattttagaatggctcttgcttagaattacatatcatatgtactttctgcacatataaagttggtttttggccaggcgtggtggctcatgcctgtaatgtcggcactttgggaggctgaggcaggaggatcacttcaggccaggagttggagaccagcctgggcaacatattgagaccctgtctctatttttatttttaaaaaattggttttcaatgaaatagtttcctccagttgctactactgtgagattatgaagctcatttcaagatgctcctgtcctgcttagaaagctggtcttcccctggttttgcccttaacttgaaatccagcttcagttttagtggccaaagggccatgtggtagcctgctttatatctgaactcagaccaatgggtatcttttttagttcttctggtctccaatgtcaacaggtttctcctgtctacatagatagaaaactgttctggaaattttgaagcctccctgtttaggcgagggagaagcagttttggaaaaatgaaaaaaaaaaagtacttttggggggtacctctcacagaaataggccacttggtgagtctaggatatgaaactacagaacttcacttattttggtagagtagaattctagctcatggaattaggagatggagctttaacttgtaatttttccactttatttaaagggagaggcctttaaataaatgacctctcccagctttattttcttcatctataaaatgggaacagtaatacctacatcagagagtttgtggattaagtgaaataaaatgtaaacatagatacaaagtgtttatatacataacacgtgcttatgaaatataaattccttttgccctcctgttttttctcctttggattgctcaaaaagttattctgctcgacatcacttattatagaaacatctacataggttaattatagacattaatttattgtaatgcttttacatcacaggtggaaccacatagagctacactttctctaatttttttttttctttttgagaccaggtctcactctgtcacccaggctggagtgcagtggtgccatcacagctcatagcagcctcaacctcctgggctcaagcgattctcctgccttagcctcctgagtagctgggactacaggcacatgccaccagtaccagctaatttttgtatttttttgtagagataggatcctactatgttgctcaggctggtctcaaactcctgggctcaagtgatcctcccgcctcagcctcccaaagtgctgagattacaggtgtgagccactcccgtaatcccagcaaaaccccatctctacaaaaaatacaaaaattagctgggcatggtggagcacacctgtagtcccagctactcagggggctgaggtgggaggatcgcttgagctcaggaggtctaggcagcagtgagctgtgattgcaccactgcactccagcctgggtgactgaggcatgcaatgcacatcctatcgcaattttgttataagctcgcatgtgcttataacaaagcacatgttataagcttcatgttccttgtggttctgtcagcaaaataacttcatcatgccccctctctggaagtccaagctttgtacacaggatacctctgggcttgtcccttacctgctatttaagtgctaacttttaaaaaagtggttgaactattaacatttgcttctttcctgcattatcatttcatattgacattgatattacaaatgagtactttgttttcagaagggcttgatcaatattttctgttacccaagtgtcatatctcagccactgaaaagtttttaaagtggtttattacttgtagtattttgttccttgaggaggttgtgtggataatattacttgagcttcattttgggtgatttatattcaccagtttgtctcctcctgggtgaacactgtctaattccacgaagtcgtcaagccagtttaggccactttccttagagcttcaaatactttagccgtttactctgagctgcctgctgtgaaccttgtttcttgtttgtcatctctgtgaggatggatgccacgtcgaccattctcatcattcttgtgtatacttccctgaggtgagaaagaaaaaacaaccctgtgaatctctggattaaaagtcaacgggtgaaaacccatgtgcgaggctgggtgcggtggctcacgcctgtaatcccagcactttgggaggccgaggtgggcggatcccaaggtcaggagttcgagaccagcctggccaacatggtgaaaccccgtctctactaaaaatacaaaaattagctgggcttggtggcgcgtgcctgtaatcccagctactcaggaggctgaggcaggagaatcgcttgaacctgggaggtggaggcgagatcgcgccgctgcactccagcctgggcgacaagcgagagactctgtctcaaaaaaaacaaacaaacaaaaaagaaagcccatgtgcatgtgggcatgagctctcccttcttacagtaaatccactcttagaaaaaagaaatgtgttcctctcattcaaaagttgaggctgaatgcagtcgttcatgcctataaccccagccctttggaaggccgaggtgggaggattgcttgagcccaggagtttgagaccagcctgggcaacatagtgaaactccatctctacaaaaaataaacaaaattagctgggcatggttgcctgcagctactcaggaggctgaggtgggaggattgcttgagcccaggaagttgaggctgcaggtgaatcgagatggcaccactacactccagcctgggcaacagagcgagaccctgtaacaaaacaaagcaaaaaaattgcctggagagctgaactttagggtctcacaataaacatattcctattgtagagttttaaaataattttaaggcaagtaataatgtatgaacaccatgtccttaactttttattcagcactgtaaatacgttttatgatccaaaatggttgaatagtttcagttttcaaaattgaacatgcccttaacaacacattctattgtgtctcagtgttctggtgtctatgattgggccttttctatatttgtaaacaatcattcagtacaaacgcagcatcttaacgcatgacaaggaagaacagatgagggttttcacctcgagatgactttcagagtagccttatacttttgccttgacatgaaaatagtactagccatgaacataggtctcaggtggccaaaatccacagctagaaggttagacttgagaagacccacagagagaggcttcgctgatgtggccgggatggcttaggttctgcaggctgcttacggcagatttccatttctgctcttgagctatgaatccagttggatgagctggttcagacttttagtatttcagcagagaagaagcattcagggttttatttattgtaatgatttgatggtggaaaacagctttgacttaagcaacttaacattgctctttttctttgagtagtggtttaatgtttattctgtggttagctattaaccttattctgtggttagctatttaagcagaagtcataatgtacccagaggttcattttaagttttattcaatgtgcccagaagatgaaaaactacatgttttgatgataggtttgatatgctcacacaattcttaattggttttatattggaagatacatgttcagatttgtccttttataactttacatttggctttttatgccacgtcccgtgttctttccttgaggactggcttgtagagttgattctctaatttgtgatatgggcatattaaattccttgattgagaaagcccttagccagcctgggttggtgctatgcctggttcttcctggggcccgtaccacctcctacccaatcttaacaggtttcatcatcccaaacaagacaagacaaagccatgtggcctcagggatactgtagaaatgaaagaatagggctatgaccaccaacgggatgaaagatcttagcagtggagactggggaaaagaaacaccagcttggcgaagtggcaggttttggctaaagatgtggctagatttggcaggggaacaagtgcctgaggatctcttctctttggggctttcaaggtttcaggaaatcagattgccatatcacatagccaatcttatttcccaagactcttttttggcccctgtcctaaatgtcctgtaaacacacatgtctgattcctatgtcacttctgatgcagattgtgaaatcaagtctttactattaacagctttttattgcttgctgtcttctttgtgttttagctcttcttctctgctgaaatgtgagctttttgaagtaggagggagattttgagtttcttttttatcttataaaatatcgagttcagtgatggacatatataaactagacattaattataagttgattattaaaataatcacatccttctttgtgggctaagccgttgacacggtagtctaatttcagctatcatgccactgagttcttatgtgatgccattaaaaatgcccacattaaaaaaatgactataatctgaattgtataaagaaggtaatgtgataccctacctcgttttaacctgattgtctctcttagctgagagagccggacagactccatttttgtttcttcacttgcagctcccctcccttaaaggcataagtagtgcaagctgactccgagcacatccaggaatgcgcttactgatgagatatcgaggcaagctaaatcagcagttcctgaggacgcgcttgggggatggcacccaaagcccctgcattatctctttgtgatagtttgagcccctgcacctggaactgtttacttttctgtaactgtttctgtaaccaattaatctttcttaattggtttgcctgttctgcttctgtaaaaattgcttcagctaaactccctctcccctatttagaccacgatataaaaagaaatctagccccttcttcggggccgagagaattttgagctctagccgtcttgttcgccggcaataaaaggactcctgaattagtctcagagtgtgtcatttctctataactcgctcagttacaacagtaagatataaagaatgaactgacattagtaatatagtcatgcagctagatcatacttgatagcttccttcctaggtaaaatactttttaaaaaaataagtaataattaacttgcaaaagtaaatttattgaagcatagaaacaattaaagcaaagttgttaattcagctatttcaagagcattctaatgaggaaataagaagatgcagaaaagttggctagtcatccatttctggactgaagcttttcctgaaattatccagaaagatgcctagattgatgccatttcttcgcttgtgtccttcttgatttttttttctttgaaagacacttttgttgatctggaagttccttatttaactttcacctcagaaatactgctgacttgagacgagacaaccttgccatccaccaactcctctacgatagtcttagtcactctagtcttgcttgaatctgaaaatcatgggattgcaatgtcagtctggaaactctcacagaaacacagagcaagagaaattcaatcacatgcattcaacgtgttctgtctgggtaagattatgtaaaaaatagcggactcttttagtatgacaagcaaagtatgtcttcacttttaaattacagaactattatcaatattaaaaaaagtctacctcgtccttgaccagaacagcttccagatcttgagtcaccagataccagatccctggatcccatgtttacagatcctgagtttctaccaccaaattctgcaaaactagaaccactggagaaaaaaagaattatgttttcctttgcagtttgcaaaggcaggagaaagcctccgccccggggattcttcatgatgaagttttggatgtgtttatgtgttttaattggattgtgtctgctgcttttttgttcaaccttgcactcctgggctcaagtgatcctcctgtctcagcctccccagtatctgggattataggtgtgcaccaccatgcccagctaatttttttttttttttttttgagacaaggtctcgttctatcacccaggctggagtatagtggcatgattacagctcactgcagcctcagcctcctgagctcaagtgatcttcccgcctcagtcccctgagtagctgggactacaggtgtgtgccaccacgcctggctaatttttgtatttttagtagagacaggatttcaccatgttggccaggctggtctcgaactcctgacctcacgtgatctgcctgccttggcctcccaaagtgccgggattacaggcatgagccactgtgcccagcctccagctaattttttaaaaattattttttgaagaggaaggggttttgctatgttgctcaagctggtcttgaactcctgggctcacgtgattctcccacctcagcctcccaaagtgctgggattacaggcctgagccactgcacgcagcctgtgtctgttactttattactctctatatatacaagtctaagccctgagtcccattttggttttataaaataaattcactaaggtatgcattttagtttgttcatgactttggtttaccctccctctccatcgagcaggcggcggtaggtctcgatctccacctccaggcgtgtcttgatgtccagcaattgcttgtactctgcgttctggcatttagtctcaccccagatctggcagatctcctcctccagggcactgatctgcgtttgaatttctgacagctgagccacgtagccagcttctgtgtcagccagggttccctccagggagcttttctaagagaaaaagcaaataaaaaattcatgatgaaaataaatcattggatgattttttaaaaatgcaattttatgtggcactagaagtgcaccttcgccatataacctatattgttatatcattgcttctttaattttggttggcacttctttttaaactaaatcttttatgcaaaatagagtacattatctttaacttttaatgctttctataatcataatgcagttctccttaacactgccttttttatgtgcctagtgaacctcttggcaaagaaagaaaactgcatttgcttaactccctgttggaaaatgtgaaaagctatttgcacataccatggccagttgggactgaagctcaatttccagggcttgcagggtacgttttagttctgttatctcattcttggcagaagtggctgccccagcatcagtggagatttgtgcttgtagtgatgcgctctaaatacaaacataatgcagctgttgtaggctgatgaaaggagcagaagcggcttgtgtgtggctactggcttaggtgctcagcagagaggatctacctgcttgttgaaccgctcctcagcctctcggcggttttgctcagccagctcctcgtactgcgccctcatgtcattcagtaatttggtcaggtcggtccctggcgcagcattcatttctacggtcacctcccctccagagcttccttgcatattcttcatttcctagcatgaaggaaaaaagactatcgtgatgcaaacagaaaagtgatgacttccgaaaatgtgcctagacaacaacaatttgaaagtaggacactgaaaggaaaaaaaaaaaatcaaatctaggtataatttactcatgattacttttgtttcctggtcatagtatgtgggaaattcacttagataaaaatgagtttattttacctttttttctttttttttctttttgagatggagtctcactctgtcacccaggctggagtgcagtggcttgatctcggctcactgcaaactccgcctccccagttcaagtgattctcctgcctcagcctcctgagtagctgggattacaggtgcaacaggtgtgcgccatcatgccctgtttatttttgtatttttagtagagagggggtttcaccatgttggtcaggctggtctcgaaatcctgatctcatgatctgcctgccttggcctcccagagtgctgagattacaggcataagccaccgtgccaggcctattttacttttttagagacacagtatctctctgttgctcaggctggaatccagtggcatgatcatagctcactgtggcctccaactcctgggttcaagggatccccctgcctcggcctccagagtagctgagactaaaggcatgagccactgcacccagccaattttatttgtatagaatgcatatggggagaaatatgttagctagagttattcgtttatgtagaacatgttcctacctcctcgtggttcttcctcaggtaggctagctcctcggtgaaactctcaatctgcatctccaggtcagagcgggtcatagtcaggtcatccaggactttccgcaggccattgatgtcagcctccacgctctgccggagacacagctcgttctcatacctggaaggggcagcagtaaggcaaaaaatactgtgagctcacctggccgtgtttcaaagggtaccttccattcttacatattgaaaaagttctcacttgtgggcattttaataaataaaggttattaagttttctcttgggaaattttcccttgtaaagaaaaataccaatgtaatgttaattctaatcatgtctaacatttttaataataaaattctcattctaaatttgcctctttcttttttctttttcttttttcttttgcagctgttgtaggctgatgaaaggagcagaagcggccggtgtgtagctactggcttaggtgctcagcagagaggatctacctgccccagcatcagtggagatttgtctaatggtctaaagtttacccttgggatgtttgtaaatttaggtcatgatcctctagtatatatatatatatatatatatatatatatatatatatatatatatatatatatatttatttataaaatggaataaaatttatttttctcccgtaacacttgttttcaagtctttatgtttcttacttcagtctgaagtcatcagcagccaatctggcattgtcaatgtgcaaaatgatcccagcattttcaacagtggcagcaatgatctaaaaaagatgttaatagtgagtgaatcacgaatgatttttaccttgtgtctgcatgcctacttgtaagggtagctgttgcctgtgttattagctcttttttttgtgtgtgtgtagagacagagtctcgctctgtcgcccaggctggagtgcagtggcaagatctcagctcactgcaacctccgcctcccatgtttaagcgattcttgagcctcagcctcctgagtagctgggattacaggggcgtgccactatgcccggctaattttttttgtgtgtgtgtttttagtagacacggggtttcaccatgttggccaggctaatctcaaattcctgacctcaagtgatttgcccgcctcagcctcctaaagtgctgggattacaggtgtgagccaccgtgcccggcctgtgctattagcttttaaaggtgacttgctttgcaaacttacttagtaatgactaagtatacagccccagacctgtatatctggggctggtatatttaggactacatctttctgcaaaaagataacagtctgcacatttattggactaggcacaggaacctgttttacaggacatagtcctctgcatatttctgctactttgttagatcattatctcatgagctttttcagaaaatagtgcaaaaattgtatttcacttccaaaaaagtctttaaaaatatatttcccatacaaaagtggctaaacattttagattctactacattcttatgtaatgtttgcaccagattttctgggaagaaaaataatactaaagaatatttaaatcttgtaagacaataaaatgtgtcagtctgtcagaattcatcataaataattagattaaactaatgttgactcactgccaccattcttatatataaatgataattagctgcctggtgttgtataagttttactgttatgtagaaatactgaaactgagatggaaacagaaaattaatgtgattggacatcacataaggtactataataattaagacacatcaggtcccactttgcatatgtaacaagcaaatatgttttcaaataatttcttaaaattttcattatagtacatgatctgaaaagaagtgaaagatccacaaataatagaaactcaggcacagatagtctcacctggtttctgagatcttcaattattgaatagtatttgctataatctcttcccgatccaccgtctccagacccaggcccatatttgtcataccactccttgattttgttctccagatcagtgttagcctcctccagggctctgaccttgtctaggtaattggccaagcggtcattgaggttctgcatggtttgcttttcccctccagagaaaagccccccatcgccaacaccacctcccataccaccaccatagctgtagaagcctccagtagcaccactgctgaatctagaactcccacagaatccagaacccctgccaaatccagagaccccgccaaagctagaacccccaccaaatcctgtcccagagcctgaagctcccccaaaaccaccccctactgagcagctaccaaagccccctccaaagctgcccccaaaagcaccgctagaccccccactcaggctgcagctgctggctcctcctcggaagccctgggccgagctgccccccagaccacatctgcttccactgctgaagctgcttccaccagcagacaccctggctgagctgctgcctccagccctggaggaggaggcgcgagacgagcaagacatggtgctcctgcaaacatgagcttgtccaggcgaataggagaggtgatgacgaagagtgtattcaaggctgcctttttggcctttatatacacacttcgagggtgttccttttctctgtcacttcttaatccctgttacagttttggtaatccgtaattggataatttctgtttcttgaacacttctctgaagctaggtcagagccctgggacatttactatatcaataaaaaaagaataaagtggagcaaaacaaaaaaattttcagaattacagttttaatctttcagaggttttgatgattggtaacttttctctggaagtgtagttctattaaatttgcttcatgatttcacatttgcagagaatatctccaggttaacaaatgtaattaaaatacttaatatgatgagaataaaaatttcccatcaatcatgtaacttttttgttcatattgttctcaaaagttgaaattagctttcacatcagcaataatttcagatttgattaagcatccatctctttgattatttcaatcagcgtgttttttaaggttgttgaagtttgtgattttaagttattgctttctttttttgtattttgtataatatacaaaaaagcatataatttgtaacaattatgttttatagttcataagaaaaacataaataatagttttctaggtaagtattattacatctcagcaacatgtttattcaagtagctaatgtctaagaaagattgaaaagcttttaggcagattgttttaatacgattttctttctggttgaattctagtctgatataaagacagcaacttcctttttgagtcaaatttcaagaaatgaagagatgatgcagatatctcctgccttcgttttaaagataaaagaggatttgtatctacttctgataactagtgttacaattggagttattttatagattctgaaccctcctgagctccctttgtgcttcatggctttttgtccctttgtattttagactgtttccattcatgtcttctagtcacttcaccggtttaatagtgtctttttgaaagacagatactgtataattccagtactatgaggtgcctagagtagtcaaattcacagagacagaaagtagaatggtagttgccagtggccgaagggttggggatagacagttgttgcttactgggcatagaattttaattttgcaatatgaaaagagtttggggccaggcgtggtggctcacacctgtaatcccagctctttgggaggccgaggcaggtggatcacctgaggtcaggagttcgagaccagcctggccaagatggtgaaatcccgtctctactaaaaatacaaaaaattagccaggcatggtggcaggcgcctgaaatcctagctacttgggaggctgaggcagagaattgcttgaacccgggaggcagaggttgcagtgagccaagattgtgccactggactccagcctcagagacagagtgagactcgtctaaaaaaaaaaaaaagaaaagagtttgggagattggttgcacaacaatgtcagtacacttaagactactgaactgtaaacttataaatgatgaagatgataagtttatgttatatgtattttaccacaatttttaaaaagtcttaaaaaacaggtgcttccagaaatagtttgtatcctccttagctttaaacttaagtagctgacttttgtttatttaagaatttcttccttcttttgccagtctctgttaaactatgttcacaccttaatctttatattcaattatttgttaaacaatgttctgctttaaatttttccttaaattgcattttattgggacacatgattaaataggtaatcattcactttactatgtagctcttatgtggcttttatgatctacctgtactgttttcacaggagtatgatgttactcttcttcatatttagggtgacatatctccaaggggtacatggtgtacaaaattttaaattgttaagctgggagtaatttttataacgcccttctaaagtagctaaaaaatgcaccacacataatgtgttggtcatcctgcctcgcccatccctaaagctgtgaaaccaaagaaaactaaaccctaatgattaaatggtatgcaaatgctggcaatgggaggaacagtcacagagtgtttctcccttttaaaactatgaaatgtaatctttcaattttcataaagacttgcatttggctgaaagcacgtttaaatcccagctccttcggaggctgaagcaggagaattgcttgaacccggtgggtggagcttacagtgagcagagattgtgccactgcactccagcctgggcgacagtgcgagactccatctcaaaaaaaaaaaaaaaaaaaagacagagagagagagacagactgaatcttaggtgtctgggctcccagttcaaattttgaatagtttgtgattagaagtttatttctacctgtaaagaaacatataaaagctatatttccttatagaatatgattttaataataagtgcagaatgatttgcagatagtaaccatcaatttttttttgtgtgtgtgggggatagattattagtatttaaatatttttcagattaacatattgcaggtttttagactagtaggaaaaccaaatactgaaatgcatggcatatggctcctgatgaatctttacagaattgagaacagaacttgggtattctatcttctgttcattcaagaaaatatactgttttgtgtttttcaaatagaagcatcacatcagagtagttaagggaagttgctgggtttagagtatttgttgaatgttgacaaaactttctgtggcagacagtaaaaaagaagggaaaatatacatttaaaaaaattttaacttttaacttttgtgggtgcatagtaggtatatagatttatggggtacataagatattttgatataggtgtacatatcccatcagggtaaatggggtacccatcacctccagcacttatcctttgtgttacaaacattccaattatactattttttagttattataaattatacaagtaaattattattgactatagtcactctgttatactatgaaacactaggtcttattcatttttctaactatttttggtacccatcaagcgtcctcacttttcccctactcccccgtttcccttcccagcctctgataaccatcattctactctctatcttcatgagttcaattgtttgaatttttagctcccacaagtaagtgagaatacacaaagtttgtctttttgtgcttggcgtatttcacttaacataatgacctccagtttcatccacgttgttgcaaatgacaagatctcattcttttcatgactgaatagtactccgttgtgtatatgtgccacttttttttttttttaagacaggtttcactctcgtcacccagacttgagtgcaatggcgcgatctcggctcactgcaacctccacctcctgtgttcaagcgattctcctgcctcagcctcccgagtagctgggattacaggcacccaccaccatgaccagctaattttcatattttcagtagagacagggtttcaccatgttggccaggctgatcttgaactcctgacctcgtgatccgccctccttggcttcccaaagtgctgggattacaggcatgagccaccgcgcctgacctgtgccactttttctttatccattctactgttgatggatgcttaggttgcttctaaatcttgtcagtagtgctgtaataaacatgggagcacagacatctctttaatatagcaattttctttcttttggacacattggaaagtataaatttgatgtgtgaacagtctctttgcaatgccgttgcaatgacagatagtagatagacaataaatattccttgaattaataaaaactaacatggcctgattttcttcatgaacaacttggatcactgattacttttgttctttactatgtgttgtgttttgttttctgaatctttatgctccacttctgggttagtgattctcagtgtgtggtggcggagagcggggcttggcagtaagaggaaatgttgtttgggaagagggcagaaaggtcaggcaagagtcaaccggggaccttcctgtagggaatcattgtttgggccagcttcctgctggtggctgctctaggccccgccagggtcaactacttggaagagaaaaaaggttttgcaataataacatgactaagagcccactccagtagatctggcaccacccgtcgatggattgggtgtgtcattgtcacaccccagaaatccaccaattctgtggctgtttctcttccttcatcactttctctccttccccaccaccctcgtccattctttctcttcctggtttcacttaagtgtgtctatttgaaggcttcctcttctccaccaggaagcatctgcttggtcatgccattttgccaaattttgttctgggaagaaaaatcacctggctttgttcttgtatgtgagtgctttcaaatctctttaaataactcaattctctatgtttcctgaagatctttccgtgagtttatggagaattaagagaatgggtgagtgactttgcgggggttgggatgctttgtcctccaggctccacagataagacagtttgaaataagcacagttttcaaggattagctctgcttaaaaagtccttttgtgcctttcttcataccagacagacagtagtcttctcttcagagaatccaaaagcatgaacaatccagatcataacttgagcagtagggcctagcccctgtgcctcttgccaatgctaagttgatacactgggccttcctgctctgtctcttccagcttgacccctcaacctcctgctgccctctgatgtcagagaagctgcaaatctttggtcaaggaatccagggcttaaatagtagtttcatagcaaaagaatggcatggtattttacacaagatcatattttatatgataggctcagaagaaagcttcatcagtctcaagtctcttgtcctctgtccaccagaactataacacaacatttgagtacagtcgatgtctcttgaccaagccaccatgtcctcatctgtaaaattattatattggtctatccacttctcaggttcccttccagctctaatttttagcaatctggtaattaaatgtattacttctcagatttagaaagtgttttatattactattaggtgagattttctttttttcttttcttttttttttttttttttgagacacagtttcgctcttgttgcccaggctggagtgcaatggcgcaatctcggctcatgcaacatctgcctcctgggttcatgccattctcctgtctcagcctcctgagtggctgggactacaggcaagcaccaccatgcccagctaattttgtatttttagtagacgcggggtttctccatgttggtcaggctggtctcgaactcccgacttcaggtgatccacctaccttggcctcccaaagtgctgggattacaggcgtgaccactgcacccagccaggagggattttctttactagagcattagctgcaaaagttcactgcttgtgcttgagaactgggtagagtggaaattgtgcttagaggtccccttaactggcctctacgtgtctactccaaggtaagctcttataaaggcacccaactgaggaaaagaatacttgcctagagattctttcaagacaatgttcttgatcagagttacaattagaactaaacaataagaaagacaaccagaaaaatctctgtgagttgatacattctcttagataactgtggtataaagggaaatatatattaatgatgagagtgtcttttgaatactgatgagatggcttgcggctaggggcctctcaatagcttcaggataaggactggtctccagaggaccaagccttgattagaagcttagaactttcagccacgtctcctaacctttggggaggggagaggggctgggtattgagttaatcacaaatggccagactcatgtctatgtcatgaaacctacataacccttaagtcaggggtccccaatccctgggaattgtatgaaggaactgggccacacagccagaggtgagtggaggctgcacgagcattaccgcctgagctccacctcctgtcagatcagcagtggcattagattctcataggagcatgaaccctgttgtgaaccgtgcatgcgagggatctaggttgtgggctccttatgagaatctaatgcctgatgatatgtcagtctccaatcacccccagatgggactgcctagtttcaggaaaacaagcccagggctcccactgattctatgttatggtgagttgtataattatttcattatatactacaatgtaataataatagaaataaagtacgcaataaacgtaatgtgcttgaattgtcccgaaaccactccacccacctggtctatggaaaaattgttttccacaaaaccagagcctggtgccaaaaaggttggggactgctaccttaaataatggggctcagaaagcttctgggttgatgaacatgtggaggtgctgggagtatggtatgtccagagagggcatggaagttctgtgcctgtttccctatatcctgccctatttatcctttctgtttaactgttcttgagttgatcctttataataaactggtaatagtaggcaaagtgttttcctgagtcccgtgagtcattctagaaattatcaaaacttaagtggggaagattgtggaaaccccaaactttgtagcgaatcagaagtatgggtaacctggtgtacaagtctgttcttgcactgctataaatgaataaatacctgaaactgggtaatttataaagaaatgggctcacagttctgcagggtgtacaggaagcatgatactggcatctgctttgcttctggggaggcctcaggaaacttacaatgatggcagaaggcaaaggagaagcagacatgtcttacgtggccggagcaggagcaagagagagatgggggaggttccacacacttttaaacaaccaaatctcacaagaactcactcactatcacaacgacagtaccaaggcggggatggtgttaaaccatgagaagtggcccccatgattcaatcacctcccaccaggccccacttccaacattggggattacatttcaacatgagatttggtggggacagagatccaaaccacatcacctggggacctgatacttgtgactagcatctgcggtgagggcagtcttatgaggaggagcctttcaacttgcggagtctaacactaattccagatagttagtgtcagaattgatttgaatgttaggatacccgcttgggtatcataggaaaaaaagaagcctttcataactgttggatcaaatatgacaaaccagaaagtagtgaaaaagtccaggcatggtggcttacgcctgtaatcccagtcctttgggaggccaaggcaggaggatcacttgaacctacgaatttgaggcttgcagtgagctacgattgtgccactgcactccactctgggtgacagagcaagaccctgtctctaaaaaaaaaaaaaaaaaaagttaaaagaaaagcacttcatacctggacttttgggatgtagctaactttgaacagtgaagaaaatttatagcctctaatggctgctttgttaaaaaagaaagaccaaagatgaagacatttagtataaaaatttcttttaaagaacagcaagataaactaaaaaatataaaaataaattagtaaaaataaaggctgaaattatttaaacagaaaagaaaaaaatacataaatatgtcgaaaagctgattcttttagagatcaattaaatagacaacctcttcatgagcctgattaggaaaagagagagaggtccaacacacaaggttggaagtgggaaagagacataactgggtatagaacagattaaaataattataagagaataccacatataaggcaatggcagcactcttggagacctttctggtagttagccaaattattattgcccagtgggtgatctctgtgctcatcagaccagtcctggcaagactcaccccagggacagtgacagggacagactggggtgctcagcctacctgcagtggccctggggcatgctgggagagaaaggggcacagggcttaccctaggaggagagggccctggagaagccatggcaaagctgtgaccgtgggtgggcagagctgatcagagtctgcagatttgagctgggcataagaggctgtgggatttggacacaggggccatccatactgttaccagaacgtggagaagagccagtaggaatactggctatgaagccagatccttccagaaagggagaaaggaacaggactctgttgtgatgtggaggctgactaggtggagtgaggagaaggtcccagcaagcaattgtgcttgtcttttttgtgcctgtaaccaggagggagacagagaaaccaggtgcccaggaaaccttgattgaagggtgccaggtaagccctgtccttcccacagtggcattcaacagcaaggccaggacctaccattatctttctgtgtgtagagtggacacaagcacatatttctaaagaggactaatggatgatctttaggtactaacttgtgacccattcattggaggtcactgggtgtttctagaagtacttttgatgtgactgatcttggagcaaagcctcaaatcacaccttattctgttctttctatgtatccaaattttaccacttttcaagggctatctcttctggaacactcttctggaacactccaacccttcatttaccagcttctccttttccccacataatttttcttattattcttacggtttctaccacattacttatcacttggtccttcttgtatttttctttgacaataaaaaaggagaggtcgggcgtagtggctcatgcctgtaatcccagcactttgggaggccaaggtgggtggatcaatgaggtcaggagatcgagaccatcctggctaacatggtgaaaccccgtctctactaaaaatacaaaaaattagactggtgtggtgttacatgcctgtagtcccagctattcgggaggctgaggcaggagaattgcttgaactggggaggtggagattgcagtcagctgagattttgcctctgcactcaggcctgagtgacagagcgagacaccatctcaaacaagacaaaacaaaacaaaacaaaacaaaacaaaacaaaacaaagagtattcatttaaaaaaatttaaacatacagatggcttttctttaaagacttttaaattttacaagttctacacgtttacttcagaaaaatgagaaaatgcatgtaaacatgcagcaggaaataaagatcactcataatttcactatcccaaaatagtcactgttaacatttggatgtatattggttttgcttctttttttttaaaaaaaaaaaacaaaacaagtaagtacagtgatacagtttgggcctgtgtccctacccaaatctcatggtgaaatgtaatccctgatgctggaggtggggcctggtaggaggtgattggatcattgtgtagggggcggtttctcacagtttaacaccatccctcctccaggtgctgttattgtgatagtgagttcttgtgaaatgtggttgtttaaaggtgtgtggcacctccctgccccttctccctcccattctggttatgggagacataccggcttccccttcaccttctgccatgattgtaagttttctgaggattctccagaagcagaagccgcgatgcttcctgcacagcctgcagaaccgtaagccagttaaacctcttttctttataaattagtcagtctcagatatttctttacagcagtgtgagaacagactaacacatacagtgttaatatacatgtaattacattcttataaaagcagatcatactatacatattgtcttaaaactctgcttttcatttctcaatagacgattgacatctttttaggttaataaatgaacctgagcattcttaatggctgtgtgaccatcctttgatggactttgatgggtgtttcataacttagcctattgattctccattgttgaatattttattatagcttacgtttcactatgatgaacagctgagaggagtatacatatattaataattgattatgtaagaataaattcctagaaatgaaactgctggctctaaggatatgctcttttcttaaaaaggcttttgatacctgttgctgaattgttttcttaaaggttttgctagtttacactccattagtgccttttccctacatccttgctaaaataggtatttattattattaaacaaattggacctgttttgatgctgaacatggcatctcattattttaatttgcttttcttttattacaagagatgttggacatcatcactttttaatgtttgttggcgattcgtattttacgaatttcttgtgtgtatcatgtatccgtttcttattgatatggttatctctgttcctgagtttatatatggggacatcagctctcggatggctgtatatgacaagtgcagtgaaaaccccgggtaccatgtggcattgctgaaaatctagacttaaagtgattggctgttggcttccattctacatgcagcccccaagagggtaggctaaagttcttattttctggagtgttggggggatatatggcaggtggacaggcggatggggtggctagggagaagatggggaatggggaggctgaggatgagtcagggcaactaaacaggctgcccattcctggaactgctgctttcttggaaatttgcaagcccccaaatcctcttgattttagacagataagacagcagacagcaggtggtgccaaactgcagctagggcatcgtgatttaaagcgtgcggtccacgtctggactctgtggtctggctgcacagacttcccttggtgttggagcaggttttcaccatacttcactaaatttattttttcttttgcttcttatttcacgttattttcttgatataaatctgtcctccttttccttcatgatgtttttgtttttgatgaaacaagccatcaccattccccaaatacataattaaaaaaatttaaagtctgtaaaagtttattttcttttatttctgcaacttctgtagaatttattttggtgtgtgtgatataactattcaacaccctccttagcctcatccccatcccggctcctaccccttagttaactagttatttcagcagcctttattgaataatctacttgtccacaactgatttgaaaatgtcattcttatatactgatggccctttttctggggtgttcatgcctgtgtcagtggcacattgttctaattgctgtaaagaatacttttttttttttaacttgtgtttcctggaaacagactctgagatggagagatgtgtgctgaagtttatcagggagttcttttgtgagataaacttgtcagcaggtgggtaagactggaatgggcatagggagaggcctatgcaatgctgttttaatgaaggcttccgctgattctttggggagctctggacagggctcacccttcagagttatcctaatttaagacagggggccagaactttgtatcccctataagcgagttactggcccatgggcactctcctgaaggggcataatcctgggcaaggcagaaccctgtgagggtggctgttagcagcccatacgccagcacctggagctggatgcatctgccctggggagtatccacactacatgaatgttttgctatctggaagctcaagtcattcctcatcataggtcttgtatttttttttgagacagggtcttactctgttgcccaggctggagtgctgtggtgccatctcagctcactgcagcctcaacctcccgggctcaagcaatcttcccacctcagcttcccaagtagctggaatcacaggcatgcaccgctatgcccagtgcctggctaatttgcccaggcgggtctcaaacttctgggctcaagcaatcttcccaccttggcctttcagagtgttgagatttcaggtgtgagcctccgcacccagccctgattcctctttttaaaaacacttgaagtcttcattttcatttgtattagcactgtctttacaggtagagtgtaggtttttaagcctgggcaccatcttaatatgtatgtatttttgacacaagaaagctggaaaactgcagccctatcagatatttcataatttttttggagtggttttggactatatgaaataatagatttcaagagtcagtgtgaaactacagtgagataccacttaatattcactaggattgctataatttaaaaaatcattaacaagtgttggtgaggatgtgaagaaattggaatcctcctacactgctggttgaaatgttaaatagtgcagccactatggaaaatagtcgggtgtttcctcaaaggttaaacacagggctaacatatgacccaaccattctactctaaggtatattcccaaacagaaatgaaaacatgtgtcttcacaaaaatttttgtgtgaatgttcatagcagcattattcataatagccaaatatcataaataacctaaattctcatcatccaatgaatggataaataaaatatggtatatccatacactggaatattattcagtaaaaaaaaagaatgaagtactgatacatgctacaatatgggtgaatgttgaagacatcttgctaagtgaaagaagccaaacacaaagaccacgtatcatattatatgattccatttatgtgaaaagtctagaatgggcaaatatataggacagaagatgcattactggttgcctaaggctgggggtgggggtttgttgggggaaaataaggactgactattgatggatatgtgatttctttttgaggtgataaaaatgctctaaggttgactgaggtgataattgtaccgctcagtgaatatgctgcaaaccattgaattgtgcactttaaatgtgtgagttgggccgggtgtggtggctcacatctctaatcccagcactttgggaggccaaggcaagtggatcacttgaggccaggagttcgaaaccagcctggccaacatggcaaaaccctgtctgttctagcaatacaaaaaaacattagccaggcatggtggcatgctcctgtaataccagctacttagaaggctgagacagaactgcttgaacccaggaggtggaggttgcagtgagccgagatcgcaccattgcactctagtctggttgacacagtgagactctgtctcaaaaaaaaaagaaaaaaagtgtggattgtatggtataggaattatatctcaataaagctgttgtaaaacaagtcagcgaaacaaaaggacaaagattgatgtagttgatttgcaacaggcaaaaagtttatcgacacagaatgattaagaaggaaaacacattttgcaatttaaagacaaaaccgaaccaataagacaaaagaatctgagaaaggattacaggagtagctgcagctctgtggccgcaggtttgttgcagtgcttcagcacgcctttgttaggtgtcatcatttacatcctggggacaggactcagctgcctgcatcttactcttgaattttacatcagaaacagtgttgagatgaaattagttggtcattatccgtcaccagcctggttcctctgcttttatgtgaatctaaaacagaaatagggagaattttagaactggaaatgtaaaggttggttcacaagtcatgctttaaagtgaatgactgtagcccagatttttgggggtaaggaaagcacattttattcatgatggatgctcattaaataagcagaaagtattactttaaaaagcgactcttcccctcgattgagctgtgttggttattcctttggagtccacagagaatcatcctttagattcagcttctctggcctcagaactgttgacaaataaaagaaatgattgttgtcagttacttctctttggccaaaaactgtaaagaagcagacatattttctttctgaatggaacgagtgttggtgaggatgtgaagaaattggagccctcctacactgctggtaggaatgtaaaatagtggagccactatggaaaatagcctggcagttcctcaaaggttaaacacaaggctaacacatgacccaaccattccactctaaggtatatacccagtcgaaatgaaaacatatgcccacacaaaaattgtatgtgaatgctggtgccagctgaacattattagtagcatgctgggcgaatggttcatgcctgcaatccaagcactttgggaggctgaggcgggaggattgcttgagaccaggagtttgagaatagcctgggcaacatagtgagactctgtctctaccaaaagtaaaaaaaattagaccagacacagtggctcgtatcggtaatcccagcactttgggaggccaaggtgggtggatcacaaggtcaagagatcgagaccatcctggccaacatggtgaaaccccgtctctactgaaaatacaaaaattagccgggtgtgatggtgagcgcctgtagtcccagctactcaggaggctaaggcaggagaatcacttgaacccgggaggcagaggttgcagtgagccgagattgtgccactgcactccagcctggtgacagagcgagattccgtctcaaaaaaaaaaaaaaaaatacaggcatggtggctcatgtctgtagtcccagctactcaggaggctgatgtgggaggatcatttgagcctgggaggtcaaagctgcagtgggctgtaaacacagcactgcacctagccttggcgacagagtgagaccctgtcttagaaatgactgcaattatctaggagatacaaaaaaaactaatgaacactttaaggaataacatgtaatttcttatttacattcaattatcaagatatagatgcagaaaaattttaaaggaactaacgcccagtgtcaattacattctaaataaatctagagtgataccatggaaagttgttttttttttcttttctattttctactagcttttcagattgtacttgatttgaaacttgctaaaactgtaaatctcagtctctgaataaaaaacaatttcttcatttttaagaaagtgattttaacaacaaaatcatggtatcggtgactcaccctccctctccaccgagcaggcggtggtaggtctcgatctccacctccaggcgtgtcttgatgtcctgcagttgtgcatactctgtgttctggtattcagtctcgccccggatctggcagatctgctcctccaggatgctgatatacatcttaatttctgacagctgagccacgtagccagcttctgtgtcagccagggttccttctggggagctttgctacaaatgcccatgaaaattgaagcattgtcagaataactgctcagtattcaacatatgaaccctgaaacatatattttgtatggtgagggtgtctccaaatgaaccacttaatagagatttacctttgataattaataccgaataatagtaatgatagcaaatattaatcagagagtactactgtaaccatatagcaattcctactcactattaggcactgttcaagtattttataaatattgactcatgtaattctcataacaaccttatgagataggtactattattcccatttacaaaagccaacattttgctagcttgcttcaaacagtgtctgcaaaacaattttttaaaactatagaagaaaattgagtgagtgcccctttcccacctaccatggccaagacagactgcagttcatgctggagggactggaggacttgtttcagctccattatctcactcttggccgagctaactgcttcagcatccgtggagatctgtgtctgcaaggatgcactctgcaagcatgaaatcaacaaagtacagtgaaatcaaagaagctccaagcactctgcctggctttctatcttctctcactttgccaggttagggttcatgttaggattagggttgagctacctgcttgttgaaccactcctcggcctccctaaggttttgctcagccagttcctcttactgttttgcctcatgcagttcagccgcttggttagatctgcccctggggccgagttcatttctacagtcacgtccccactggactgtctcggcaaagtactcatttcttggcggagaagaaacgcaaaagtcacagtagcaaaaatcctttgaggttggggaccttgctgaatggtgatggtgatgggaagtcccttgatggatttatttctcctatctccttggggttgttctggagatatgccaggtcttctgctaggctttcggactgtattttaaggtgccatgtggtcacattcagctcactgagtactttttgcagatcatttacataggtttcaactgactggcattagatagagctcgttttcataccttaggagatctttggaatatgatgtatgaattagattaactactttgagaagctttattttaaaaaggacttgtccactgacatccagctcaagttgaaattcttttgaaatatttaaacaaagactatgaaatcatttttatttcttaattaattaattttgagaaggagtcttgctctgtcccccaggctggagtgcaatggtatgatcttggctcactgcaacctccacctcctaggttcaagtgattctcctgcttcagcctcccaagtagctgggattacaggtgcctgccaccatgcctggctaatttttgtatttttagtagaaatgaggtttcgccatattggccagtctggtctcaggtgacctcctgacctcaggagatccaccctccttggcctcccaaagtgctgggattacaggcacgagccaccatgcccggcctgaaatcatttttaaaaattccaattttggaatctcttgtcattaaatatacattaaaattggccttttttccttcagtgtagatattttacactaatatattacatttatctgatacttggatctaattgcctttatatacattttatgttaaaagtaaaaacataagtcttattttttgtcatggtaacaactgatattttgaaacaaactcacttcattttgaagtcatctgctgcaagtccagcactgtcaattggggaagtcatgctggcattattaatcgtggctgcaatgatctaggagatgcaataaaactcatgaacattttaatgagtaacatgtcattactgatttacctttgactgtcaagatatagttgcagaaaatttttttagtaactaatgtccgtgtgaattacattctaaataaatctagagtgacatcatggaaagttttttgtttcttttctctctctctctctctttttaccaaatatatatctgaaacattctgcatggaacaattgagcaaaaaataaaagaacaatttcacattgtcttcaaatttaataaataagtacaaaagaggtaccatcattgagtttctcacctggtccctgagatcttcaattattggatagtatttgctgcaatctcttctagatccaccgtctccagacccaggcccaaatttgtcacactactccttgattttgtgttggcctcttctagggctctgacattgtctaggtaattggctaggccgtcattgaggttctgcatggtttgcttttcccctccagagaaaagccccccgttgccaccaccacctcccatgccaccaccatactgcagaagcctccactagcaccaccgcctaatccagaacttccacagaatccagagatcctgccgaagctagaaccacctcctacagagcatttatcaaagcccccactaaagctacctccaaagccactgctagacatccccactcaggccatagctgtcggctcctctttggaagccccgggcagagccgccccccagaccacatctgcctctactgctgaagctgcttccaccagcagacagcctggccaagctgctgcctccagccctggaggaggagacacaggaagagcaagacatgatgctcctgcaaacgttgagcttatctaggtgtgagagatggaagtgaaaagcacaccgatttgaactccttggtctttatgtacacaggttttagggcattcattttcatttggctctgtccttgtttcacgtttccaacctattctgagttaatttattttgagttaacccctccccgttgggccaaataatatttgaaaaattgggtaaacatggagtaagattagatttgttattatttcattagaattcattagtgctgtacaatccattacttcctggctatcattttttcaccttcctagacctttgtagttggcaaatcatacatttctctaggtccattaaactcatgcatttttcctttgtgattctgggaagattattaaaccagattccagtgttagtcacaattcaaatactcagaagtgatttgtcaggaaatatttctttcttttttaacccagtaataatgatgagtagcttcatattcccttaacaatttttgggaacaaattgagcattgtaactattcttgcagaaagaaagcctgactttgctaatttatgaggattagcttggagagcacacttcgttgataagggtggggttgttagtaaagtgtcatgggattcttctgtgcaagacttttgagcaataataatgtttctttttagcctcctgattcagcagccaaaggaattgttcctcttacttaaatccattagttttggcctactcctaaggattttaaaaacattattcagatttcatagccatagttttcattaaaaaaattcaaagataagagcccactttcctcattaattatggatgtctacaatattttattttactctgaagaggtaagcctataatatttacctctgtcagctacataggtgaaaaggtgatttcaatgttttaaatggaatactatagaaaattgaatttattgaggtggataacaagtgcctacactatgcgtgtcttgggttttcctgcatattactgatggaaggacccaacaaccctgtgtggtaggcacatcttctctccctctctctctctttttaaatctattttcagtttttagatggtcttttccaatgtgtagggtttaatatcatccacaagttgacaactcccacatgtatatcaccagtccagatttctcctggaaatcaagattggcaaatgcagctacctacttgacattgacactggggtgctaaatcagcatctgaaactcaacgtgtccagtattgagctcctaacattttgtcccctcctcttcaactcaatagctcctgcagtcttccccatctgggttaatggcagctctatcttctagctgcttaggccaaaaactgtgttgccatcctctctggtcaggagtactgtagtagccttcttctctttttttttttttagatggaatctggctctgtcacccaggctggagtacgtggtgtgatcttggctcactgtaatctctgcctcctgggttcaagagattctcctgcctcagcctcccgagtagctgggattacaggcatgtgccaccattccccagctaattttttatttttggtagagatgaggtttcaccatgttgaccaggctggtcttgaacttctggcctcgagtgatctgcccaccttggcctcccaaagtgctgggattacaggctcgagccacctcgcccggctatagtagccttctaactgatctgtctgctcttgagtttacccccaagcttctttcaacacagcagagtgagcccacctgaaagccatgcaactctgtaaaacttactagaggcttcccatctcgtgcagaataaaagcccaagttctccctaaacgacatgtgttgtctggcctccagtggctcccgatatcagctcctacctctctcgccctcactcactcaacactaattcctcaagcacaccaggtctcaaggtctttgtgtttgctttgcctggaaagctcttccctcagatacctgcagggtttagctctctcatttccttcaggtctttactcaagtccactttggaatagtaagggctttccaagagaatgtatctaaaattctgcccccagtcttctgctagttcacatctccctgatattttacattcttctttcatactttttctctttgacatttatcagtaacccactatatgtttcatttatttatcttatccgttgtcttccccagcctacactagaatgtaagctctaagcactttttggggttctgttttgtttacccaagaatccccagtaccaagaaaagtgacttgcatgtagtaggtgctcaacatatattgttttgagtgagggaattaatgaataattaagtagaagctgtgacagacacatagatgacagacatagagatgctcagatctcctttcaagaaaggactctctgccagctgcgagggttattcattcctgcagggttccctggtccctattcttgcaactaaccctggcttatatggtttggctgtgtccccacccaaatctcatcttgaattgtagttcccataatccccacgtgtcatgggagggactcagtgggaggtgatttaatcatgggggccgttatcctcatgctgttcttgtgatggtgagtgagttctcatgagatctgacggttttatatgaggcttttcccccttttgctcagcacttcttgctgctgccatgtgaagaaggacatgtttgcttcccattccaccaagattgtgagtttcctgaggtctccccagccatgctgaactgtgagtcaattaaatctctttcctttataaattacccagtctcaggtacgtctttatcagcaggatgagagtggaccactacactggccaatgactcagcaagacagtggtagccaagggcatcctcttcttggggtggccacaagccagtatctgactaaggggtttgaacagggcttagccatttttacaacacaaggcttcactaacacttgatatatcatcaggagccactggacccaatttaatttttgactgtctttttaaagcagttctaactatttgtaaagactgatattttgtgacttatagtcttattagtcttccaaagaacaaagagaaaatttacttattttttaaaaaatagaataaagtttattatcttataattgccataaggattccctggatcctttcataaatctaagacacatttatgggaccttaatggtttcatttttttctatatcttgaaacattttgctatttcattatcctaaaagttatttcatcttcactcatcagttattcctaactatactaaaaaaggctaaaataagaaaatgaaagaatgatggaattgcctggaaggatgatacaacaatgaaataaatcatcattattccatcatcagttttctcaatacactgcccaaagtattatttcacttttcaagaaggtataagagaagtatggtgataccagctttgagtctctctttttttaaattataactgaacaatattgaaaatttagttttagaatttctgcccgtaatggcaaagagaagaaaattgaggaatatgtttgacgatttttagaaaaatcagaaaatgacgcataggagagatagcaacactttagactctaaagagaatggtgaagttgattgcttaagcagatcttggactatgaatgtccagatgatgatattctagaataattttctctatatcaagatttaaagggtaatttatttatggtttggctgtgtccccacccaaatctcatcttgaattgtggctccaataatccccacatgtcatgggaggtacctggtgggaggtaattgaatcatgggggcagtttttccccttgctgttcttgtgatagtgaataaatctcacgagatctgagggttttataaggtgcagttccctgcacactctcccttgcctgccgccacgtaagatgtgcctttgctcctccttcaccttctaccatgattgtgaggcttccctagccatgtggaactgtgagtccattaaacctctttttaaaaataaattacccagtctcttgtatgtctttactagcttgagaacagactaatacatcatctatactcattcgacagaaataatttcatcatacaatattttgccacaagctcctgggccattccattttgctgaaagaaggtggacagtattctttcatcttttatgatgtttgttccaaaatttatgcgatatgatttgcaagtgcacaggtgttaaaggcaggtgtgtatacaaaggttgattgggaggaaataggtaatgtagaaataaaaaacattagattgattatacaattgatatttataaatgaaaatgttttgcaattatggagcaaagagggtggctcctctcttaaaaaatcttgtgagctattaaagttcccaaacttattgcattttgtagctgcaagtgcaagagttgaaagtaatgatgaactagaacctattacagatgcatttgaaatctggaatccataaatacagaatgggtatgttccaggggcatgcatgacatgcattcaaagatgttgcccattttaggtatatatacttccaaaccacaaaattatagaataaaaatttgggttttctatgttttagtttatattaacattttaaataaattagttttgtgctatcttttatatcttctgtatattatttgtaaaagtcacttgaaattataaaaaaataaaatgggcctatctgatgcagttgataaatggtgatgacttatttttggggcatgctaggggccaatgggcaatctttgttccagaactctcacggggctgacagagactttggtctgcatcagtctgctaactatcctgcaaaagactaaaaccctccctggtcttgctttctcccttttcctttcataagtattactccttaggataacttttgatcctcaaactcagtctcagcatctactcactgagagtcaacctgcaacaaaacttaaagaaatgaagtgactttcccagggccagatatctgggaagtgttggaactgagattccaactcaggtctatgcactcatattatttgcagaagtctgcctggatttagggtcagaactagtagagtcctctagtggtagaactctactagttaccaagaagccttaacttcatctagaaacttcgatttcttgagccatagttttttcacctgtaaaattaaggataatagttcctgccctacacatggcataggattatcacatcaaatggagagcgcagagcactctgtaaattgtaattccatattcaagcataaggtttgatcatttttattgctgttttcttgcatttgtactgtattagttattccataagaccatatgtttctaaaccgggaggtcagcctaacttcatctattgaaaggtccgtcatagtcctcaccatttttctatgtacatttggtgttccatttgatgtcttttctaaggggcttatctttgaaatttttatatataattatttacaaaaaaagatgtagaccctatctatggattctttctgatttaagtttgaggttgtattcagctgctctcacataccttagctattagggattgtagctcagtgtcatgggtgtgaagaatacgtttttcagtttcatgatctcatatcttgctgcttcagtggagaactgagctggccatgacttactctgagctataacatcttggcaaaacagagctctgaaatatacccctattttatttatacttatatatttgactagctactctattaattgaattgttctttagcttcttaatagttttgcttgacaaaaatgttgcgttacgtttatcaacattcaaatattaagaccggtcggcagctggggcagcattccttacagtaattatatgactactagactattccgcaatctcattgcctaatcaaaaggaacagaaaagattacattaaaacaggaaaaatctatacttctattttctctgattttttttttttcctaaaacaaaccctgaagaaaatgattgttttggaggagaggtggaaaagcattgaggcgtgattcccttctgtggtgagtcactttcttcagtttggtttcatattcatttccaggccagcagttgtgaaagttttcagggcattgcctgtgtcgttgacctccattttgcactctacataaacccagttttgatgctggtgttttggaaaagtggttaaaattgtttcaaataaaaatattttcccaaatgttttctattaaattacgtgtattttttttccccctgatatcaagtccagtaacttcaggcaaatttagtgaaattctctaccatctagaaagggatgaagaacttaaaggaaggcagatgaattccttcctttttttttttttttttttttttttgagacggagtctctctctgtcgcccaggctggagtgcagtggcgcgatctcggctcactgcaaggtccgtctcccaggttcacgccattctcctgcctcagcctcccgagtagctgggactacaggcgcccgccaccacgcctggctaattttttgtattttgtttagtagagacggggtttcaccgtgttaaccaggatggtctcgatctcctgacctcgtgatccacccgcctcgacctcctaaagtgctgggattacaggcatgagccaccgtgcccggcctccttccttttaaaattcaaaaatcttaattttaaaaagtcttaactcagagtagtggtttctttaagatctcgaatgagttagtgatagtgcttgaacaaagatccaagacacctgcacttttatttgtttactgacaagatgaagattattcttccttacatggctttgtagattttggtgttgtatccaaagaggaaattgtattaaaatatctgaaaaaactggaaccacatcttcctgctataagatacagattttaaagattaaagatggaaatgttgatagcttcagaataatttattttggacaaggatacatgtaatgcccatgttgctcatattgtatattgtataacaaggtaatatgaatatttcaaactcactgtgctgtttatgatgaacatagcagttaaaagttggtgctattgcttcattcatttacaatttttctatcactccattattctgcttatttattattcttttattattcaatttattattctattcatttatcaattattctatttagctattttattattgttatatattatacatcttatatataatatataaataaatatatataatatataaatgtaaattgtatatatatatatttgagacagggtctggctctgttacccaggctaaagtgttggggagcgatcttggtttactgcaacctctgcctcctgggctcaagagatcctccccctttgtcctccctagtagctgcatgcaccaccacacctggctaattcttgtgttttttgtagagacggggtttcatcatgttgcccaggctggttatttatcttctattttacattatcagtagtaagtcaacttttatcaattatttaatatttattgagcatcttgcaaaaacattctgctaaaccttgggaataaaactaacaagtaatagtccctgctcttaaagaatttcatatataagcctggtcaatatatcgagaacttgtctctacaaaaagaaattaaaaagttagctgggcatagtagtgcatacctgtagtcctggctactcaggaggctgaggcgggaggatcacttgagtccaggagtttgaggttagggtgagataggattgtgccactgcattctagcctgggagacagaggcaggggggtgggggtggggcagtggggagaaacccttcatgtataatttttgttgtattttatataatcacagcaagtcttctcttacatattcttcaccatgttcagtaagtgtccgaaaaataatttgcatttttttttcgcctgctgagaaacagtagggagatattattaattgtccaagtgttgacctagaggaagactctgggctgcagatggctgatttatcatcttcccttgttggcaaatagctgccctagttacagacccagtttccatgtttcttggtaccagaagctcactttgccatcccactacctacttccagtccaccttctgccacagacttgcaaccatgtcctgctgcccagtagaacccagattctctccccagtttgctgaagttttgtgctgctgctttgctgctaaaaccaaaaccccatctgtcatctgctgctaaaaagttgtgccatctccataaggtccaatcacccaaattcctttccaccaccaaaccgtcgagaccagtgtaggagacgctgtaggggagcacgtctatgtctctgccattgactgctccagtgttctagagtgttaacatcataagtggggcacctattccatcttaaattcaacaacgctattgagcacttcctctgtggtaagtactgagctgggagccagggatagcactttgatagatcaatagaatttcagctacatgtggtttaaatagggtattgtggaattttataactatttataccattgcttctgtggagaattacatcaagttctgaaaggtcagcatggcatggcagctaaaaaatcctggagccacatttttgtacttccagctccccactgattatttggctatttactagatgtgtgaccttcagcacgtgacataacatctctgtgccttcattttctcatctgtaagttgaagacaatagctcctgcttcataaaattatcacaaggattaaataagatatgtttgtaaaggaccaggagtaattcctggcatacaggatgtgtgaaatatattattaaataaaaacatttattaacaactcttggaatacaaccttcttttggatgattgagaactgcttttgtttttaatgacaaatggatgtaatcaataaccattatggctatctataagattttaatgactagcagctgttaacttcaaaaatagaaagcaagattatgttgcaatgcattatttttttttattttaaaagcccctcctaacaattacatctaataaagaggttgaagagtgtaggtttttttgcttgactcatcaattcttcaattagtggataatacttgttgtaatttttggctggaccaaatccctgctgactttgttgagtgagcagcttgtttaatactgtaccctggtaactgagggtttcccagaccatctgttcttcatgtgggaaaagcccactgttgtagaagttggcctttacatctcgacactacctaaactgcaggtctgttcatcatcatggaaagctacaccacctacaccgctatccctaatctgcctcaagtgccacttttcaaaaatatgtcctaatgatttatcagattaaacacgtttggctcctttaaataagacatcattttcttgtctaacctcttctgctatcgatgcttttgcatttccacatcacttttgcagttttcagctacatttgtatgtgtcattgtaagtgaatacttactagagctgtgagaggcaatgagggcattttacagagaagaaaactgaggctcaaaagttatgttttcctctatgcaatacaatctgttactgcaagaatcaggattagaatctgagtctcttgattcccacccaacactcattttcctacctaaagtcccctgaggtacagggcttatggttgccaccttcgctgatagtctctgagggtgtgtcactgaccatccatttaccttgaggaggtgctaggctgaaaggtgtacacgcctgcagagatgaagtttatgggtaaaaaacatggttctcccagtttttatgattccttacacatgaaattcagtgttcctccataagttctgtccctttgtagtgatttaaaaattatcaccacatattttatgtttcataatattttattttttgggggaaagaaagaacatctttgtgtatatttgtgttttaactgtgacacaggcagatacagtaatgcggttttataacattaaaattttaatcctttttaatgagtaatattttcttaccttttactctaatttcaccaactttgctttcagatcttccttgtgagacaagtttggtgaacattataattaaacaaaacttcccatgaaatctaccaattttcctatgattctgagaatcatacttgtttcaataaccgagaggcattctgtctttgtcttggtgaattctccttagtgaagtgaatatattttattttctcttcattggcattaaccagtggcataaaattaaacatttttggtttgcgttgcagaaaagacgtgacatctgatagtttgttgctatgcctgcccataagttttgaaatcattttctataaaattgctttttgtggaataactttcaaggggttgagttttttgaaatccttgccaaattcctggggtagtgtgttgagtgggaagaacactggactaataatttgtagacctgggttcaaattctgtactttcactaaattgcttgtgacccaggacaaaacaagtaacatctctaatctggatcttgatctataaatgatcatcacacttcttgtaagggttttgtgaagatcaacttttactttttgtctgtatattaaaatcctaaactaatatataaacgtaaagtataatcactattaaattaattgccagtgtttgttttcttaagttctgtctctagacgttaagaaaaatctatattgtaggtgaagaggaagggaagagtgggttttatgtcttggaagataaatttttatgttagatttaaggcagtacccatttgtaattttgtcttgcatttctgggtctagaaacttaattgtggcaatagattgaaaatactactttctgatatgtttgaaacatgcctatttgcattgcttgaatttcccacttttgctttaatcacctggaaaatggtttcagtgaatgtaagtttttcttaagcttgccctgattcaattatttctcacacaaaaacttcatccctcttctatagtcaaagattccgaacactgttagatccctctgagcctgagtggagatttaggtactctcaggggtaattgtctttattttctgctgaggtgacttctgtagaaagatctcaagtcttttctgcaattaggctttgcatacatgcatgtgccgaagattggcaggaactcagcagatgctaaatattaaagacggtctctaacagagaactcttttttttttgagatggagtcttgctctgtcacccaggctggagtacggtggcgcaatcttggctcactgcagcctccgcctcctgggttcaagcgattctcctgcctcagtctccccagtagctgggattataggtgcccaccacaaggcccagctaatttttgtattttcagtagagacggggtttcactgtgttggccaggctggtcttgaactcctgacctcgtgatctgccctcctcggcctcccaaagtggtgggattaccggcatgagccactgtgtgcagctttttttttttttttttttttttttttgactgggtcctgctctgttacccaggctggagtgcagtggcatgatctcggctcactgcaacctctgtctcctgggttcagccatttctcctgcctcagcctcctgagtagctgggattacaggtgcctgccactgcgccaactaatttttgtatttttagtggagatgggttttcactatgcttgccaggctggtctcgaactcctgacttcaggtgatctgcctgcctcagcctcccaaagtgctggaattacaggcatgagccaccatgcccagcccaagagaactcattttaaggaaggatggactccattatgagctgtatgtgacgacagagcctagatgtccaagggtatggagggcttgagtgtggggtgctcatgcatgctggcagttgggggtaggacttgtaggggatgaatgtgctgaagtgaaactccgtactatcttggggctctgcacaggagacctcttctgcaggaaagggttaactcagcaggcttggggtgtttagatcttgcacataccaaagaaaggcgtagcccttacccagctcttggggaaaaagctctcagctttggaatattctgcctgataggagtgtctttgtatacctggggctttaggccacggcagagagtttatgctaacagtgtgacttatagtggcgttcttgggctacgctgtatcagtttgacttctggaggggctgcagactgagtaactgaggtgaaccatgtgggcgtcccatacctaagtgactgacccccaataaaaactctggacaccaaggtttgggcaagcttctctggttgacattactatgtatgcattgtcacacatcatttctgggagaattaagtgctgttttttgtgactccatgtgaaagaacaattggaagcttatgcctcgtctctcctggacatggccctatgtgccttttgcctttgctgattttaatgtgtatccttttactgtaataaaccataaccatgagtataacatttttctgagatctgtgagtccttctagtgaaccattgaaattgaggatggtcttgggggccccaacatacccctatagaatggagctcagaaaaagtagaagggtgtttcttttctccctttttggatagaaacttccaagtaattgtagcatatcatgagacttgagagtatcagtggcctagtgcagagcattaaattatagtggaaaagactggtagccagaggttttgtatgtagttttttataggtggcaactaaataactagaaaaattaaattagtgcatcaatgttaagaagacttcatggatccctgtaaactggtggagagtgaggacttctggttatgtttcagttactaaatcctctaggtaatttacaaattatagccatgctctcttaggtatataaatatacctctttccatattaagcagaatgccctcaagaaccaatgtggttacatttttcttccctttttggaaagctttcaattacttcctacctttgacactagttcaggcatgttaaccaccttgccacatagaacctcccatctgagcaggaaggtttaggctgcaatgagtgccgtgttcctgcaggtataagtatcacagaggacaggattaggaacagtgctctctgtatgttctttgtagacttgccattttggcaacacagtcattggaactaggtcattttctcctgaatatttttgttttaattggctaatttattcaactcattgtctgagtcttatggtaaagtagggagaattgtcattcacctttaagaggattgataaggctgggcgtggtggctcatgcctgtcccagcactttgggaggttaaggagggaggattgcttgagcccagagatttgagactagacaaggcaacatagggagaccccatctctacaaaaataaataaataagtaagagaattgataagatgaaatctctcattcttcttactagaaatgcctctgaatcaaccacttctcatggggcattagtttcctcaaggggaaatgacacggactagtctctaagctctcttttatctttaaacttctctgataacatacaattaatttttaaatttttatttccttttcaccgtagtagctacattgattgagggtttaatatgaaccagacactctccaaagcgcatagattagatatttaatcatcacaccaactctctgaataggtgttaatattattatcaccattttacaggtgaggaaattgagagacaaggtaatcagataacttgcccaagaaaacacagctagaaaggggtagaaatagttttaaatccagaaaattcgaggcttgttcccttaaccactcttcagtgttgccttctctgacaagtaagggactacattttctttagcttgatatattcctttgatgcattaataaaatgaattagaggaaaaggtccaagccatggtgctctgacctgctcactgaggctggaaccactcagctgtagtctgaatcctcataggactaccgctcctgatcacattctcatgccctggaaattgatcacctggaattgtggaaatagttctatgtacaaccactaggccattcctgaggctacaaatggtttctgaaatattttctaagacgtgaataagaaaaaagcaagggaaaatgaataaaaccaggtgtgatatccaaaatagttaacaattatatggcatggacatggatgagtcagaatgaatactagcagctggtaagtctggactggggtcctggacccccccccctgctgtgcctagcatgtttggttactgatggtgtacagggggtcatgggcaagccctgcggccatcgttgaggccattcagagggcctctgggcagtggctacttatcagccctatgagctattttggtattttattatattatttatttatttagagacagggtttcaatctgtcgcccaggctggagtgctgtgctcactgcaacctcgacctcacaggttcaagcaaacctcctgccgcagcccctcaagtagctgggacgacaggagcgcaccaccagtcctggcttattttctgtattttttgtagagacggggttttgccatattgcccaggttgatctcaaaatcttgagcataagcaatatgcctgccttggtctcccaaagtgctaggatcacaggcgtgagccactgtgaccggccaattttggcattttaatgacttgtgccggcacctttgtggcccttgctgtaactttgtacaaattagaagaatatgcctcctttcctgggccctcagcttggaacatggagtgtgggctgggcaccttagtgcagggagtaacctgccaaacctcataggagacctttgtaataaatattctctgttgagagtggaaagggaagtgcatatcagaacttctagtagggctgggatgctgtttccacatttaccccaaagggacatacattcagctgagctgctttataacatgatcagcaatggtcattctttgcagtttggctacgttactacagaatggtttctagttatgatacagattatggcccaaatttttgcctacattatctcaggaaaactactgtataatctgtcccttttccctgattgattatctgattgtctttaatagatgcctttggatatttatgaagctaagtatggtacagggtagagtaatcctagtttattttggtactgaagagcttcaataattaattatttaaattccttttagggtgaatctgaataaagtctttagtttagttgatagtactgtactagtgttaattcttagttttgacaaatgtactgtagttacataagatattaatactagaagatattggataaagaatatgtagtaactctctactgtctttgcaactgttatgtaaatctaaaattatttcaaaataaaaggttttaagacaaaacaaaacaaaaattaaattccttttaggccttaggtgctgcttcgaattagttttgatacaacttgagtcatatcattcattaattcagctctgagtctagtactgtgctaggtggtaaggatttgaagatgattgaaacagcccctgtttgcaacagcttacactgggccaaatcatgagatgaatggataaactggcaattccaacacagagtgaagatacggtccaaaggtgctataggatgggtgttctgggaggacccccacaggagaatgagtagaaaccttcacaaacagcccatgcttccaccatatcatgtgtaggttactgcaagagtcccctgcatccacttcagccttcctgcattctccgcactgcaagtggagtgatttttccagaatcatggcactctggggtctgaacatacccatggcttcccgctgaactttgaatgaagtccagattcctccatggcctcatctgatcctccctcttctttgctcgctctgctccggccactctggccatgcttctatttgtgggacatgccagcctttttcctgccatgctgggatctgtgcgcaagctgcctgcagagcttcttgtgattgattccttcacatcatttgggcctcaactcaaacgtcacccctctgagaagtcttcagtgaccacccttttcaaaggagccaccccactcctgtattggtcatgtttttaattttctatattttatgatatttcaatacctccaaaacttgctggctggggagagaacgcccctccctgtgctagccaatttttagaggtagcaaagggctcagccaggagcacgtctttcttccacaaaccagttaatcctgagtctagagctccaaccacctccttatctaattcacacaccaagccatatttcccctgccttacatcaccccagggccaggtaccaggcaccttatagaccaaagcacactggaattaattcaaaccagtctgtcttaagctgcctaccctaccctgccttggctctcccgtggaaaccccaataaaggctctggtctaggctctttctcctcattcctttctgcctcctggcccacatcggtgctccccacgtggtcttgcacagaatgacatgcttccttctctgggaaacgtaagtaatacaaatctttagtggcactgtcccctctgtattgtcactcagttgtgcctgtaaattaaatcccaggtatcatcttaatacacaagctccatgaaagcaggggccagtttgtctggattcccctagattcacactcccataggattgaagtgggcactgtattgatatctgttgaccaaactaatggataacagacatcagtcatcctttgctcaaactgatgtatccacatttttctacaaagattaaaggagaaatggaaccgagttggaattatttcacacaaaaactatgaatacacagtttttagttaatatttgtaagcattctccaaggggcagagtgataggtgttttaaaagaacaaatcagaaatgtttgcagaataaaggtggtgactatgaaatatcaatttcaatgctatcttccaccttctcttagattatccctaactgaatatacatccaccatttgggcagttttattacctgtgcaggtctatgcggatataactttaagcttaagtaaggacagatgcaatattataagatttggtttccctatgaagtaagactttatctagtaagacattaatgtaaatacctgaaaatctcataattgctatgaaccaagaattagcaatgacagaagccacagtggcagatggaagagaaacagctttgctagggagccatgaagacacactggctacactgtgttagtggaagctctggaaacatctccagaaagttgttttctttctgcaacatagtaattattctatttcaaaaatcactttccaaatgaagtagttctattactgaataagagtcttatttttgagaacattcttgattattgttattaaatggatgggaacagtggcacagaacccaaggggcataaaaccaacaaagtgttttctatttggcggggaatgtcttttatgcacacatttgttggggctgcattgtttgctctgggaactcaagacaaacaatgcaaacaaagtctcctgacttaccttaactctcctccctcctgggttcctccgacccttttttttttgttttgagacagggtcttgctctactgcccaagctggagtgcagtggtgtgatcatatctcactgcagcctccatctctggggctcaagtggccctcccaccccaccctcccgagtagctgggactacaggcactccacacaatgcccggctaattttttttttttttttaaagtagagatgaggtcttgctatgtgacccaggcttgtctagaactccttacttcaagccatcctcctccctcagcctctcaaagtgctgggattacaggtgtaagccaccgcttccgtcctaaccctattttctaattcatgtctatctgcatcctcatccactgctcaatgtgttcctgacctcgggtcttcattgtctgcagagttcttctttctgatcgactttcaaggtatcagtggttacctctctcctatgcaatccaaaacctcccctcctgctccaattctttctcttagaaaattgattgattgttctcaccttcgtgcttgtgttctaagctaaactcgccacctttccattccactgaatcccttttcagtttgctgcatctctcaatagcatcgttattttctagtcattagtcactttctttacttaaaatattggtattatttttgtcatctgcttaaaaatttttcattgtataatttcctgcatacaaaaaatttagaaattgtgtagtttaaataataaataatagtaaaacatacctgtatcttagagaccctgctgtttctccccagtgatatctcccctattactgctcaggtgtcatcactatcctgagttttctttattacttgctgtgaaataataagaaatatatagttggcctttgtctctatttcctggcacacagcttctaaaatccttgtaatttcctcagtgatagaagcatcttttcttgtcctgacccagagctcctaaatcctttgaaatttcttgtgtgataggagcatctttggttctaatgaggtgactcttggtgggccgctaagtagctttaggatgggggctggctgccagaaagaccaaaccttgatgagaagcctagacatttcagccctaacccttccccaccctccagagaggggacagaggctggagactgagttaataatcgatcatgcttacatgatgaaacctcaataaaagcttctaaatgagggggttcagagagtttctggattggtgaacacatcaaggtgctgggaggtggcccacccggacagggcatggaagctccgtgttcctcgcccctgaccttgccccgggcatctcttgtattcagctgttgctgagttgtatcctttatagtaaacccacaataataagtaaagcacttacctgagttctgtgagtcattctagagaattattgaactttgcggagggggaggttgtgagaaccctgaatttgtagccatgtcagacagaagtgtgggtaacctgcgggcctgatacttgtggctggtatctgatgtgaggacagtcttgtgggactgagcctttagacacgtggagtctgacactaactccagggtgttagtgttagaattgaattgaattgtaggacactgagttggtgtcagaagggaagaaaacctttcacctgcctttaaaaaaggttttgctatctacatatgcacctctaaacaatatcttgtttagtttttctatttggaactttatacaatggaatccgccttatgcactctgctgggacttgcttccttcatttggctttatgattctgtaactcatcattgttgatgtgtgcggcagttgtaggttgattctctgggaagcagagtcagagctgagttcagtgtgcagggtgcttattaaagattgccctgggatcaatacctgtggaaggggagaagaaagcaggattgggcacaggtagaaagtgagcttccatgaggagctctggagctcagtattgtcctgagtggggccaagatggccaagcctttatacttctgtatcaattattcattggatgtagggtgtgaactcaggtgaggtgacactgcagctgaagcaacccctgaggggctgatggctgaggactgcctgctgccaatacctatgcagctgggatgaaaagctctccattggaagcctgctggatctgggtagccagtgggatcacagcatcaccacaggggtttatagtccattattttccactgttggatagcattttttgttatagacttcactttatttatccatcctaccattgatggctagtatttggattgttcctagtttttaactactatgaacaatgttgcatgaacattcttggacatgtctcctggtgcacctgtgtaagggtctttccaagttttagacctccttaatctgtttggtctactgtaacaaaatgccatacactaggtggcttataaacaacagagatttatttcccacagttctgggggttgggaagttcaagatcaaagtgctggccactttgatgtctgatcagagtccacttccttgttcatagatgtcaccttctgtgccatgtaacactgtgtcctcacaaggtggaagggcaagggagttctctgggtctctttattaagggtaccattctcaatcatgaggcctccacccttatgacctaatcacttcccaaagaccccacctcctcataccatcacctaggcttccacatagaaattttggaagattgtaaatattcaacccactgcatagaatatgcatatatccaagttgattaggtgaaaccgaattttcgaagttcagagttacaacctcacaaaagtatgagtttctgttgctccacatactcatatatatttgatacaggaagactttttgatacttgacaagttgggaagtgtgaaatggaagctaactgtgatttttaatgtgcatttctctggttactaataagattgagtatatttcatgtttattgaatgtatggatttcctcttcagtgaggagcttgttcaaatttttgtgccatttttaatagggctgtctctttttatcctttatcctcttttatgcttctcttaagcttatctatgtgtctatccatctatctacttacctacttacctacctaattttttctctctgtgctgaagtctggataattccctcattctacttttcagtttactaattctttctcccactgtgtctaatctactattggatctaaacattgatattttaaatgttatttcttacctatatctagaagtttatatttggttcttttcaaatatccttagtcattcttcatagtgttttggattctgcttatattttcaaagttttagttttaaaagtatattgatcattttttatgctctatattttaaaattgtttctattggctcttgctcatagtaacttgtttagcaatttctgattaccaacagctaattttccttaaaattttatttatgagaatcatttgaggcctgggatgatagtgggtctatctaaagagaatttgcatttgcttctgttcggcccccagggaggtaccagtggttgggaaccctcttaaagtaaattcccagcttaaagttattttcatgcagcaagatagtgtggattttggccataaccctatccaaagtttagcttgtaaccgtatattctcagagttaattttccctcttctctttatgccagtggttgagacagggaactttttttgcagttctctggcagggaggtgagagtatttctaggtcatgcttgtattgcatgtatggctttttggggctaacacttataaggaagggtctctgtttatactccccatcttaggcaggtgctacgttttatctcatgtccttcatactctgtggggtcataaacactgaagtccaagttcacagcttcagcaaatgcctcaaagtgcaagccatcttcagatttctccttttctctctgagttccttccttcacgtagtgtttggtcagggttttccttgttattacagctcattaatttgaagtcctaattagggaaagggagtcaggctggtggaggcaggaaaaagcaaaaagataaagcaaataagctacaagtctgcctttcttcatggtccaggacacacagccctcctgcgcaaataattcacaatcttcctgcacccaactatcaccagacacctgcaagttagctcactacaagctttgcattatcaatactaaacaaagccctcttcagcagacagcataaacaccatcctataaaatctccagcaagcctttctttgcagtcagcttctcttcttctgatcctgcttgttgcctcctcgcaatgtatttcctactttctctaataaatctaccttttttttttttgagatttttttgagacaaagtcttgctctgtcgtccgtggtggagtgtaatggtatgatcttggctcactgaaacctccacctctcagttcaagtgattcttctgcctcagcctcctgagtagcagggactacaggcacatgccaccatgcccagctaatttttatatttttagtagagacggggttctgccatgtaggccagggtggtctcgaactcctgacctcaagtaatccatctgcctcggctcccaggggagagattaagggcttgagtcatcttgcccagccaagtctgcctttctttatctactactctcttagtaaattcttttacccctgtgccaccggcccccttgttgctcccttgcatcaattaatgctttttttaaaatttgagacagagtctcttaggttcaagcgattctcctgcctcagcctcctgagtagctgggattataggcatgcaccaccatgcccagctaatttttgtatttttagtagagacggggttttgccatgttggccaggctggtctcgatctcctgacctcaggtgatccacacatcttagcctcccaaagcgttgggattacaggtgtgagccactgtgcctggccaattaatgcttttaaaaagattttaagaggattttatccagcatttttagttgcttccagtaggagaaccagttgaaaccaagtctcctgtatcatctcttgattctcctttttacccctgtgactgttcctgttgattgttcttcatagattttcattcctctacctattgcttaactgttgatattcccattttagaacatgaccccacttcttttttattttacatatgtacatttatcacattcattctctttaatataatttttccttcagtaaaacttaccgactctctactctctaatggagataactggtagttcatcccatatgaagactggcttctggtgagacatcccaggcccctcaccttggaggacacaggaacacagggctttagccttcccagcgagcctattatgttccctttctcttcagggacctgtccatgtctctctacttttctcctctgccattggagaaatacgaaaggtcactcaggggcctagagtctcttcattcaggccaagactttcactcttcaaaaactcataattggaacaatcactggggaccaagttggtgcaaggcacaggctttgctgtatgatgagaagctggtcaaggatgtgtagcgtaagctctccttcttttaaaagcttacagactagttagggagagggagacacctgactcatcacagctgtgaccttttatagttttaattaccaactttagtcttacatgtttccaatataaaatacttcttctggttttgatgtgtatatttattcatttattgaacaaatatttaatgtgtacctaccatatgccagacactgtctggttactggggatatgatgttgaacaaaatgggccatatccctgccttagaaagcttacattctggtgcaggggaaggaacaacaaataaataaaataaataaacaagataaattcaggtgcttatgaagtttccgaagaaagtaaggcagtgtgatgtactaatgacttctgctagagtggtcagggacagctcttctgatgagaaggatcaaaaggaattagccatgggaagatctggggaagagcatttcaggcagggggcacagctagcgcagaggctctgaggcaggaatgagcttgctgcatccaaggaataagaggagggcaatattgttagggctttgggggaggtgagggcataagatatgaatagagagataagcagaaccaggtcacatcaggctctggaggccatagaaaaatatttaaatttagtcctaggtacatcaggaatccactggaggattttttttttttttaaaacacggtctcactctgtcacccaggctaaggtgcaatcactgctctctgcagcttcaacctcctgggctcaagcaatcccactgcaggattttaagaaaggtagtgatgtattcatctttctctctgtctgtgtatataaagagattaaccattgtgtgtgtgtgtgtgtttaaagtcatctttgttggagtacaatcatgatgtgctggtaaatgtgtaataaccaggtttcagaggaggaagaatttctgatttgtggggtttgctaatttctgcaaaagtgtaaataccttctccatgctgacatcaagctaccaagtgatatcactaagtgaggggtcaggaagagacgtgcagaagaggctgtcatgagatggtaacagttctagcacatgactgggtgtattacaaacatattaaaactcactttttaagttgttcatgtctatgaatcgtgacatatatagctgtgtaaggatttacatatggaatcatcactctagtcaataagtgtattagtccattttcacgctgctgatgaagactgggaagtaaaagaggtttaactggacttacagttccacataactgggaggcctcaaatcatggcaggaggcgaaaggcacttcttacatggcaagagaaaatgaggaatatgcaaaagcggaaatccctgataaaaccatcagatcttgtgagacttattcactaccatgagaacagtatgggggaaactgcccccatgattccagttgtctcccactgggtccctcccacaacatgtaggaattatgggagtacaattcaaaatgagatttgggtggcgacacagagccaaactatatcaatgagggaggatttgatgataggcggggaaaagtggtgtaaattgcttcagcacttagacaattacaagattttttttctaagtggaatttttctctgagattgtaatatttttgtttcacataatctaatggggaacataattaggcctgtggctaagattgtatcagaagcaggcaataaaaacaattcagggataattacaacacacttaaaagactctttttctgctttatattttcacttagaggcagaaaccattttttttgaatagattataatatggataatccatccatacaggatagagggtcaactaaatatctagaggtaatatctgatctgaggaaattatgtttttaattaatctaatttatttccctttagtagagagaaatctattggtcaagagagttataaacatcagctacaactttgtagtagaagtggatggctctattcctgtaacttggattctaaactaaaacttttgctataacctctattacatttggaatattgtttaaaatatatatccaaaaggaaaatgaggttgagaattaatcattataaatattgagtattaaaaataagtattagcatctgttgaatgcttatcccataagtgcactttgcattaagttatttctttaatctttacaataaccatttgaaagaactacttttattatccccatttacagatgaagaacctgaaatgtatatactttagttattactaaagggaataggcttcttagtatgtcaaaatatggcagattggggatttaaataaaagtacttttattctttctgaatttgtttcagtttgaattatagggtaagccttatgaaaacctatgaggaaatctattattttgaaagagtttttatataataaaagctgttagatgttcacatatttatattgcacacataaacattctaaagacagtatcaccaatgataacttgctaaagaagaggtttattgaatacaaagaattgacaacagatttctgtaggataatcaaatgagtcatatttgtgtgtggcattcttctagatgaatggggagatgctgtcattgattgcccagaaagaaagtaacagaaagacaacaggttagacatttttcttagacatgcacatttttctggacagatacataatgccttttcttcgcaggggctatgtggcatacgttctctgttgcatctcaaattaattgctttgagatttctcttccagggagtggagcctggtggtaagtattttgctgcgttggtctacctcctcaagaactttcttaaccactatggctttggctgggtctgagcattaaaaattaaaaggagattttatgtagttaaaaaaagaataaaaattatatcatttaaaggaataataggatttgcatacagaatgaactttgcactaagcacaaatacttagactcatttttggtgaataattttgattatttggttagaaaaaacatggtgacatgttattttgtttaaaattagcacaaatcactaatattagacatctagcacatatggatatctactacaaatctttattgtatgtattcttaccaagccatggtaatataagaacaatcaagctatgcattaaaaatgaagtagttgggtatatatacccagaggaatagaaaacattctaccataaagacacatgcatgtgaatgttcattgcagcattattcacaatagcaagaacaagaaatcaacctaaatgcccatcagtgacagactggataaagccataaacaccatggaatattatgcagccatgaaaaagaacaagatcatgtcttttacaggaacatggatggagctggaggctatcatccttagcaagctaacgcaggaacagaaaaccaaacaccacatgttctcacttataagtgggagataaatgataaggacttatgaacacaaagaaggaaacaacagatactgggttctacttgagggggaagggtgggaggaggaagaagagcagagaagataactattgggtaccgggcttaattcctggatgatcaaataatatgcacaacaaacctccgtgacacgtgtttacctatgtaacaaaccttccaatgtacccccaaacctaaattaaaagttaaaaaataaaaaattagcattgcacaacagatttcattttaattacctttgacttgacttcccacatttccagatccataatctttagacttgtaacccccagacttacaggctctgtgaaaacatcgcaaaagagggtgatttagagagaaccccatcaattctaggatcaccatatggttttctttagctctttggtagtttcaactgtgtaacccagtatttgatttatagtgtttgctgatttctgtagaggtatgaataccttctccattgctgatatcaagtcaccaagtgacatcactaagtgaggggttaggaagagaagagataggcagaagaggctgtcatgagatggtaacagcagttctagcatgccactgggtgtatttatacaacttaggttgaaattcacccttttaagttttgcaggtttatgaattgtgacaaatttatatagctgtgtaaggatttacatttggaagcatcactctagtcaatgagggagggtttgatgataggtggggaagagtggtgtagatcgcttcagcagttaggcaattacaagatacttttcctaagtggggttttctctgagactgtaatgtttttgttctgcttcagcattaagaagtgatttttttttctgtatgattccttttatattaacatcaagaatggataaaataataactgccaagggaagtggggcacagaagaactttctggggtgatgaaaatgatcttcattgtgaattcaggaagcttcctgctcctaacaaccctgagctctagacatccagacttgtggccatgggactttatcagtgctatgaagacaggattctgtgagtgctgagctccagaaaccatttccagagtcagaatcctggtccacatattgaaactccatttagcctcccgtttgttcttttcactctagaagtgatattttcaatgttcatatcttgaactcggtgcctgctgcatattggtttaagatattaatttgtattttggcagttgagtatgtattatatttaatatttagtattcatgataataaatgcatgcagccaaattatgtccgctttccagtggaaagtgggatctaagttgcaagcagatttcagtatattacgccatctatgcagattattttacctacccatcatctcctcctataaggagacagtaggtctcaatttctttttccaggtggagcttgatgtccaggagctgctcatactccagcttctggccctcggtctcggttctgacctggtgcagctgctcctccagggccccgatctgagcctggatctgcgccagctgcgcacagtagttgctctcggtctctgtcaaggagcactccagggagtgtttctgtcaggaagcaataaagagaacttgaaatggatatgcagatatgcagggatttctttgatacatgattttctcctgctgttaactttacatataattgtttcagatttcacatggacacatagttaagactctgtgatactgcttgaaaatgagcaaatccttctttttagtagaataaacctaaagacattcgtgtagttttaggtgtcagctatacaatcctattctttccttatgttttgagacaattataaacaaatatatttcaatattgttaaggtttttaaaaccagctggcaagtatctaacatgatgacctgggagatggtgaaaaaaaattgttcttttcataccgtggctaggagagactgaagttcaatttccagggtttgaagagtgcgcttcatttcagtcagctcattccgggctgaggttgtggctccgacatcctcagagatctgctgctgcagggaggcgctctgaaatgacataagtgaaggagcaaatcttagttttgtgaataccagtaacatgcaaagggaccgttttctggaggagagtcaccttctcgttgaaccaggcctccgcgtccctgcggttctgctctgcaagggcttcgtactcagctcgcatgttgttcagcagaactgtgaggtccaccccgggggctgcgttcatctccacgttcacgttgcctccagctgcgcactgcagaacttgcatttcctagaggcagaaaagtgttctgctcagctctgcaggaatctcatggaaagtctagaagcttagctttggaagggcacttagagttcgtctggttttcccctcccaggctgtgcattgaccccctcccaccacatttgatacttcctgtcccgttgacctaattctcaaagacggtgaactcactaccttatgaagtagcctgtttcattctgggagagttttaattgttccagagttctttattatagtgagccaaactcctgctcttataacttaaactcatcagtttcagttctactactcagaatgcatcttaattccttttccatatgaaagttttaaacatttaaaatgaatggtcctccatcgcttattctattctcggcctttgtggactggtcttccttccactagaggccagctttggtgcagtgttaactcagctacaccctgagcacagccatgaacatggttgaagggttgagtatgaataattctgaacaattgaaatgatgataaataaataaatgtatgtgtgtgtgtgtgtgtgtgcgtgcgtgtgtgtgtgtgtgtgtgtgtgtgtgtgtacccctcagggaagaacatcatcccctaaagaatcccagctgtctattaagtctatacagggacattacagtatcatgttggactttggagtcacgcagatctctctgaattttggttctgccctatagtggctagtgagtttgggaaagttgcttaacctttttacgtttctatttgcttatctgaaaattgaggataattaaaaacccttctctgagttgttaaaagaagtcaaagaactaataataataataagactccgtgatactgccttgcacataaatgctaaatgaatgctggttattatgattattatcatcatggaagctggaatttattttgcagtcaaagtctacatgttaccctgtctgaactgcaagctgttagaatgtgtgagtcagttctaagattgtgaatggtaggcatcgctgcgaagactgtgtatattggaataccacccatcagcttatgtctgctgcagaaactctcctccccattcatgaattggtcttaatgatggtaactaaggctttcattcctccctgcagcgagcccctcagccattccagccttctttcctcctggttgaaactatgtcttcctgatctacagatgtggcttttacttctgaggatttagtgaaaacttcctggttcaagcataaaaagaaaaagataaaaaaagatatatgtatatcatctatatctatatatctatatctatatctatatctagggttgcctgtaaatgaggcattacaaaaatcaattgcttttgattcatcaaaaattgattaaacaccatgggctgtaactatatttgaatccacgtagtcaaatcaatgttattcaagtagttatatttataagacagcctcatgactaatcaagtaggattcttagcttgatcttctgttttaagcatttggcttgaccatagaagtcttttggctatttaaaatatcaaatttattttcaaaggataaagatttttcccttttggaaaacagtgcctctgaaagcaatcctaaagatgtaattgctgcaatataaaatttggaacttagcttccaacagtgaccactttggaagtttatgattaagtgtaaattctggtataatagtttaacttcatgctcattatttttacagccagacctattaagaatatgtactagcgttaagtatgtatacttaatgtgtgtatgaagtaaatgttttagtgttttaaatctgccactgtcatttagaaattgagatctagttttctagtttaaggatggccttaaagtatatttattttatatttattttatctaattagacttaatgtccaaagcggatcattttaacttagttataattacacagccaaacactgctcttataaccctgattggtctggaaaacatgattcgtttttttttttccccataggaaacttgatgagagagcaagggtgaatctgtacaaagaatctgacacttaaaaagacagctcaggccgggtgcggtggctcacgcctgtaatcccagcactttgggaggctgaggcaggtggatcacgaggtcaggagatcgagaccatcctggcttacacagtgaaaccccgtctctactaaaaatacataaaattagccgggcgcctgtagtcccagctactcgggaggctgaggcaggagaatgccgtgaacccaggaggcggagcttgcagtgagccaagatcgcaccattgcacttcagcctggacggcagagcgagactccgtctcaaaaaaaaaaaaaaaaaaaaaaaaaaaaaaaaaaaaaaaagacagctcagccctcatgtctgtctgacaatgtgtcttcagcaccaactttttatatgagaggttatgtacattatctcctgtcaggtgcacagtgtctgcggagggatagcaaaatgtagacgaccagctcttacctctttatggttctttttgaggtaagtcatctcctcactcagggtttcatactgaatctccagatctgttctgcacagggttatttcatccaaaactcttcgtaacccattgacatcagcctctacactctggtgaagagccagctcattttcataccttaaagagtgttaatgatttcctaatttgtcacatggttggagacatagtcactagtcactgatcaatgacaaatgctagcattctggaattttgaagatttggccacaagaggcattttcaaagcttgttgtataataattattgtttctactttgcagtatttgacagaaaaagaactagggtattgggcgctagttttaatagcagttcatgctttgtatttaatagtcaaagcataaaaaagtaataacatcctgtttatgtgaaattcaagtgttttataattttggaataagagttgctaaatttgatgtaatgcgttgcatgaattgccatgaattcatttcactctggcagtctacttacttgagtctgaaatcatcagctgtaagcctggcattatcgatctgcagaacagcattagcattgctggtggtggatgcgatgatctagaaatgggaatttgacttttatcatgaagtaaaccaactgaatctacttaatgcttatttctaatgctaaattggaattctctttaagaaatcacaagtaggagggcatggtggcaggcacctgtaatcccagctacttgggaggctgaggcaggagaatctcttgaacccaggaggtggaggttgcagtgagccaagatcccacggttgcactccagcctgggcaacaagagcaaaactccttctcaaaaaaaaaaaaaaaaaaaaatcacaagtaggaatgataaatgtttttagaatttaataaagaaaggaaaacaaaatttagaaataaaggtacatgaaaatgattgtgcagtatgatttcttacctgatttttaaggtcatcaattattgggaaatatctgctatagtcatgatcaagaccacggcaagagccaggcccaaatttctcataccagcccttgatcttctgctccaggtcagcgttggcctcctccagagcatgcacactgtccaggtaggatgccaggcggtcattgaggttctgcatggtcaccttctcattgccagaaaggagcccccgctcattcacagtgaagccagcacagggattacctccccctgtgtttcctcccgatgagctgcctccgaaggcactagagaagccacttccaatccctgaaatgccacaagaatttccagtaccaaagctggttcccccaccatagagtctgagtgatccagtggtgggacgaggacaggacctcctggatgcactggaaagtcgaagagacatggtatcagggcaaacgcgttgcagagctgtatttgtgaaagccagaatggagtgccttcttgtctaaaaggtttggtttgcctttttataggcaagtcccaagtgtgttctgaatgaaattctgcctacacagagtaaaacatggcttgccagtctcagcaagttggcataattgggtgattttttctaattagtaactcactttgctgggctcattcctgtaggagggcagttgccctcaggttggtggttatctgagaaatgggtctgggtggagcaatgtcaggttcattattacgtttttaaatgctgagtgagtcattcttcacttccatccttggaagtaaacctcatcagctcattacaggatagaaatttagcatcatggttttgggctattatgccaaggcagattgtgatgtttctgaggctttttctgcttttattttcacaagtttttccacataagtagagaatagaactgtaatcatttccccaacctggttcttcaaccaataggtttttgtttttatttttaaattcctcttgccactctttcccatgggaagttaacttccattctggctgacatgagcatcatattctgttgacacttatgactgaggagagttgtcttaccttatccattttggtaattaggagcacacccctaattggtgttatgttttgtgggagtttggaaagacattaacttatttcctgaccctgcaaaatctgaagcaaacctggtaggaactattttttctgtcttaatttattgtggtttagctcagatgaaagtcatcagtaaggtatttagtcggtgggaattcacatatatttactgaaaactctacctattatggaaatataaaaaattgacaaataaggccaggcacagtggcttacgcctgtaatcctagcactttgggaggctgaggcaggtggatcacttgaggtcaggcatttgagaccagcctcaccaacatggtgaaaccccatctctactaaaaatacaaaaattagccaggcatcatggcgaggtgcctgtaatcccagctactcgggaggctgaggcaagagaatcaattgaacctgggaggcagaggttacagtgagctaagattgtgtcactgcactccagccagagtgacagaatgagactctgcctcaaaaaaaaaaaaatgagaaataaaaattgtatatatttatggtgcacgacatgattttttgatatatgaatatattgtgtaatgaccaaatcaagctaattaacatatctattacctcacatacctattttgtggtaagaacatttaaaatctactttcttattgttattaactatagtcaccatattgtacaatagttatcctgaacttattcttcccacctaaatgaaattttgtattctttgaccaaaatttccctagtgcacttccctgatgattagtgatgttgagcaccttttcataaacctattggctatttgtatgtcttttgagaaatgtcttttttttttttgtttgagacggagcctcactctgtcgccaaggctggagtgcagtggtgcgatctgggcccactgcaagctccgcctcctgggttcaagccattctcctgcctcagcctcctgagtagctgggactacaggcatccgccaccacacccggctaatttctttttgtatttttagtagagatggggtttcactgtgttagccaggatggtctcgatctcctgacctcgtgatcctcccacctcggcctcccaaagtgctgggattacaggcgtgaaccactgtccctggctgacaaatgtctttttaatcacattcttttcttgttattgagttgtttgaattacttatatattttggatattaagccttgatcagatgtatggttcatagcatttcatccaacaggttcatccatgttgtcacaaatgacagaatttccctttttaaaggctgaatagtatcccattgggtatatatactatattttctttattacttcatttgttgatggatgcttaggttgaatccctttcttggctattgtgaatcatgctacaatgtgcatggaatgcagatatctccttgacatactgatttcgtttcctttcaatactcagtagtgggattgttgggtcacatggtagttctacttttaattttttgaggaatcactatactgctttccataatggctgtattaatttaaatttacacaaacagtgtacaaggattttctttctccactttcttactaacacttgttatttcttgtcattttcataatagccattctagcaggtgtgaggtgatatctcattgtgtttttcatttgcatttcattcatgattagtagtgttgagcattttttcccatatacctgttggccattggtatgtcttcttttaagaaatatcttttaaaatgggttatttgtttttgttatttttgttgagttgcttgagtttcttatatattttgggtattagtcctgtgtcacaagtgtgcttcacaatattttctcccaatctgtgagttatctcttcattctgttaattatttcatttgctatgtaga

SEQ ID NO: 41 - DNA, 177623 bp, Homo sapiens
gccgctgtccccgcataggagaagcagctggggctggcgggacccgggaccgggatcgcggccgctcacctgggaggcgccggggaggaggggccgcgcgcgcagccagggctcacctgtgccccgcaagagccgccgggaactgaggtctcggctctccttgccaagggagtggcaaagggccccaggggcgactgggccagtcgcaggtctgccggggccgggggagtagccgcacctcccggcccacgtgggcggggggggggggggcgggcctcggctatcacgtgacccggcccggcccgcggcgcccccgccctcctccgggcgccccgcggcgactatgccttcctcccctgccaacttccgacccctcctcctgaggtctgagctgggctggattcattccagcccctggttgaagtccccaatttttctgacgctcagtttccccaagttccaaaaaggggcaatatttccagactcatctgcttcccatggttagggatcgtccaagtaagatgccgccgaaagccccagggacacagagtatctcactccagattgggcagcgcccccccccccgccgcccccgcaagcctcctgctgactctccccgaccccggcggggggagcctggttatctcccactcctgacacctgggcggggttcattgtttatctagcaagagttctggctcacttcctgtgtgctgtgtggagaggaggggatgaaaaggaggacacgctgacacttaggtgactgtccccaggtgctgtacccgttgccctgttttctgttattccccatgagccaggaaggtatgcactgatattcccatttcacagatgaggaaactgaggctgagagaagttaatcaccctttagggtgcccccagccaaagcaggagacttagtggtccacctgggaactctatggaggaaactgcctttgagattgtaccccccaccccaagcccatttggaagggagggtcattcctggcggggagaagccatgaagcaggcagggtgaatgtgagctggggcccaggagggcaggagagggcactgctgcaggggagagcaggcaagcaaaagcgaggaccaggcaggggtcaaggctggggccttttggagctgccagtgtggtcctcagatggctaccccaagctggttcttggcaagtggcaccctggcatggagacccagcccctgcctctcctcccactgcttccccctccctgcatacccacactgaatttgcatgaatgccacctcctctggggagcctccccagattgaaccctggtggagcacctaccacttcctattgacatgtacatctgtggttctgtgccccctcctaccccagcccactgtgtgcccagcaccagcacatagcttgcgcctgacacacagaaaggactctggaaaccaggaaggaggtgggcagagaggcagaaaagctatgaacattcagacctgagatgactgggccctatagcaggtagagagggagcagagaggaagggctgcgggcttcccaggggcccaaggacagagaattggcaaagatatgtcttaaacatctagcctgggagagcatgaatggagccaattcctgagcacttactaccggccaggtgctaggcctgggtcttggcacaaccataacgccaatgacaggggctggaagtacagcagtaacaccaagagtatctggaaacccagcagccaggttctggggagcccaccatcctgtcattatcacaccctccagggtgaggccggcagataaagagtttggcccctgtgcccccaccgttcccatccccacccatgtcaggctcccagctcaggcctcgaggtcaagtcctgcctatccaggctggaaggagttgaacagagagggcctcagctgcaggctggacatccctggaggcagccaggcggcagacccggaccagtggaccctagggctgcaggagaccaggccctgactcctgtgcagaggggaagggtgggccacccgcagcccagcatgcacagagctccctgggaggccaagtggcctacgcctgtcaccttcacctctgcatctcaggggcccacaggaagtgcctgcttggcctcagtttaaagcagaggaaaccatggggtgagaggggaggagggaggtagtggagagggaagctgggtttcctgtcatatgacccctcctctgggctccctcaccaccctgcctggcttggcaggagtcgtctgagaaggggactcctccagggacttggtccctaggtccccaggtgagctggatgtccagtggagggagaatgcagagggtgaggggctgtgggggccagctagagccctgcaagggtagcagtgggtccctgctcctgtccccacggctggggctgtagccacaggtcctcatcaggggctcgcggggtacctgggactggaggctggaccacaagaaggaagacagaagggggtcccccgacatccagagtcagatgtggcagatgccgagtcccaggaactgtggggtttgggacacaggctcttccggaagggcaaactgccacgtggagaagagagggaattgtctctccttggggtgacggtgggcccaggcacaggtggatgcggggtgcagcaggtcttggctttctttgcctgtgccggtccagactttctgtgccctttggatctttcaccccatttgacagatggggagactgaggccgtggctgtgtgtccctctgagagttggagcggggctgggcccgaattcgaccgcagcaggattctctctcatttctgagccccggaggtggcagagcggcagacccgggcaagtgaaccctagggctgcaggagcccaggccccgacgccggcgcagaggggacggaagggcccgcccccagcccagcgtgcacagaggccatagccaaggccttaaggctcatccaaccggggactcatatcccccccaccggcagcccggcgccccagcctctacccgtgcccgccgagatgctgctgccgcggtcggtgtcatcggagcgggcccctggggtgccggagccggaggagctgtgggaggcagagatggagcggctgcgcggctctgggacgcccgtgcgcgggctgccctatgccatgatggacaagcgcctcatctggtgggtgccacgcgggcgccagacggtgcgtggggggggtgctgcgaggctgccccgtcggatggtgtgggagcaccccgtctgcttggcccgggtgggcagggcgggtgactcaggggcgcccctgtcaccacccccgtccaggcagctgcgggagcccgcgggggtgcagaccttgcgctggcagcggtggcagcgccggcggcagacggtggaaaggcgcctgcgggaggcagcgcagcggctggcccggggccttgggctctgggagggggcgctctacgagatcgggggtaggacccgcgcgacccgcacctccccttgccctctctggagccccactgcccagatcggaaaaaggagagtggcatcatcccacctgccttcacccgggtcccccgaccaatcggcccctcccccctcccaccccttccgcccgcaggcaccgcaaacctcgggcccacgcagcacccccaggtgactgtcagcggtacctccggactcgggcgggtgggagcctggcgggcaccccacgccgtccggtgggcccgcccttggactctcagcgcggccccagccccggccccggcctccctgacccaccctgctctcccactgcaggcctcttcggcacaggaattcggtcctacttcaccttcctccgcttcctgctgctactcaacctgctgagcctgctgctcaccgcaagcttcgtgctgctgcccctggtctggctccgcccccctgacccaggccccaccctgaacttgagtgagtgtgaggcccaccaggggaagtgctccggtgcccacctgcgccatgggggggctggcccagggcccagagcgtggcgacaacgctgggcgtggtcctgccgtgcaggccccggggctctctctccctgacctcgccttgtgtggggcacgcctttggcacatcctcagccccctgcccaggcctccccagggttgggggttatagagcagtagccgcagagcctcacctatgccttggggatccctctctattgacccccttcctcctcaacagccctccagtgccctggtagccgccagtccccgcctggcgttttgaggttccacaatcaactttggcatgttttgactggcagggtgagtgaggtctgtcccggctatggtccagagtctgggagacccagggaactggcttcaggggacacaagtctaagaggacctctgctcctccagggacatttcggctcctcaggggatggtcttacctagacagactggcctggccggtggtggggttagagagaggctgaggccactgtgcccaacatagactcatggacacatgcccgtggtcctcagagcccagctggtgtaggcggtgccagggacaaagggggaaaagtgccccggcctctgggagaagcacttccccaccctcatcctgggaagccatcgagtggtcaccaatggggttcctgggttccagtcgtggctctatttctcaaagccctgtgaccgtgggcacgttgccgaacctctgtgggcccttgtaagacgggacactccctacctgatggggggattgcacgggggctaacaagatcatatatggaaagcacttgagcagagcctggtgctcacccgggctgggtatcttcgtcgctgtccccaggccttcaccaacacctatctcttctacggtgcgtaccgagtggggccggagagcagctccgtgtacagcatccgcctggcctacctcctcagcccgctggcctgcctgctcctctgcttctgtgggactctgcggcggtgagagcgaggtccacaccttcaccccttccccagggaatcttccctgatcaccccttccttggcagggtaccctcccattggcaggaaggcccatggcccggcacagcaggctcctgggtgcttcctcagcccaggctctggccgcaaaccttaggaacagggccaccgccccctaccccgactcctcactcaccaggacctgcacctggggctgcaggggccttcccagacccagagccgagccaaggctgaggctggatggtagaggtgcccctcctccagcagcccctggtctcctgccccgcaggatggtgaaggggctgccgcagaagactctgctgggtcagggctatcaggcgcctctcagcgccaaggtcttctcctcatgggacttctgcatccgggtgcaggaagcagccaccatcaagaagcatgagatcagcaacgagttcaaggtgtgtgcacgagtgagtgcctgagatccacaagctccaggtatatgggagcgagtgcgtgagagccacgtgttccaggtgtgtgcgagcaagtgcgaccgtgccagtgtgtgtgagcgtgtgtgggagggagcctgtgggagcgtgatggagagcgtgtgaatgtgtgtgcatgtgtggccgagtgtgagggcacatgtgactgaatgggtgatggcgagcacgcctgtgaatgtgtgaatctgagtgtctatgggagcatgacagtgtgagagtttgtgactgtgtatgtgagcgtgaatggttgtgactgtgtgtgagagcgtttcctgcaccctttcctcccatgcccaccccgcctgcagctgcctctgtccccacccttccgggcaggtggagctggaggagggccgtcgcttccagctgatgcagcagcagacccgggcccagacggcctgccgcctgctctcctacctgcgggtcaacgtactcaacgggctcctggtggttggggccatcagcgccatcttctgggctaccaagtactcacaggacaacaaggaggtgtcaggcaactgcattcatttaatcctggccagaactgcgggggtgagacaggatgatcccattttacagatgaggaaaccgaggctcagagaggttcaatcggtcgtggccacaggtcacggccaaggcaggcgggctcccactggatattcccgccaactgccaggctgctgcagggaatagcttacaggcgaccctattctgggcctgccccagagttacactttagggcactgtggggggcggggagcagacaggggccccccagcacgcgggctcccctgacctgccttttcccgcaggagtccctgtttctgctgctccagtacctgccccctggggtcatcgccctggtcaacttcctgggtcccctgctgttcacatttctggtccagctggagaactaccctcccaacacggaggtcaacctcactctgatctggtgagtgccacccttggtggggacaagtgggcatgtaacaagtctgcatcctgctgctctcttttggttgtcacctggcacctggggtccccagctgagaggcttcccccttcactagtggcccaagggaaggcaggtacacacctcacagcacacgacctcagggccccaggtctaaggctttccaatcccccacctccaaaggaagccgccagtctggaccaagctccggccattcagtggagcaagggactgtggccaggggtgctgggaatgggctttgcacacaggaaaaccagcaacacgggacatgcagagcttctacatgccgagggtttactccccttacctggacaaccctcacgtgacccgtgaagtccagaccatcctcatcccccttgagggatgaggaaactgaggttcacatgagtgaagcgcccagccaaagtcaagctcatcgtgcctgccaggtgcaagttcaaaagcaagccctcgacctcctgggctcaagcgatcctcccgccggagcagctgggactaccactcccaggttctgccatcttctgtctcagcacttaggtcctgtctagaccccctacttctccacccctcatccagctgcagaaattcttgtgtaaagcccacctgagctcccactggcttctctccctcacgccaccctcagtcaccacttgccctaactgcttttccctctgcttcctcaaagtcagctgtgtttggtttgctttgaaactttattttttgaggccgggcatggtggctcacgcctgtaatcccagaactttgggaggccaaggtggatcacctgaggtcaggagttcgagaccagcctggccaacatggtgaaaccctgtctctactaaaaacacaaaaatcagccaggtgtggtggtgcacacctgtaatcccagctacccgggaagctgaggcaggagaatcactcgaacccaggagacagatgttgcagtgagcagagattgcgccactacactccagcctgggtgacagagtgtgacttcatctcaaaaaagaaaacaaaacaaaaaaagctctcacctacccctagctccctcaacaggagaaccactgttcccagccactctgtagccccatatcagcagtgggaatgttcacccttagagataacacgcaaccaggcacagtgactcacgcctgtaaaggccaacactttggaaggccaagatgggagaatcacttgatcccaggagtttgagaccggcctgggcaacatggcaagaccccgtctctacaaaaaatacaaaaaaattaactgggcatgatgaaagactaggacacacagtcctagctactagagaagctgaggtgggaggatcacttaagcccaggaggtcaaggctacagggagctgtgatcgcgtcactgcactccagcctaggcaatggagtgagaccctatctcaaaaaaaaaaagcaaaaacagataacatgcatgtgatgatgtttcgtttagacaatcacctatttggtctggtcatgcattgtgcagtacatatgtgtggcacgtgtttatgacatgcaagcttgtgtcagtgggcttcaatgtccataggcggcggaggaaaggaggagctcgcctgcagtcaggatcctgaaaaggccacaggcttctccaccgcagggcttgctgcatgtgcctctccacaccaggcatgagggaacatggctggactgtgcagtgtttctcaaactgatctaaaaacagaacccttggccaggcgccgtggcccacacctgtaatcccagcactttgggaggccaaggcgggtggatcacctgaggtcaggagttcgagaccagcctggccaacatggcgaaaccctgtctgtactcaaaatacaaaatttagtcagaaatcgcttgaacccaggaggcagaggtggcagtgagccgaggtcacaacactgaactcctgcctgggtgacagagtgagactcggtcttgaaacaaaacgaaaacacagaaccctttttcccatgaatcgcctggagactcggactctgagaacgcactttggaccacattgccacagacagagcaggttggaaggaggctgggcccaggacacaacatgatcccactcggacatcagccacacctatagcctgggtagagcccggtgcccatgtgcctgggcccctccacctgacaaggtccctgcccccaggtgcgtggtgctgaagctggccagcttggggatgttctccgtctccctgggtcagaccatactgtgcattggcagagacaagagcagctgtgagtcctacggctacaacgtttgtgactatcaggtggctggcagcccggcggggcctgtccctcccttccttctccccaaaaagctcacctcaaactgtgcagagccctgttcctgcccctttagtcacctttgagagaagctgtgagcagggctgcctgcaccgccgcacacctccagggggcgccactgctgccacatggtgtagtgtggctgccctggctgtggggcttcctgctctaatcccatcctcaaggcctgggtttcaacctaacgattctatcagacaccaggcaaggcacctgcaccacagaaaccctcacaggaggctaagggaaggaagggccggggtggccgtgagtggtgacgggtccccttcccctgcaccccagtgctgggagaactccgtgggggaggagctgtacaagctgagtatcttcaacttcctcctcaccgtggccttcgccttcctggtcaccctgcctcggaggtgagccccggggtgacacctccagaagggcgggggtgccgcgagcatgttgggggtggccagtggctacagccaagggtgagcgggtccagtgtggagcccgggagtaagtggcaggctgtggccatgaccaatacagcccacgcatctgtctggagtggtgagtacctggaccctcccatccctgcaggctgctggtggaccggttctcaggccggttctgggcctggctggaacgggaggagttcctggtccccaagaatgtgctggacatcgtggcggggcagacggtcacctggatgggcctcttctactgccccctgctgcccctgctgaatagcgtcttcctcttcctcaccttctacatcaagaaggtgacggctcatggctggggggtatggggttcgtgcctctgggtggatgccttgagctgggctcgcctcctgctcctgctcctgcccccttccctgggtgtcagccccctggggtctgcataactcgctgactcctggttgctattgcttgcgcccccagtacaccctcctgaagaactccagggcatcttcgcggcccttccgtgcctccagctccaccttcttcttccagctagtgctcctcctgggcctgcttctggctgcagtgcccctgggctatgtggtcagcaggtgaggggaagaggaggggggcacccagaggctggcaggggcagtttctcacccaggaccctgatgccagccccacttggccatctctcgccagcatccactcctcctgggactgcggcctcttcaccaactactcagcaccctggcaagtggtcccggagctggtggcccttgggctcccgcccattggccagcgtgccctccactacctgggctcccacgccttcagcttccccctcctcatcatgctcaggttctcagggcagccggggccatgggaggggacacctggagggggaggtccttccttccatgggggtggtgagcctgtgcacccccaaccaggagccagacgcagaaagccaagggaagcaggggcctctgaaaagcaggaacctcctgggcccaccctctgggctgccatggggattgcaggatcactggggaagcaccgtgtctgggtggctgcagctgctgagctattggtattgctgtgccagaggggaggggatgaggggctctgcgaggaaggagaggagggtcccatcctcagatacagcagtgtgcagtgagaagaccccagtaccgcgtattgtagagattgaggtggggagagaggaagtcagggagaggcgcctgtggccccaggggcaactgaccacgaatccccttcccacccaagccttgtcctgacggtgtgcgtctcccagacccaggccaatgccagggccatccacaggctccggaagcagctggtgtgggtgagtgtcctcggggctggtgaggggacagcagcttcagtggaaacccttccctatgtgtggccgagggcctagaacacgtctgagcgggtcaggtgggttcttcccactggagggcgtggcctcaggctgagagtgaagacggggaaggggaggaagagaacagctcgggctcctgagaccaggagccagacctggtaagtacatgaccttaggggctgggcctttgcctgtaatcccaacgctttggaggcccaggcaggaggatcggatcacttgaagccatgagttaaaaccagcctgggcaacaaagcaagaccctggtctccaccaaaaataagtaattaattttttaaaaggagaatgtggccgggcgtggtgactcacgcctgtaatcccagcactttcagaggccgaggtgggtggatcacctgaggtcaggagttcaagaccagcctggccaaaatagcgaaaccccgtctctacttaaaaaaaaaaaaaaaaaaaaaaaaaccgggcacggtggttcgtgcctgtaatccagcactttgggaggccgaggtgagtggattgcctgaggtcaggggttcaagaccagcctggccaacatagtgaaaccccgtctgtactaaaaatacaaaaaattagctgggcgtgatggtgggcgcctgtaatcccagctactagggaggctgaggcaggagaatcgtttaaactcaggaggcggaggggcggaggttgcagtgagctgagaccgccccattgcactccagcctgggcaacaagagcaaaactccgtctcaaaaaaggaaaaaaggataacatggctgagtgcagtggctcacgccgaggcgtgaagagtgcttgagttcaggagtttgagaccaggctgagcaacatagcaagacctcgtctctactaaaaatcaaataaatgagctgggcgtggtggcgcgtgcctgtggtcacagctattccggaggctgaggtgggaagatcgcttgagcctgagaggtccaggctgcagtgggctgtggtcttgctactgcaatcctgcctgggcaacagggagacacccagtttccacaaaaaaaaaaaaaaattacgactttaggcttggggccaggggcttaatggagctgagggaggaacagtgacctggctaaggcgtggcctcagggtggggcctctaccgggggcgtggccttgggctgcttggggacggactcttagcgggcgtggtctagatctgcatggggtgggaccctagtggggcgtggtctcagggtgcgttgggggcggggcccttggaggtcgtggtctcgggcggggacgtggaaggagtggcatctggctgcgttgtggacgggactcctgagggcgtggtctagggctgcatcggggcgggaccctggtggggcgtggccctgggagggtgtggcctcgagcggggcgtggcctcgggcggggcgtggcctctggctactttgggtgcgggctggcccatgggccgcagagttgctgccgctgctgtcctcacacccgctcgtgggaagcagcgcctgtcgcaactcgccacttgttctcctcacagcaggttcaggagaagtggcacctggtggaggacctgtcgcgactgctgccggagccaggcccgagcgactctccgggccccaagtaccctgcctcccaagcttcgcgcccgcagtccttctgccccggatgcccatgccctggctccccgggccaccaggccccgcggccgggcccctccgtcgtggatgccgcgggactgcgttccccttgccctggacagcacggtgccccggcctccgcccgcagattccgcttccccagcggcgcggagctgtaacccctacccctgcctccccgaagcctccctggggccccttcaggcctccttactccatcttccagacccctggcgaccaccgcccctctcagtggctccagggcctccctcagaggtccccaaagatggacacacaaccccagcggcagcaggaaaaacatatgggaattttctttctatattttaatctcatccctttaaaatgtctattttttattgtgttttttataatatacataatctattagtatagtatctcttgaatgcgattttttctagaatgtgttctgctgatttgttttagagccatgagtgcaatttatacacatacatctattgggaatgctcagaagttgtttactgatggaagtgccttcagaagagtccgggaaccacttcctaaggaaggaaagagctggccacagttagagcaagcctgcctggggccctgctctgtgttccagctgcaaactgcctgcatcatcccttcctgttactcttccttcacctgagacagtcgaggccacagcgtcagccagggccagagctgggatttgaacccaggcactcgggctccagagccacactgccccagtgtggggcttagtggcggctcctggccctgactgaggggctgactgaagcctggtgagagcgtgctgggtcagcctctccctggcgggaatcctctccgtccagtcttctaacctagcagcctcacgtccacagagctgccttgtgaaactcagcagagccctggcttcctgcagagccgtgttctcccagcctgcttcatggctccctggttgagccaagcttgcggatccgtggggtgaaggtacccgcaccgcctgggccttagtggtatgtacgggcctgcatcgtgagcagcgggcgggggcccaggcaggtgaggcagctggccacaagggcagggcccggcccccctcccaaggctgtgtctgatattcttgagcctgttcgagtttccttttccaagcctcctgttctcccacccccacccctgccatgctgcagtgactaaatctgtggttctcatccttggagaacacctgagtagctgctacaagctggccacagcccagcgactctgatgtggttgggctgggtgtggccagcagccagggcatcgggacttttcgaagctcccaggtgactcaccggcagctggggatgagaactgtcaggagggaaggtcagaagtcccaggatgcacttgaaaagcctctagctccaccagtgaccagctcctggctggactcctggtctggactcagcatcagggaggctctggcctctcgccctcagggctgggggcttcttcacatggtcatcaaagacttggccagttccgcctctcccacggccgtccttgtctcacccagcatcacgacgcatcagttcaccaacaaacacgattcagtgctgctagtgctgggtcctgttctgggggctggtgatgaggccaagagggaaagagggagctctgtgttccatcgagggggcgacaagcctggaccagatgaaagtgactcatgttgttaattagcggcttagggccaaaggtggcccctggaccagtggcctcagcatcacctgggaaaaggttagaaatgaacattcccaggccccacctcagcctcctgaatcagagcatccctttggcaaaccatactgagaaacaaccacgtgcatcaccaagcgctgtgaagaaggcaagctttgagaccttgaaggaatcatcaaactctgggcctcggtgtgctcacccagggcgagacaaagacgccatgctcctccaagtggcctccaagattaaatgagcaatgactttttgtgtgtgtgttttttttttttttggggggtggggacagagtctctttctgttgcccaggctggagtgcagtggcaagatcttggctcactgcaacctctgcctcacaggttcaagccatcctcctgcctcagcctcccgagtagctgggactacaggtgcccgacaccacacccggctaattttttgtatttttagtagagatggggtttcaccatgttggccaggctggtctctaactcctgacctcaggtgatccacctgcctcgtccccccaaggtgctgagattacatgtgtaatccaccaaactcggcccatacagtgacttttgaagtgtccccatggggacctagaagtgcagtggcggctcctattacaatgtggtcactggcctgaaggagccaaatgggagatgatggggagtggacctggggccccctgtgatcaggaccacccaggaagacagcccagggggcctcgagcgatgggcttcttcccacaggagggctcttggagccagtgacaggcaggaccttggagaaagggaggctttggacaggagctgagggcagagagggggcctgagcaaagatgtggtaaaggggccacggtggaggctgggaagctggaaatctgaggcctctagactgggatgcagggcacacggggccagtgcgaagacggaaccggtgctctggcagcgggtgccgtgggctaggatgactttctgtagatgacggagctgggggccatgacctaacaaggggctctgccaggagcttagaagtcctgccgggcagggagggactctctggggcttattgcaatagatgcagtaaaggtctcaccaggtgggagagcccacctaggtggggtgtcccagccacccccagccttggggactcctgggccctcccctgcccagccctgagagactgccctgtctttctgtgcccctgcaaccccgctatcctggccagggcagcccagagcagagtcccacccgcaggacctttctggggacacagtatgggggaggaaacgcggagacgctgggaagagcatttgttacagaggacagtggcctctgcgagcaaaaatcacagaacatcagcctgaagcgggtggctagagagcttttgggggcccccaaactccacacagggtgacctgggggtgaccttggaggcgtggctgctgtgtcctggcttactctgcagtctggacagaggggcagcgcagcccagagaactggtcagccagaccggtgcacaagtgattcctgggggcggaggggtgcaggagagatgtttgggtcccccaaggcctggggaaaatggcccatgagtctgccttcgctctctgaccccagcttccccacagactgggaagaggaagagctcctcatgagctgccttaactcaaggttcccctgaacaccaccacgtggagaaaaagagtgagtttccctggcctccaggcaagaggctgccagcagcccagggcctgggcagccagccagctccccagtgacctctggctcccttcagtcttcagttcccttccccacccgccttcagcagaagtgagaacagactttgggaagggaagggagttttactaagaaactaagagaaaatgctcttgctccccagctgggagaaaccgaaaacagagaggccggtgggtgcacaggaggcagcctccatccccgggaccatgggtagcaaggtgcagaaacggactcatgccagctgggagagggggccaccgaggggtcaacagagccagtctgcagtgacctccaggacacctgcacctgcctccccaccatccttctggccactccctggtcagcagggccactccctcagaccagcttcccaacacacccaggcctccggtgcagcaagtgcctgggaaaggctgagaggagagctgggccggggctgtgagtggcctcccttggtcaggtgttcactcctggacggtgcccaggggcagagagtgtgattgaccggtcaggagccacaggtggcagcagctcccacaggaggcaatggtcacctggtggcaggggacatattcctgaaggaggcagccagaaaaggcattccccacacaaagtgtgggaaactgagccgggccagaaagtgacaggctggtccagcagccccaggctgagcttgggcacaaagccgggtgcagtggcccacagcggagctggcagggccccagcctcaatcccttgcgcccttacatctctctgtgttccggggaatgcctggccccagccctggcctcggggctctgggaggccctgctcacccccaccctccctgcatgtgcaggaggctctgtggctgaactctgcacacacactgcctgcgatgcagctgggtctgctgctggccaaggccagcactggggccagttccctggggaatgaccatccatgtgacctcccaccaccctcagtggggcctgagggacttctgaagggcggtgcttgggcacaccacgctccgggacccaggactccaggacccatcacactccaggaccaggggcctcgtcggtctggggtttcattctggggctgggtgcagccttggcctcccggctgtgaaccatcatgggtggggctgccttttctcagcccagcaggtccccagctgcttggaaaggccccagtgattacatgagggtcacctgggtcatgtaggacgggctcctcctctcaaaatgagaagactcacagccttcattccccttgccgcgtagcatggtgctcacgggctccagaagttacagcgtggacatctttttttttttttttttttttgagatggaatctcactctgttgcccaggctggagtgcagtagcgtgatcttggctcactgcaacctccgcctcctgggttcaagcaattctcctgcctcagtctcccgagtagctgggattacaggcgcacgccaccacgcccggctgatttttagtagagatggagtttcgccatgttggccaggctggtctcgaactcctgacctcaggtgatccgcccatccaggcctcccaaagtgctgggattacaggtgtgagccactgtgccccgcggagcatggacaccttctgcccaccacgtgagcccgggatcctgcggctcagaggtgactgctgagtctaagccctggtctggcttcaaggtccaaactccttccacttctctggggattgagggggagtttgctgtaccgggcctgccggggctctctgggccccgccctggtagctgaggccctggggtgctgcggcctccaggttatctccccactgcaggcacccacccagggagcatcccaggggcctcagggtgggggaggccaggaactaggaggttctcactgcccgagcagaggccctacacccaccgaggcatggggctccctgggctgttctgcttggccgtgctgggtgagtccaccagggacgtgatggtggggctgctgctggggccttgaggtcttgggctcaggtgggggtactgggagcacaggagagatgaggcctgaaggaagggcacctctggaaacatggacagagagggaaagatctgggcttgagtctcggaccagcccctaaacttgctgtatatgtggtccagggatttctgcaccattctgggctcactacttacccatctgcgaaatgggcggatgagaggcgatgttgtggggggaggggcgcaaaagagcttttgtgagtgatggtgccagctgagtcctggggcctcactaccaagaatcagcctgctcctccctcctggcttcagcaggtgggtctcgaggctgtctctggtctcccctccacaccaggccctctccttatcgcccttacctctcttacagctgccagcagcttctccaaggcacgggaggaaggtaagtggcatagcctgctgcagggagaagtcccccagctgggaccctggtgtcagaacccccatggtggagggcgcctcggctgggaagggagttactagtggggaggtgtgtgctggaggatggctggacagttctggaacactctcttcaccctgcagggccctaggagtgatggagatgggcaggccaagcaggccagtgtggggacctccggggcacacaggcagggaagttgctcagcttccagcctttggctgggctgtttggagggaagattccctgggcaggtgcatcctcatcactctgccccaggtccctgatcgggagcagaagccccccctgagaccctcacagctctgcccggtgggcgaggccccgtggagggctggggaattctggtggggcctgggaggttgggattctctgaccaggaggagggccgtgagaggatggtgaagttaaggctcccccaggggcctgacatacacgaggctgccttccttatagaggcaggtggggagtggagagtgtctgggacccagctgggtacaggaccagggaggaggggacgctggggaaggtccctgacagcccctagcctggcctgcttcctcatctttgcctgctccatctttctgcctgcactttcttgccccatccttccctcccctcccctcatgtccattaaggtgaggatggacagtcacctccctatattgtcccaactaacccttgccccttgttgctaggccatcaggttacagagcagggccttccccctctattttgctaaagggcaggtacagggtaatgatgacgccattctcacttgaatgaggcccaggttgaaccattatttcctcatttgctttaaaaacggatacattgttggtgtggctgctaaaaagagagcaggcagctggggctccgggaagtacctgtgcagggcagttccgcctccccctcttggctggctcccgacttctctgattcttgccaaccaagtcctgctaactaaactcctaagagactgactgataaatcatttattcattcaacaaatacttgagcacctgtttggttgcaggcacaattccaggccctgagaatgtggcaaggcactgaaacaaacccctcctgtatcttacattctagtgggggttggggggacagatgataataaaaataagaacattcagtggcttatgcctgttatcccgcactttgggaggctgtagccaaaggatcagttgagcccaggagttcaagaccagcctgaccgacacagtgagacccccatctcttaaaaaaaaaaaaagaaaatggctcgatctcagcttactgcaacctctgcctcctggggtcaagggattcttccacccagcctcctgagtagctgagattacagatatgcaccaccatgcccagctgatttttttgtataaagaaaatatttttttaaattagctgggcatggtgggcggtgcacctgttgtcccagctactcgggaggctgaggtgggaggattgcttgtccgggaagtgaggctgcagtgaaccgtaatcattaacagtgcacttcagcctgggtggcagagcaaaaaaagcacattctaaggtatgttagttagaatgttctagagaaaagcaagcagggtagaaggaaagggaacaccaggtaggtaggggaaggagggcagcatttgcaggggagggtggagtttgggaaggggccgtgcagcaaggacccgaaggagccgaccgagcaggaagtacctgggcagggaccctgtgtggccagaacacaggaagcaaggggcaaagggtattgaatgaggtcagaggcatggtgtggggttggccggggagggccctgtggggcgcagccataggaggtttggaggggaaaacgcaatctgatttacccttggccgaggtcatttggacactgtgtggatggagatcaaaggcaaaatccaagagagccattaggctactcgggatccagaggagagactgggcaatgcgggagaggcagggagatggggtggacatacattctggaggccagcagcagctgctggcagatggcatgggatgggatgggatgaggacagccatgaaagatggcgccaagccgggcgcagctgctcacgcctggaatcccagcactttgggaggccgaggcaggcagatcacctgaggtcaggagtttgagaccagcctgaccaatatggtgaaacccagtctctaatgaaaatacaaaaattagccgggcgtggtggcgcacgtctgtaatcccagctactcgggaggctgaggtgggagaatcccttgaacccggcaggcggaggttgcagtgaaccaagatcgcaccactgcactccagcctgggcaacagagagagactctgcctcaaaaaaaaaaaaaaaaaaaaaaaaaaaaaaggcgccagtccttggcccatctggaaggactggctaaataaagtgcagcctggagatggcatattatgcagctgaaacagcttcagtgggagtggaaagctgggtacacgtgaaggacctgagggatcaggatattcgaaagatgatctctgcgtaggttggctttttgttttgttccattttgcttttagacacagggtctcgttctgtcaccaaggctaaagtgcagtggcacaatcaccgctcactgcagccttaaccgccagggcttaatcaatcctcctgccccagcctcccaagtacctgggactacaggcacacgccatcacacccagctaatatttaatttaatttttttttttttttgagacggggtctcgctctgtcgcccaggctggagtgcagtggtgcaatctcggctcactgcaacctccacctcccaggttcaagggattctcctgcctcagcctcctcagtagctgggactacaggcacatgccaccacgcccagctaattttttgtacttttactagagatggggtttcaccatgttagccaggatggtgttgatcgcttgacctcgtgatctgcccaccttggcctcccaaagtgctgggattacaggcgagagccaccacgcccggaagctaatttttttttttttgagacagggtcttgccatgttgcccaggttggaatgcagtggcacaaactcggctcactgcaacctccatctcccaggctcaagccatcatcccgcctcagcctccagagtaactgggactataggcatgcaccaccatgcccagctaatttttgtattttttgtagagacagggttttgctgtgtttgccaggctcgtctcagactcaagctcaagtgatctgcccgcctcagcctcccaaagtgctgggattacaggcatgagccaccctgcctggcctaatatttcaaatttttttgtagcaattgggtcttcctattttgcccagctggtcttgaactcctggcctcaagcaatcctccctctttagcctcccgaagtgcgggggttacaggtatgagccactgtgccagtgtgttttgaaatccccaagaattctggcaagtatagcattaagcatggtaggaaccatggacaggcatcttcaaggagggataggtgttggtagataattgtaacccagaagacagagtggaatgtatctgaagacataactgctgtttagcaaggagaggggagaaaagtttagggaaggggaaatgtcaagaaggtgttgtccccctttgtcctagccccatgacatgaaggctgccgggatccacatcgcctgggacacctgaaggggtagacagggctctgggaaggagggatctggtttccattagatgtagaggatggagggtgttggttggaaggttgaggatacaggggattttgattccggctgagcctacactccaaacggcacagaggaggccggacacagtggctcacgtctgtaatcgagcactttgggaggccgaggtaggcggatcacttgaggtcaggagtttaagaccagcctggccaacatggtgaaaccccatttctattaaaaatacaaacattagccaggcttggtggcaggcgcctgtaatcccagctactcaggaggctgaggcaggagaatcgcttgaacccgggaggcggaggttgcagtgagcctggatggcaccactgcactgcagcctgggcgacagagtgagactctgtctcacaaaaacaaaaacaaacaaggccaggcacaatggctcaggcccataatcccagcactttgggaggccgaggtgggcggatcacctaaggtcagatgttccagaccagcctggccaacatgcggaaaccctgtctctactaaaaatgcaacaatcagccaggtatggtggtgtgtgcctgtaatcccagctactcaggaggctgaagcacaagaatcgcttgaaaccagaggcggaggttgcagtgagccgagatcgtgccactgcactccagcctgagcgacagagcaagactctgtctcaaaaaaaaaaaaaaaaaaaaaaagcaaaagacaaaagacaaccaaaaaacaacaccaacaaggaaggaaacacattctctgacagtgctggaagctgcattccaagactcagagtctgcagggctgggtcctcccaaggccccgcgggagcacctgctcctggctcctgtcctggtttctgggggttgcctccctcatgccattctcccggtgtgtgtctgagtctcctttcctcttctcctcaggccccaccctaatccagcatgaattactggagttaatatttaacatgagagagggggagccatctgtaaaaacctgatttccaaatatgttcccatgggcaggtcctgggagtcaccattggaacctatctttttggaggacataattcaacccttaacggacggcggcttattcaaagtcagatctcagagcccctccctaggtctaatgagttgcaacctccagggttgggactggaatttctaagcttcctgttgtcacagagaccagtctggagaggggtagcacaatctggaagggccttggagtcactcagagcaccagcaccatgtccgggcctggacatgagccctccacagtttccctgcagtgaccccgtgcccagcctgggcttggcttagcttcctgtcccgagggcagccctgtcgtcactttatcaaattttgagtgtgccatcccattatttaaatgctcttgcagagcagatgaattttatttatttatttatttatttacttacttattttgagacagggtctcgctctgtcacccaggctggagtgcagtggcgcgattacagctcactaaagcctcaacctcctgggctcaaacatcctcccatgtcagcctcctgagtagctggtgcataccaccatgcctgcttaatttttttttttttttttgagacagggtctcactttgtcacccaggctggagtgcagtggtgcaatcttggctcgctgcagcctccaccttccaggttcaagagatcctcccacctcaacctgctgagtagctgggattacaggcacatgccaccatgcccagctaatttttgtatttttagtagagatggggttttgccatgttggcccggctggtctcgaacttctgagttcaagtgattcacccaccttgacctcccaaagtgttaggattataggcatgagccactgcacccagccaattttttttttttttttcttagagacaggatcttgcttttttgcccaggctggtctcaaactcctgggctcaagggatccccctgcctaggcctccaaaagctctgggattataggagtgagccaccacacccagacaagcagaagaattttgaattaaatgataggccaggcgggtggctcacgcctataatcccagcactttggaaggctgaggtgggtggatcacttgaggtcaggagttgtagaccagcctggccaacatggtgaaaccccatctctattaaaaatacaaaaattagccaagcatggtggcatgcacctgtaataccagctactcaggagggtgaggcggagaatcacttgaaacagggaggcagaggttgcagtgaattgagatcgtgccgctgcactcaggcctgggagacaaagcaagagcctgtctcaaagaaaaaaataaattaaaaaaaaaatgatagaccatcctttattggcaggctgatccataaactaaataatcaaaaggaaaaaaccacacaagtcttgagaggatataaagtgagtgtgcggccggggacggtggctcaccctgtaatcccggcactctgggaggccgacgggggtggatctcctgagctcaggtgttcaagaccagcctggccaacatggagaaaccccagctctactaaaaatacaaaaaattagccgggcgtggtggtgcatgcctgtaatcccagctactcgggaggctgaggcaggagaatcacttgaacccaggaggcggaggttgcagtgaaccaagatcgtgtcactgcagtccagcctgggcgacagagcaagactccgtctcaaaaaaagaaaaaaaaaagtgaatgtccctggtacagtgtactttcaaaatggttcctgtctgtgaatttatgcaaatcaagcttctattaatgaagactgaaatggaaatgaagagagagaagtttttctttccatttttgtaagtcaagatcgtttcccttcgcaaagggaacaaaaagaaagggtgatcgcgtgtcagccctggacgcccacttccccacgtgaggcaggcttctggcccctgcgatagtttctggaccatgaagagaaggcctcttggccctgagggtcaaattgactaaagaatcagcagaggcatctgcaagaggatgccccagagggtgccttcacctccagatacaccttcactttcttcaaatcgaagatttttccatgaaagcctgtttagggaaaaaaaaaaagtattccttctttttttttttttttttttttttttgagacacagtctcactctgtcacccaggctggagtacagcagcacaatctccgctcactgcagcctccacctctcaggttcaagtgattctcatgcctcagcctcccgagtagctgggactacaggctcgagccaccacaccgggctaatttgtgtatttttaatagagacagggtttcaccatgttgcccaggctggctttgaactcctggcctcaaacgattcaccctctcagcctcccaaagtgctggaatgacaggcgtgagccactgtgccaggcctgaaaaaaaaaagtattcttccccatctaaaaaggagagtctggctgggtgcagtggctcatgcctgtaatcccagcactttgggaggccaaggtgggtggatcacctgaggtcaggagttcgaaaccagtctggccaacttggtaaaaccccatctctaccaaaaatacaaaattagacaggcgtggtggcatgtgtctgtaatcccagctactcgggcagctgaggcaggagaatcgcttgaacccgggaggcagaggttgcagtgagccaagattacaccactgccctgaggcctgggtgacagggtaagacttcgtctcaaaaaaataaataggtggggcgcagtggctcacacctgtaatcccagcactttggggggctgaggcaggtggatcacctgaggttgggcgtttgagaccagcctaaccaacatggagaaaccctgtctctactaaaaatacaaaattagccaggcatggtgacgcatgcctgtaatcccagctactcaggaggctaaggcagaagaattgcttgaacctgggaagcggaggttgtggtgagacgagatcacgacattgcactccagcctgggtaacagagtgagactccatctcaaaaataaataaataaataaataaatataaaaaggagagttatcatgaaattttcaaaggggcacagatgagaaaataattgttggtgtctgtgcagccctgggcaggggaagacatcctgattctagaaggctgctgccggttgtctagaccagagttgtcaacctcagcactcctgacatttgaggccagaccattcttcgcggtgggggctgactgtgcactgtaggatgctttgcgacatccttggcctctacccactaaatgtcagcagcaacccctatttttttttttttttttttgtggagatggggtcttgctgtgttgcccaagctagtccatctcccaatattgacaaccaaaaatgtccccagacccaaagttcccctggaggcaaaattgctcctggttgagagttactggtctagaatgaaacatgcttagtggtcacacactctagtctattccagttctctgctcaatcagcagtttcctcattgcagggtggtttccagagcagacatgcccagccgagcaaaggcaattcatgacgtcgatgatattcagatttcacagacccttctttctacccctcccccaagcactgccccaccacacagtattctttttttctttttaatttttctttcgattaaatagaggtggggtctcactatgttgcctaggctggtctggaacccctgggcttaagcaatcctcccgccttggcctcccaaagtgctggtattacgggcctgagctactgtgcccacctgatacacactattctttttcttttttttgagacggagtcttgctctgtcacccatgctagagtacaatggcaggatattggctcactgtaacctctgtctcctgggttcaagtgattctctggcctcagtcttctgagtagctgggattacaggcatgtaccaccatgcccagataatttttgtatttttagtagagacggggtttcttcatgttggccaggctggtcttgaactcctgacctcaggtgatccacctgcctcggcctcacagtgctgggaatacagatgtgagccaccatgcccggcctacacactattgttgaaatgcaaacaggtccccgccattggtataatacaaccctctccctcaaacccctattccagaaacatttttgtttaatcccaattgctgtcttaaagaatcagtaatggccaggcacagtggctcacacctgtaatcccagcactttgggaggcccaggcaggcggatcacctgaggtcaagagttcgagaccagcctggccaatgtggcgaaacccagtctctactaaaaatacaaaaattagctgggtgtggttgtgggcacctgtagtcccagctacttgggaggctgaggcaggagaatcacttgaacccgggaggcggaggttgtagtgagccaagattgcaccactgcactccagcctgggtgacagagcaaaactccttctccagaaaaaaaaaaaaaaaaaaaaaagaatcagcaaagacagcatcaggcccactaggaagatctcagagatgttttccacaatgaaattgactccaggatttgcttccaaaacagagaagtcactcgcaagcagaaagcagatacctggcgtaggtgggtgaaggcctgctggaatgcgctgacgggctggttttgatctgggtctagggagaagagcactttgggtgccgtgagcaggctggtctcctgcaggagcctcgcattcttcaaaagtccttttaattaattaatttttttagaaacagggtctcactctttcacccagtctggagtgcagtggcacgatcatagctcactgtagcttcagtctcccaagctcaagtaagtgatcctctcccctcaacctctggagtagctgggaccgcaggcgagcaccaccacacctggctaattttgtttatttatttatttttagagtagttctcactgtgttgttgaagctgatctccgaggctcaagcaatccgtccacctcagcctcccaaagtgctgggattccaggcgcagtggccaccgtgcctggacacattttgtttatatagaaaaatattctggaaagaaacagcctaaacccaggaggtagccctttttctaatattttctttttttagaggtgaaattcacataacaaaaagtcaaccatttaaaagtgataattggccgtgcacggtggctcacgcttgtaatgccagtactttgggaggccgaggtgggtggatgacttgaggccaggagttcaagaccagcctaaccaacatagtgaaactccgtctctactaaaaatacaaaacttaggccgggcacggtggctcacacctgtaatcccagcactttgggaggccgaggcgggcgcatcatgaggtctggagttcaagagcagcctggccaacacggtgaaaacccatctcaggtgcctgcgtactaagacctgtgttcagcagcggcggcggcggcggcggtgggctcggaggctcacagccagtggacagggttgagtcagtgagttcgtgcgagttggaatcgaagcctcttaaaatggcagatgatttggacttcgagacaggagatgcagggcctcagcgaccttcccaatgcagtcctcagcattgtgtaaaaatgactttgtaggccgggcgcggtggctcacgcccgtaatcccatcactttggaagaccgaggcaggcggatcacaaggtcaggagatcgaaaccatcctggctaaaatggtgaaaccccgtctctactaaaaatacaaaaattagccgggcgtggtggcgggcgcctgtagtcccagctactctggaggctgaggcaggagaatggcgtaaacccgggaggcagagcttgcggtgagccgagattgtgccactgcactccagcctgggcgacagagcgtgactctgtctcggaaaaaaaaaaaaaaaaaaaaaaaaaagaatggctttgtggtactcaaaggccggccacgtaagatcgtcgagatgtctacttcgatgactggcaagcacggccatgccaaggtccacctggttggtactgacatctttactgggaagaaatatggagatatctgcctgtcaactcataacatggatgtccccagcatcaaaaggaatgacttccagctgattggcatccaggatgggcacctatcactgctccaggacagcatggaggtgcgagaggactttcgtctgcatgagggagaccttggcaaagagactgagcagaagtacagctgtggagaagagatcctgatcatggtgctgtctgccatgaccgaggaggcagctgctgcaatcaaggctcccagggtggcggtggtggcagcagtgatcctcccaagaggccccctcccccaggctggcttggctctgccctggtcctaggctgctggactcctcctacacattttttttttttgagatggattctcgccctgtcgcccaggctggagtgcagtggcaccatctcggctcactacaagctccacctcccgggctcatgccattctcctgcctcagcctcccgagtagctgggactacgggcacccactgccacgcccggctaattttttgtattttttagtagagacggggtttcaccgtgttagccaggatggtctcgatctcctgacctcgtgatccacccgccttggcctcccaaagtgctgggattacaggcgtgagccaccgcgcccggcctcctcctacacaatttatttgatgttttattttggttttttgcatcacctcaatctgttgggggagcccctgcccttcacctagctcccttggccaggagcaagcgaagccgtggctttggggaagctgccctcctcttccccctcacactacagccctgctcggggagaagggggtgggtgctgcttgtggtttagtttttgtttgtttgtttttgttttttaattcaatctggaatcagaaagcagtggattctggcaaatggtccttgtgccctccccactcatccctggtctggtcccctgttacccatagccctgagcaccaccccaaaagactggggaccagccccgtcccctgcctgtgtctctccccaaaccccttcagatggggagggaagaggaggagaggggaggggacctgccccctcctcaggcatctgggagagccctgcccccacgggctttacccttccctgcaggctctctccccgacacatttgttaaaatcaaacctgaataaaactacaagtttaatatgatttaaaaaaaaaaggaaaagaaaaaaccccgtctctactaaaaatacaaaaattagctgggcatggtggtgcatgcctggagtccccactacatggtaggctgagacaggagaatcgcttgaacccaggaggtggaggttgcagtgagctgagatcgtgctactgcactccattctggacgacagagcaagactctgtctttaaataaataaataaaagtgggccgggcgcagtggctcacatctgtaatcccagcactttgggaggctgaggtggccagaccacctgaggtctcgagttcaagaccagtctggccaacatgatgaaaccccatgtctactaaaaatacaaaaattagccaggcgtagtggtgggtgcctgtaatcccagctactctggaggctgaggcacgagaatctcttgaacacgggaggcgacagtgcaagactctgtctcaaaaaaaaaaaaaagtgataattcagcagcatttagtgcatccatagtgttgctcaaccaccaccgctatctagttccgagagattttcatcaccccaaaaggaaaccccgtatctattaggcagttactccccatttccccctcccctgggccccagtaaccaccaatctgctttctgtctctgtgggttctcctgttctgaactttgcacacacatggaatcatgcaaccgttgccctttgcgtctgcctttttgtttagtggaatgttgttacggctcatccctgttgcagcctgcatctgtgctcatttctttctaaggctgagtaatattccttatatggatcaaccacattctatttacccattcgtccattgatagatatttgggccgtttccaccatttggctgtggtgaatcacgctgccatgagcgtgtgtgtacaggtatctgtttgagtccctgttttctattatttggtgtatgtctaggcctggaattgttgagtcatatggtaagtctgtttaactttttgaggaaccactaaatcagtattttctttctttcttttttctttactctgaggtctactggtttcacttatttatttgtaatttttaggttcaggggtacatgtgcaggtttgttatagaagtaaattgcagccgggcgcggtggctcacgcctgtaatcccagcactttgggaggccaaggcgggtggatcacgaggtcaggagtttgagaccagcctgaccaacatggtgaaaccctgtctctactaaaaatacaaaaattagccaggcgtggtggcacgcgcctgcagtcccagctattcgggaggctgaagcaggagaatcacttgaactcaggaggcgaaggttgtggtgagcagagatcgcgccactgcactccagcctgggtgacagagcaagactccatctaaaaaaaaaaaaaagagagagagagagagaacatgctaaacccagcatcctttttctttttttcctgagtctccctctgtcgcccaggctggagtgcagtggtgtgatctcggctcactgccacctgccacctccgccttcctggttcaagagattctcctgccttagcttcccgagtagcagggattacaggtgggcaccaccacgcccggctaatttttgtattttagtagagacagactttcaccatgttggctacactggttttgaactcctgacctcaagtgatccgtccacctggacctcccaaacactgggattacaggtgtttgccaccgagcctggccaaaccagtaccttcttaaggtgcttgatcaatgtcggtttctttcttcctccttggaccttttcatctcccagaaattacccctgtggtctccattgcctacaaagtcctggaagttttccccaaaggccgctgggtgctcataacctgctgtgcaccccagccaccaccgcccatcacctattccctctgtggaaccaagaacatcaaggtggccaagaaggtggtgaagacccacgagccggcctccttcaacctcaacgtcacactcaagtccagtccagacctgctcacctacttctgctgggcgtcctccacctcaggtgcccatgtggacagtgccaggctacagatgcactgggagctgtggtccagtgagtgcggtggggggcacagggctgaggaggcaggtggggtgcagatcaatggggagctctgggagtggggattgtgaaccttgctggggttagagagagccagggtgtgagggtgtggacaaggacaggctgccacctccaaggccattctcagtcccttggggcctttaatcaggacttgctgtccctggctggggccctgagggcacagtctcctggcaggggcctgagggcacagagggaaagagcccgatggtggcagaaatgactgggccccagttgtcagctcggacctcaaggtgataaactaggcacgtttgtctgggcgcaaatcccagcactgtgggaggccgagacaggctgatcgcttgagcccaggagttcgataccagcctgggcaacatggcgaaaccctgttcctactaaaattacaaagattagctgggcgtggcggggtgcacctgtagttccagctactcaggaggctgaggcaggagaatcgcttgaacccgggaggcagaggttgcagtgagccaagattgcgccactgtactccagcctgggtaacagagcgtctccaaaaaaaaaaaaaagaaaaagaaacgaaaaaaaagttaggcacgttttgtgcattacttcgcttgatcttcacagcagtgtcaggggtggggtctgagcctctgggtctatagctatgtaagctaaaactctggggagttaagaaagttgccccaggggctgggtgtggtggctcacgcctataagcccagcattttgggaggcccaggcgggaggatcacttgagctcaggagtttgagaccagtctggccaacgtagtgaaaccccatctctactaaaaatacaaaaattagctgggtgtggtggtgggcacctataatcccagctactggggaggctgaggcaagagagtcacttgaacccaggagatgaaggttgcagtgagccaaggtcgtgctgctgcatgccagcctgggtgacagcgtaagactatctcaaaaaaaaaaaaaaaaaaaagtcgccccaggccacatggctggcaagtggccaaggctgctttcaaaccccactctgtccagctccaaaccctgccttcttcctgtttccatcctgatagtaactcaggtaaccttcttggtgggagctatggggtatgggaaccaggaagtgttgcccgacttagggtgggacaaggaatcgccccattcatcctttggcccgcaccctaagaacaccaggaaaagacagcctaggggagatgagcccaggatctgcagcccaacgggtccaaggttcaaatccctacacttactggctggggtcttgaacaactcattggaccgctgagcttcaactgctttatctgcaaaaggaaaataataacagaggccagtgaggtggctcacacctgtattcccagcattttgggaggccaaggtgggagaatcctttgaagccaagagtttgagaccagcctggaccacagagtgatactctgtgtctgcaaaaaaattattttctttttttgagatggagtcttgctctgtcgcccaggctgaactgcagtggcacgatctcggctcaccgcaacctccgcctcccagattcaagcgattctcctgcctcagcctcccgagtagctgggactacaggcccttgcccccatgccggctaatttttgtatttttagtagacacggggtttcaccatgttggccaggctggtctcaaactcctgacctcaagtgatccacctacctaggcctcctaaagtgctgggattataggcgtgagccactgcacccagccaatagcaattttttaaaaaattaatcaggtatggtggtgcatgcctgtcgtcccagctacttgggtggctgaggtgggaggatcatttgagcccaggagttggaggctgcagtgagcggtgatcacaccattgcactctagcctgggcaacagagaccctgtctctaaaataataataggtcctacttcaggggacctattaaatgaaagccttttagtaggtggcaagtgtggtggtgattactcatcagtaagaatgtctagagcattaggctcaaggcctgggggattctagaatcttctacatgacagtttttgtcctgaagtagcttgcctttcagtaaaaaagacgagactgaatgatagagttgccagataaattttacataggacatacgtatagtaaaagattattcattgtttatctgaaatgaaaatttaactgtatttttatttgctaagtctggcaatctgaaatacgctacacaagaataaaaccaggccgggcacggtggctcacgcctaaaatcccagcactttgggaggctgaggcagaagattgcttgagcccaggagtttgagaccagcctggccaacatggtgaaaccccatctctgcaaaaaatacaaaaattagctggatgtggtggtgcacacctgtagtcctagctactcgggaggctgagatgggagaattgctcgagctggggaggcggaggttgcagtgagcctagatcgcgccattgcactccagcctgggcgacagagcaagaccctgtctcaaaataaagtaagaataagataaaaaccaaatgtgaaattgtgtggtacacacggcaggtagggcagcagcccagacacaaggtggagggcaaactctagaaggcggcctggaggaggcggcagccacagctaagctcattaggcattttgtaatgaggagaacttactgaggaggaggggtttaaaaccgctcagccatgcctgtgctaccttctcccaccctgccagagccagtgtctgagctgcgggccaacttcactctgcaggacagaggggcaggccccagggtggagatgatctgccaggcgtcctcgggcagcccacctatcaccaacagcctgatcgggaaggatgggcaggtccacctgcagcagagaccatgccacaggcagcctgccaacttctccttcctgccgagccagacatcggactggttctggtgccaggctgcaaacaacgccaatgtccagcacagcgccctcacagtggtgcccccaggtgagagggcccttggatttccagaggggcagctggcgcttctgtgccgggagggtgctagtgtccaagacacaggtcgatgggaagtgggacagctctacccggccactgctgagagcagagagggcacaggaggcaaccatgcccaccctggcccctgcctaaaggaagcccaacccagctgcctccgccccctcccaggagggttgcccagggcacccaccatcgtgctggttggcagccttgcctccactgcggccatcacctccaggatgctgggctggaccacgtgggccaggtaggaaatgggtgctcgatgcagggaggagggagagctgctgatggcctgagaggtccaaccgggccctggctgcagagctcaggtggtggggcttgcagggcagggctgtggccagggcaaagagcggccatcaccgcttacgcatgactcgaaggtgtttatgaggacctactgtgtgccatgtgcctactgaggcttacacattcaaggcgttatcggaccctgaccagtgctcccaggtgccctgtaacacagtctgctggcctctgggagggcagtctcctaagttctttatggggtctgagcagggattgcagggatgatgcctccaggagaccaaggtggaccaggagctcctgccttctgtgagaaccaccttgggcagtctttccgaggtggtggcaagagcctggggcccagcctcccagggtcccctctccaaggccatggctttactaacatgtaaagtgaccaaggcctttgtagtgtctgagtgcaggcaccacaggcctgtgtgctctgcctgtctggctttggtggtggccagccctgcctctgtgaactcatctctctttgtttgggagacactgccgtgtcctggttctcatcctctgcccgtggcccaggcccttacgtggctctaccaggagtctgtccttggcactttcccatctcacttctaccaagtctgttctttccagaagccagactcgtgggtgagccatgtcacctcgccgagcctcagtttttccttctgtaaaatggggtacagccttcatttagtggggtgagtaagcctcatgtctcttctgctggggcactgatgtgcttggcaccataaaactcccagaggcaggccgggcacagtggctcatgcctggaatctcagcactttgggaggctgaggcaggcgaatcacctgaggtcaggagttcgagaccagcctggccaacatgaagaaaccccgtctctactaaaaatacaaaattagccgggcgtggtggtgcgcacctgtagtcccagctactcgggagactgaggcaggagaatcacttgaacccaggaggtggaggttgcagtgagccgagatcgtgccattgcactccagcctggacaaaaagagcaaaactccgtctcaaaacaaacgaacactctcagacgcctcgggaggggatggctgggaggtgagcctgcctgacttgagtctccactgctttgtcaaggtggtgaccagaagatggaggactggcagggtcccctggagagccccatccttgccttgccgctctacaggagcacccgccgtctgagtgaagaggagtttggggggttcaggatagggaatggggaggtcagaggacgcaaagcagcagccatgtagaatgaaccgtccagagagccaagcacggcagaggactgcaggccatcagcgtgcactgttcgtatttggagttcatgcaaaatgagtgtgttttagctgctcttgccacaaaaaaaaaaaaaaaaaaaaaagggtaactatgagagatggtggatatgttaacttgcttcgctataggaacctttgtgctatctatattatctatatgaatcccatcatatcaggttgtctaccttaaatatacacaaaaacatttatttaaaaaaaagaaaaaagcctgccagctgggattcttggagtgctggtggccttcagcaaacacagacactgttggtgtgagggcttcaggagggtcacagaaataagggggtctgtgtggccctgtcctcgcctctcaggtgctgtcacatctctctgggtgtagggagagggaggggggcacactgcgaaaaggcccagcccctcccccccacctgctcccctcttccctggagaggcaccccacctcctggtggcccagtcctatggttcaactctcacgtggtccagctcacctgggttgactgtgagccccacctggcacacctgctgttgttaatctgcacctgcaactagcaaaggggggtctggaattcttccgggttcagtcagcctgtgatcccacacctctgtctgtacaacctccgctccccactccaacacacacagagcctgccccagcctaccctgcaccagaccctctgtaccggtttttcttgggatggaggtagagagggacggaggcgagagggggctgaactggaactggattaaactttgccatctgcctgtcgccctgaaaacttcatttctgtttgcatgccatatatatatttttttatatgtggtcttttctttttttttttttttgagatggagtctcgctctgtcgcaatggtgcaatctcggctcactgcaacctccgcctcccgggttcaagcgattctcctgcctcagcctgccaagtagctgggactacaggcacgcgccaccatgcccagctaatttttgtatttttagtggagacggggtttcaccatgttggccagggtgttctcgatctcctgacctcgtgatccgcctgcttcagcctcccaaagtgctggaattacaggcgtgagccaccacgcccggccgatatgtggtcttactctgtcacccaggctggggtgcaaaggcgtgatcttggttcactgcaaactccgcctcctgggctcagacaattctcccacctcagcctctggaatagctgggactgctagtagctgccaccacgcctcgctaactttcgtttttggttttgtttgtttgtttgtttgtttgtttgttttgtttgttttgagatggactcttgctctgttgcccaggctggggtgtagtggctcgatctcagcacacggccacctctgcctaccggtttcaagcaattatcctgcctcagcctcccaagtagctgggattacaggcgcttaccacaacgcccagctaatttttttgttgttgttgtatttttagtagagacggggtttcaccatgttggccaggctggtctcaaactcctgacctcaggtgatccaaccgcctcggcctcccaaagtgctgggattacaggtgtgagccactgcgcccggccttgcacaccatctttttttttttttttttttttttttttgacacagagttttgctcttgttgcccaggctggagtgcaatggcacaatctcggctcaccgcaacctccacctcccaggttcaagcgattctcctgcctcagcctcccgagtagctgggattacaggcatgcaccaccacaccaggctaatttttgtatttttagtagagacggggtttctccatgttggtcaggctggtctcgaactcctgacctcaggtgatccaaccgcctcggcctcccaaagtgctgggattacaggtgtgagccaccgctcccggccttgcacaccatcttaagtgtgacgccacactgcccttcacagccttggggctctgcccagaccaggaggaatggggagggggtctttgaccctaccccaggcttagccccagagaggaggaaagagtggcaggccaggcagggaggggctccagggtgtggcctgggtttttcagtgggatgggggaggggttgcttatgagcctgggtgggttcttggtaggtggtgggcttcctagaggaggcggtgggagggcaggggcaaagagggtgagcggtcctcagttcgtccgtcttcccgggggactctctgaccctttctggtccgtgctgcggccggcgtggcccggagactagcccctcaaccccgaggtggggtggacccgggtgctccgcggccacagcccctccccgcctctagaagcgcagtcccgcggctcgcccgccgctcgcgagggccgcactttgccctcggtccctagcggcgcctggccacgcccccggcgggtggagtcgggcggggcgccgggcaggttcctctgcgttccgcggcggcggcagcggcggcgacggcgacatggagagcggggcctacggcgcggccaaggcgggcggctccttcgacctgcggcgcttcctgacgcagccgcaggtggtggcgcgcgccgtgtgcttggtgagcccggggagggcgggccgagggcaccctggggaccccctctccgtcgccaggcccggcggggcccctagcccacgagcgcgacaggtggcggcggccgcgtccggggcctggcggcgagcggggccggcgtccagcgtcccgggccccgccttcccgccctccacagtctgtcccgctgtcccctcccggtcccgggtcccgccacccaccccacccccagcctcgcgccccgacgcggggtgtccggatctccgcagggagcgggcccctgcctcgctggcagtgggaggagtttgggggcggctcccggacaggtggcccgcacgccgcgactcccagattggggagttcaccgggacggggttttccgaagccacgtggggtaagggagggggcggggggcgacccaacgcccggaaacagggtgtccttcccactcggggcaggccacgggtccgccttcccacccgaagttgagggaccccaagatgtaccccctccctgtaaggtgggcaatacctccaaaaccaggttttgtgtgtgtgtgtgtgtggcggggagggggcctgttcttggacagccagccctgaaagctggagggggtggcatgagggggcaggcagaggtgggcctgctgtgcccagaccatgcctgggcctggagcttctgaggtcctccagggcgcccacaccagctcccagccaggctgtgggatctgatcgcctctgtcctgggctgtgtccaagaatcaggtgcccagtgggtcgggatggcagtgccaggagtcctggatgggcaccctgctcccatcatcccggagatccggcttcatctccatctgggggcggggcctgtgactgccagctccagagccctatggagagctccctgggacaacagggcaggactggcaggggagagtcctggggccatcccagagggatcctgatgctcacagacctgtcccacacctgctgaggtggagcaggcgtgggtggtggccttcaagtttagggaggtggtatggggctcttcccaaggggctggagctcccctacatccaccctgggtcctccaggtgtctgagttcagagctgtatccacaggcctgagttagtccccttgtagtgccctgtgcatgcagggccctctgtggggtgggagacagactgggagggaccaggatgccacagaggctgcaagtccttgtgtggagacagctggccaggctgaaccagggagggttccaggggttccaggaggtgaagacacaggggcgccagcatggccttcccaagagggcctgtccaccttcaccaaggtgttcaggcagaggctgggtgctgtagaagtgacttgggctgaaggtgacgggggatgggtagtctttgtgacttggcctgtcttggttaaacctctttcaaggtgaggttgggctggggatggaaggactgcccttcatccatcaggtacctaagcagaatgattcctgcagcaggccgatggggcaggagcagcccctgcctaggaggtccctgcccattccccacccctccccggtccaggattcccaggggcaggccccctggtgcctgcagattctcatcctggggtgcatcaggaagcactttgctcatcagctcacctccacaagtttggaggggctaagatgtcagcctccaaaaggggacagcaggctgggcgaggtggctcatgcctgtaatcccagcactttgggaggccgaggagggtggatcacctgaggtcaggagttccagaccagcctggccaacatggtgaaaccctatctctactaaaaatacgggtgtggtggagggcacctgtaatcccagctactagggaggctgaggcagaattgcttgaacccaggaggcagaggatgcagtgagccgagatcgcactattgcactccagcctgggcaacaagagcaagactccatctcaaacaacaacaaaaacccaaaaggggacagcagtagtgggagaggccagcatctgtacaccccatcagggtccccgctgtgtgtgcccctcaggcggccaccagccctaccaggtcctcccctcccggcaggtcttcgccttgatcgtgttctcctgcatctatggtgagggctacagcaatgcccacgagtctaagcagatgtactgcgtgttcaaccgcaacgaggatgcctgccgctatggcagtgccatcggggtgctggccttcctggcctcggccttcttcttggtggtcgacgcgtatttcccccagatcagcaacgccactgaccgcaagtacctggtcattggtgacctgctcttctcaggtatctgcctgtggcacctccatttgatcttgggggaggcattaactctagggttccgcagctgggagggtctcggcctctctgggaggggcagggagcagctcactcctccagggcatttttaggaaagggttttcagctagtgtttttccgtgcttgaatggcaccagccctgcctggggtagctagaagctgagtggacctgcagcacacccgagcagatgggctttgcctctgccccttttgtcccctaggctgtctgctgtggcccaccctgccaaggcccgagtgtgggggactttggaggtggctcccggcccggcttccaagtcctcccctccatagtgtggaggctcccccgggaggtccctgccctacctgcccgcgtcccctcccagagtcctggaaagcccctccctttccatggaactgacgcttcacccgtcctcccccagctctctggaccttcctgtggtttgttggtttctgcttcctcaccaaccagtgggcagtcaccaacccgaaggacgtgctggtgggggccgactctgtgagggcagccatcaccttcagcttcttttccatcttctcctgggtaggatggccaggggccggttcttgggtcaagggtggtggagggtggggtcccccacccacctgtaccctgctgtgctccccctgcagggtgtgctggcctccctggcctaccagcgctacaaggctggcgtggacgacttcatccagaattacgttgaccccactccggaccccaacactgcctacgcctcctacccaggtgcatctgtggacaactaccaacagccacccttcacccagaacgcggagaccaccgagggctaccagccgccccctgtgtactgagcggcggttagcgtgggaagggggacagagagggccctcccctctgccctggactttcccatgagcctcctggaactgccagcccctctctttcacctgttccatcctgtgcagctgacacacagctaaggagcctcatagcctggcgggggctggcagagccacaccccaagtgcctgtgcccagagggcttcagtcagccgctcactcctccagggcacttttaggaaagggtttttagctagtgtttttcctcgcttttaatgacctcagccccgcctgcagtggctagaagccagcaggtgcccatgtgctactgacaagtgcctcagcttccccccggcccgggtcaggccgtgggagccgctattatctgcgttctctgccaaagactcgtgggggccatcacacctgccctgtgcagcggagccggaccaggctcttgtgtcctcactcaggtttgcttcccctgtgcccactgctgtatgatctgggggccaccaccctgtgccggtggcctctgggctgcctcccgtggtgtgagggcggggctggtgctcatggcacttcctccttgctcccacccctggcagcagggaagggctttgcctgacaacacccagctttatgtaaatattctgcagttgttacttaggaagcctggggagggcaggggtgccccatggctcccagactctgtctgtgccgagtgtattataaaatcgtgggggagatgcccggcctgggatgctgtttggagacggaataaatgttttctcattcagtctccagtcattggttgagccacagcctaggggttggaggaagactccactctgggtacacccttaggggctggctttatggaacttgtagtttgaacaaggcagtggcaatccgccccctccagcctgcctggctggcccccttccctctgtctggggtcgcattccgcacaagcctttcatcaacatcttaaaatagtaactgtgctcagcttgtaaacaagatgatttttctggcctgcagtgccagggtcctgctgctcccttcctagagtgggggtgggggtacctgggagttgtcggtgaatgcccctttcttgcactgaataggggtaccataggtaagaccaggtttctaccttcctccagggtcagcacctctggagccttcctgggacacggccttggccgtccagcccacccctcggagataaggcccatctctggaagaggtcaaggccctaaagcaacttctggcttcttcttttgagcaatgacagagggagctgtcatcggcaagtcccgattgtttaaaaatccccagtacgaactaacagggcactgctcccagcctcacccgatggctttggcttgggacacatcactagcgaaggggagagggaggctggggaggccctgggagtggtgaccctgcctgcacaggacacaccttaccccagcgatgcttgcccccaagtgagctgccaacagcccatctctgaggcacagctgagagatgtcttgactcctgaattaccaagagtttgtttcacaaacaaaacctgacctcacaggcccagcgggcaggacagtgcctcttccttccaactgggccccgggctcctctgtacacccatttttgtcctgacactggcccagacaggaaggcagatgatgttctgcttaggacacaccccatgatcatttctcagttcaagggttgtggttaagagatcagtattactacagaaagatctgggggccaggtgcagtgcctcacgcctgtaatcccagcactttgggaggccgaggcaggtggatcacttgaggccaggagttcgagaccagcctggccaacatggtgaaaactcgtctctactaaaaatacaaaaattagccaggtgtggtggtacacgcctgtaatatcggctacttgggaggctgacgggggagaatcacttcaactggggaagcagaggctgcagtgagcagggattgcgtcactgcactccagcctgggcgacagagaccctgtctcaaaacaaaagaaaaaaagatctggaagaaaatccccacccaaatcaagttggagctgtccatgagacccagggaaacccaggtgaaagagaaatgtgcgtccaccaaccagtgaattttcaattagttaatttcataagctacagcagaggcgtggaccctgccctctccacacttgaagagataagcccctgggatccaagtcccagcaaggttggtgccacccatcttggtgaaagatgctgttgttcctgtggaaaccatcaccagaggtaggaagggctttgagcccaaaaggaaacaagagggcgtgaatccaggccatcctcaggggagggtgggagcccatcccaggcagagaggcctaagcctcagtgtgggccaaggctcaaaggtgctggcacaggcttcccagggagaacagaaactcagcagtgaaagccgcagaggggaagaagcaggctgatgtcaacagcgtggggctctgtccctcaccccaaggagagggagtgtgccagatcccaggccaccaagcggggccagctccagcctgggcgatcgtcccagcagctgagagggaagctttaagcagaccagtgggtaggagaggagggagcatgcggcaggtggggcagccacacaaaggagagttcccagaaggccaaggtgtggtcaccctccacgcctcccgacttcctcctggagtggctgggcagcatgcagggcagcgtccagtaggcggcagtggcaggaagggagcgggcggccctcgcaggtccctcagttggcagggctgcattgcagaatctgctgtggggcaaagagcttcctggcagccacggcttcccctggctttcctggcactgggcagttctctttgttgtccggcccggcaggctggcctgaggccttcttgaagtagcagagccgacacacggagtggtacttgtctgctcccccaatcacctcgacctggccgcagggacaggggatgggtgaagggccaggacaggaaggaggcagagccatacccccaccccgccggcctgcagggaaggcaggtggagctacctccttctctgtgccgagcctcttggtataggcggcttcccggaagcactccatgcacaccgccgtcagcttcaccacgctctcggccagcggcaccaggttcaggatggccccaaatggctgcgctcccatggaaagacagagggcgctcagccaccttaccaggtgggtttttcttttaaaccctctgattcacaagcactgaagccaggagagtttgctctgaccttagtccttcccccaacccccagagcaccatgcccggctctgtccctttgccaattcaaagcacctgccgcaacagatggcacgcagtctgcacagaccatggagtcccttggctcagccaaggcctgagcagctcggccgtaaccctgtggtggctgagccctggtcacccagagctggtgtctctgtgcccatccagaagcctcttgccctcctcaatcccagctccagacctggatcagacgccttaccttcctctggaaggtcccatccagtgcagccacaattacggtcttcccggcgttggccatggcctcgcagaactccacgatgtcagggaactggaaagggcacgtggagaaagagtgtgagagcttccaccccagcagcagctccctggagccccagcgaagacgctgccagatctgacaactccggccatttggcccggagtaactcttaattctcccacgaggctccccaggccgggggactgtgtccacccgcacgccccccagcagacgacaggtacatccacaactgcgcagccccttccccctgcagccagcttccctccgagtccaggtacccaggactcagcaccggacttccacaccagctgtgctgtttaacactgcagtggccaaaggcctgctgccttgggctcggacaccactcttcgctggacccattatctgtgtgaccttggcaatgaattaacgtctctgaacctgtttccttttccttaagagcaaggaaggtcctgttgtttaaggatggaaggccctaagttatatacatgctcttcggtgaataggtgggcgctttgtgctcttgcctcccccgttttaaacgggtaatgtgccttgagaaggggcgggggtcctactggccatttacagagcaggatgacacagcacagccttctaaattcaggacctgcacagagcacatttactgtgtaaagcaaacttcactttggcccagggagaagctgaaactctggcaagtgctctggtgattctcatcaatcaatcatatcactcttagctggttgagttcatatgtccagactggcctttgggttgggtgaagcagggatgtccttgtccttgggtgcagggtctctctcccagggccactcaggctttctcagcccaggtactgaggtttgaggttattgagacgtgagggcttagcaaggtgaggactaaggggtggctcgaaaaattccagtgagatccaagcaaagcccaacgtgactgattgcgctcagctgactgcaggggtctctggagaaggaaacccagagactccagcacgccagggcccctccccaccatgcactcgttccctctttttctctgaggactcatgacatgtcacgaaaatgcagctcccagcctgcaaggagctgtgggccggcacaccacctgcgccaggggcgcgccccctggagggctgacgctgccatggctgccatttgaggccggatctcgctgtgtcctgtgcagtgtagggtgttgggctgcgtccctcgcccccacccattagatagatgccaggaacacacctcccaccccccagctgcgacaaaattgtttctagttgttgtgagatgtcccctgggtgggaatggagaggggaagaaccctcctgagttgagaaccttgctccttcacccgccacatgagggtagaaggcagaccccagactctcctgcatcagggtttcaggatgaaggtcctcagcccccactcactccacctcttgaccaacctcaggctgaggtccatagtcaaagagcttggttcttgcacccggcacttccccacccgtccagcacttccagtgatctgcctgcctcagcctcccaaagtgctgggatcacagacgtgagcctctgtgccagaccctaacttttcctagattaaacttattatagattgcatgtctctaacctgaaaggctccaaaatctgaaactttttgagcgcccaccacaagtggaaaattccacacctgacctcatgggacaggtcacagtcaaaaactgtggctcacgtccaaattactaaatacataaaattactctcaggctatgtgcctaagatgtctataaaacataaatggattttgtgtttacacttggggctcattcccaaggtctcattatattatgaacatgcaaatattcgaaaacctgaaatccgaaacacttctggtcccaggcatttaggttaaggaatactcaacctgtattacttgtgtagtagaacagaaaacacaaaaaggtctattttttttttttttttgagacggagtctcgctctgtcgcccaggctggagtgcagtggcgtgatctcagctcactgcaagctccgcctcctgggttcacgccactctcctgcctcagcctcccgagtagctgagactacaggtgcccgccaccacgcctggctaatttttttgtattttcagtagagacggggtttcaccgtgttagccaggatggtctcgatctcctgacctcgtgattcacccacctcggcctcccaaagtgttgggattacaggcatgagccactgcgcctggctttgtctattttttttgagacagagtctcgctctgtcatccaggctggagtgcagtggcataatcttggctcactgcaacctctgcctcccaggttcaagcaattcttgtgcctctgcctcccaagtagctggaattacaggtgtgtgccaccacgcttggctaatttttgtatttttagtagagatggggtttcaccatgttggcctggctggtctcaaactcctgacctcaagtgatccgcccgcctaggccttccaaagtgctgggattacaggtgtgagccaccgtgcccagccagaaaaaaagtttaaaaaaataaatcagagctcctactattgccaagcgaccctgcaagcccaccacacactgtgcagctgttgatgcaagggtgcccacccaccaccagcatctgaagcacagcacccccagctaggagcttcaggttttccagagatttccaggtgagtctctcttggatgccaacagtttctacagagcagtgtgagcacctgtgtgtctcgcccggggtacaaagaagcacagaagcttctgacccagggccttcctcaggatggcacggtggctactctgtgaaaggctttccctgctgacccagaaaacgggaacaaggcaggttcggctgggcttcatccactgtccacgtagacaatgaaggagcgaaggacagtccttctgctgggtcccatgctaggaacccctctcctcgatctagaactgcttgcaatgggaagaccctgaacttcttttgttttgttttgttttgagactgagttttgctcttgttgttgcccaggcttggagtgcaatggggcgatcttggctcactgcaaccttcgcctaccgggttcaagcgattctcctgcctcagcctcccaagtagctgggattacaggcatgcgccaccacgcctggctaatttttgtatttttagtagagacggagtttctccatgttggtcaggctggtgacccggaacttcttgaagagaacaagggcacacagaggccagggcagaatgctgatgtctgggtagggtgtaataaatactcactgaatgaactcaagttttacttgctggccagggaggaagtagaccgagaaatccctcctataggctgaacaggggacaggacttcatacgctggctcctgactcagggcatttggatgtcgaggaaggagaagggaaaggtttctgcctcgggggtctgggtcagcctctgtcaacaaggtttacgcagagccaggagaacagagctattgaacaactcacagcggcaggtctgaaggagggagagccttgccaaagctgaagcttccttgttctgagagggccatgtccccaaagctgatgcaaaatccctggatgcattctgaggccacagtttgggagcaaaagagaacagctgcagccctattcccagcctgggctcactttctcgccaggagtccctcaagcacggggcagcaacaacgacgtctccacgtacgcagaggcatgggggtgctcaggggcgcacctctgaaggtcagaaacggaatggccatacccaagcggggaggagatgccagctgccgggtggtcgggaacccagagcggacactggcagcctcaactccacagggcagatgccccgcacaggggaagggacccgtcagcctccccacgggaatggaatttgcagctgtgactcatacagaatgttgggcaagaacagaaccaggaaggcaggactggccttttgaggggacaggccctgtgacgtccgggcagggtattcaggccagagcggcctggctctgtgctgggaggcagggcgggtagagacctcgaagcactcaccaaaccaactcatttattcttcctccagggtatagaactagactaagtgtggccaggcgtggtggctcacgcctgtaatcccagcactttgggaggctgaggcaggcagatcacctgaggttaggagttccagaccagcccggtcaacatgatgaaaccccgtctctactaaaaatacaaaaggttagctgggcatggtggcagaagcctgtaatcccagctactcaggaggctgaggcgggagaatcacttgaacctgggagatggaggttatagtgagccgagactgcgccactgcactccagcctgggccacagagcaagactgtttttaaaaacaaacaaaaaacgaactggactaagtatactaaacgtataggtggccctgtgcccaggttctagtctttgaaagatcagcagaagtgacgtttgcagcttctggtcaggcccatgaaaacctcacacccaggggctccgccacgtctcttcccctccgtgtctgtatacagccagccagggcgacctaagccgcctcgtgggcggcctccccatcaaccggcctggaaccacgtagggggtctgtgagcgagaaataaattcctgttatgtttatatcaaaccaccacattgtgtacttcgaggcaaccctaaaagtacctaagaggtcaagtctgctaaaccccttggagagagtttcagtttcattctttgtgataaactaacaaaaataaaatctccaaagcagaggaaagaaaactaagataacagaaaataacccagaaactcaaccacagaatatgttcctgaggaaatagaaaaatctggaaaagtctaagaaaagattttcaggaacataatggaaggaacagcataaatttaaaaataacccaacagtaacttgtcaaacaaaacggagcatgatgaattagagcagcagatgtaaaaatagtcactgaaacaaaacacactctggaagatggaacccagaacacctcagagatggatgaggagagaaatacctgaagtgataatggcttcattccttccccagaaatgaaaaggcacaccagctataaagcaggataaatgaaacaaagcttcccctacacacattgtgctgagagagaacagatagaatacctgaccagaggtaacattagagagatggcggccttcctctgagcaaaaacacaatgaccagcgctgctacttttcaaagcaacaagatcaagaccaggcgtggtggctcacgcctgtaatcccagcactttgggagctgaggcatgcggatcacctgaggtcaggagttccagaccagctggccaacatggtgaaaccccatctctattaaaaatacataaatgagctacgcatggtggcacgcacctgtgatcccagctacccggaaggatgaggcagaactgcttgaacccaaaaggcggaggttgctgtgagctaagatcacgtcactccactccagccagggcaacagagcaagactccatctcaaaaaaaataaaaattaaaaaggccgggcacggcggctcatgcctgtaattccaacactttgggaagccaaggcgggtggatcacctgaggtcaggagttcaagaccagcctagccaacatggtgaacccttgtctctacaaaaattagccaggcatgatggtgggtgcctgtaatcccacctacttgggaggcgaggtgggaaaatcgcttgaatccgggtggcagaggttgcagtgagccgagatcacgccattgcactccagcctgggcgacagagtaagactccgtctcaaaaaaaaaaaaaaaacccaaacccacacaagatcaacctacctcttgctgcccagcttaaactagatgacaaaagaaagatttccatacaaagactggcagcttcccatctatacctcctggctgcaaaaactactaaaaaaggtacttcaacaacaagaaaataaacgtataagaaacaagcaaaaggaaccatgaggcaaaccaaacattactccccacctcccccttttttttttgagacagggtctggccttgtcgcccgggctggagtgcagtggtgctatcaccactcactgcagcctcgacctcccaggctccatccttctgcctcagcctcctgagtagcagggaccacaggtgtgcgctgctatgactggctaatttctttttttttttggtagagatggggttttactatgttgcccaggtgagtctccaactcctgggctcaagtgatctgtccaccttggcctcccacaggctgagattacaggtgtgagtcactgcatcttgccagtaaatagatatatgtatttttaaaaaggtacaatggccaggtgtggtagctcatgcctgtaatcccagcgctttgggagttcaaggcggggcggatcacctgaggttgggagtttgagaccagcttgaccaacatggagaaaccccatctctactaaaaatataaaattagctgggcgtggtggcgcatgcctgtaatcccagctactcgggaggctgagacaggagagaattgcttgaacccaggaagcaaagtttgcggtgagattgtgccatcgtactccggcctgggcaacaagagcaaaactccgtctcaaaaaaaaaaaaaaaaaagtaaaacgaatcctacaagactatgacactatgacagggaaactagaaaggggccttcagagggtattccaacactagttgtagctatttaaccttgttattttactaaaagatcagataacttccaagtcagcgagggaaaacgggaggacagagcggaagctggcaggaagagtgatgccaagacaagccaacttacaaactgcccctcgtcgatgcctatgacagccacgcccagggcctcctgggccacgtctcggagcaggcaggcgggcagtgcctccatggtgttcctgggaagagaaagccagagcgtgagcagggccagggaggccagaagccacaatgcaggggccagggaatggcactgtcgtgaccacctgctacctgcaaagcaggctcagtgttcacccagccgggctttgagaagttagcacctatgggaaaggccctcgtccagaaaaccagttatttatttattttttatgaaacagagtcttgctctgtcacccaggctggagtgcagtggcgccatctcggctccctgcaatctctacctcccaattctcaagggtctcaagcgattctcccacctcagccacaagagtagctgggactactggcacacaccatcacacccagctaatttttgtatttttagcagacatggggtttcaccatgttggccaggctggtctcagactcctaacttttaagtgatccacccgccttagcctcccagaggaaaaccagttatttatacaagccacttcacttgatgctttggattagaaattagtaatgtccagtacaaagctcaatgagactaaaaactcttccactgttcaggagctgggggcagactaggccaacttcatcaggtaccagggcccatgataccattaggggccagccaaatgtttccttttaaaattcagaagaatgaataactagaactgggcctgggttatatttgtctttatattaattatgttgcaaaacataaatttttaaaatcctgtattctggccagacacagcagctcatgcccgtaatctttggggaggccaagacgggaggatcacttgaactcaggagttcgagaccagcctgggtaacacagcgagacactgtgtgaaaaaaatgtaaaaattaactgggtgtggtggtgtgcgcctgtagtcccacctgctcagggggctgaggtgggacgatcacttgagcccaagggtttggggtcacgtaacagtaagctatgattgagccactgcactccagcctgggtgacagagagagaccctgtcccaaaaacaaacaacaaacaaacaaaaaaacatactttacaactattgtttcgttattaccttgctataatcctacttcgagttctggaaagaatgtgtgaaacagtattttgggcattttaaattccctcttccctccctaaacagagaaagacaaagtgagggcaggtgggaggccagctgtggcccctgcaagggcagcctctcgagccatcaatgctgctggcccagccttggcctctgtggcccgtgttagagatgacttgtgacacacgggcagaactcatatttaatcccggatctgactgactccagaagttgtacttccaacagctggaacgaagtgacctcctctgctttccctgtccccaccaggtgtaacaccaccctgtgccgtggacatcgcatcttaggaatgaggaagcaaatttggaaaagtaaatgacctacatcagacagcatggtcacgaagtgcggttaaattcccacatgcaactccaagccccaagcaccctccactccaccagcatctggcttcaggagcccctcagctcccaccgaaggccacacgccgggtggatctgttctctgcacagccatagcaactctcggatacagctcccagccagggctctgaggctgaagccctataatgtgtggcacagcatggctttgccactgggtgcccaggtggacaagtccagaggaccaagcaaagcgtctcaggctcagaaacatcaggcccacatctgctgccaaggaagtgaatttaactcccaaactgaggttgcaggcggaaatgtccagcgagctcaaacagctacacataaaacagggaagcgtgaaggctgccaggtgacgggggagccagccaacaacggacaactaaaaaattaaacaaaaatcaacgtgcaggccaaaccaaaccagtctgcagcctgtgtgaagctgaaaccctacggcagagtttctgaacactggcaggctcctgacatttggggccagctcgttcttgcatgggggccgtcctctgcaccataggacccttagcagcagtgtccctgatttctacacattaaagcccaaaagcatcccctcccccctccagttgcaacaactagaaatgtcttcaaacattgtcaaatggaccctggcggcaaaatcaccctcagtggagaaccactggctccagcccagggagtggagagtgtgcgctaccttgccaagcaccttggaaagtgtgctgatttgaatcattcaatgttcaaatgattaaccatccccattaaagagagtcctaacagtgtgtcctgtgccttgtgattttccactggacaggactgcagggggcagggactgaccggtcatgtgtgcagaagctgctgctgtagcgagtgtctttggcatacttgatcaccaggcacttgtactgagcaatctggaagcgacggacgcgtctcatcaactctgtgctgcaagaggagagagggtcaggtgaggtccacggcgggaggagtgggagaaggagacccctccccaacaagcctggctcctcattgtccctagtggtatgcagactgagcccaccacagccagaaaagagcagggcagagcaggcagggtataatatccctacaaagagggttggaagtcagaattctctatggggaagaggtccaggaatggtactcaggtggtcccaggaagtgtgggaggagtaaccttctccaagatgtagtggggaaggcagaagcaaaggctacatgtagagggaacctgcgactgcattccaaagtaacctcatcccagagttgttcccagagttcagagtttttctttctttctttttggggtggagtctcgctctgttgcctaggttagagtgcagtggagcgatctcagctcactgcaacccctgccttccgggttcaagagattctcctgcctcaacctcccgagtagctgggattacaggaggctgccaccatgcccagataatttttggttttttttttcagtagagatggggttttaccacgttgaccagggtggtctcaaactcctaacctcaagtgatcaacgcacctcagccttccaaagcgctgggattaaaggcgtgggccaccacacctggcatacagcttttctaaattaatttcagaaagtctttgtgtgcagcgtcaaaagcacttgcttctgggtccaagaagtccaactctgagccacatcttcctgagcaaggggtttgagctgaagtgatccccagggccataaaagaatgttggggcagggcatggtggctaacatctgtaatcccagcactttgggatgctgaagtaggaggattgcttgagaccaggagttcaagaccagcttgggcaacatagcaagaccccagctctataaaaataaaataaaattagctgggtggaggcgggggggtgcacgcctgtagtcccagctacttgggaggctgaggtgagagaattgcttgagcccaggagtttgagaccagcctgggcaacatagcaagatcctacctctagaagaacaaaaacaaaacaaaaagaatggtgcgtgggtagtttactcaagaaactcactagccccacccgggtcagggaatggttctatcacctcaggagagcagaggctccacggcttcagactccttggtttagaaagcgactacgtttccttggccttagaaggaaacagccacattgaataggggtgtacaaaaaggcctggcctacaggggacacaactggttgccaccttctcagaggacttggtggggaagacagctaagctgtaagcagctgtcaccagctccaggagggagtggcgtccacacaggacgaggggcttggcctgggcagaagagggcagagacttcctcctggactgaattcaagggaggagcaccccaggcgggagctgtaggaggctgtgctggtccttctaggggaagggaaggggagggaagggaaggggaggggaggggaggggagggaaggggaggggagggacgggacaaggggtccccggagaagaggaaggagctccaccccagccccgcgaagccattacctttttcctgagaacatcggcccgagaatcacctaggagagaaggtgaggtcatttgagggcccgccctgcgcggatgcctggacacaggctatcaccacgaccacctcatccccagccacgcgcagggctggcccccgcacctggatctgcccccgggtcttgctgggggagccaggcagcacagtgggcaggttaatgcagctcattgcgcctccgggaagttcacgaacccgagtactctccaaggccgtcccgcagtaagcccctggttcccgcgccgaccgctttaaaccacggcgtgctggccaatcacgagccggccccgccgccatggggccaatcagcgcccggccgctgacctggcgggagatttggccgcagcccgccccctcgtgggaggaatccgggacgtgcgcccagggactgggagggcctggaaatcagggcgatggacgtggctgatcggggtggggcctggtctgagccccgcctcggtccgcccaccaagtttaaaggggcggagcgaggcggggctctggccatataaacagagggacgcacgcccatgcggctgtagacgccatgatggatgtgtctggtgtgggtttcccaagcaaggttccttggaagaagatgtctgcagaggtaggtggattgcagggagggactaaggggctggggcggagttagctcatttattagattggaattccaagaaggaagcttagaagccgtctagagcactcctgtgggcatgcagagcgcctagtgcgtgccaggtccccagtgcttgagcaccatggtgtattttaccttctcctaaggatttttgttaacctggttttcaggataaagaaaattgaagtcctgactatgctaataatatccgtagaccctgccaggcgtggcggctcacacctgtaatcctagcacttttggcggatcacgaggtcaggagttcgagaccagcctggccaacatggtgaaaccccgtttctactaaaaatacaaaaattagccgggcgtggtgatgtacctctgtaatcccagctactggggaggctgagacaggagaatcgcttgaacccaggaggtggaggttgcagtgagccgagatcatgccatttgtactccagcctggaaggctgggcgatagaccaagacttagtctcaaaaaaaaaaaaaaaaaaaaaaaaaaaaatccatagacccgcaggaggttaggggacaaagttctggaccttgatctgaggttacacaatgtttttgggtctgtgcttatgtggcacaggctgaaggattcagaacagctggtatttacattggggttgtgaaggttagaaacatacaggccgggtgcggtggctcaaaaaaaaaaagaaagaaagaaaagaaacccattgtataatcatgatcataaataatagcaacaaagatggtggtagtgatcacagagtgtgccaggtgtggctgtaaggatcctacaggtaataacctttccaggtacagattggacagatccaaggacctctgacaaagagctccttcactgggaggaagaagcaacccacactgactggcttgctttattttactcgcatgctttatctcttttaaccttgtgatttggatacatgccttctttttttgagacacagtctcgctcagtcacccaggctggagtgcagtggcatgatctcggctcactgcaacctctacctcccgggttcaagtgattctcctgcctcagcctcccgagtggctgggattacaggcacactgtagctggtactacatgcctggctaattttttttttttttcttttgagacagagtctcgctctatcgcccaggctggagtgcagtggcgcgatctgggctcactgcaacctcttcttccagggttcacgccattctccggcctcagcctcctgagtagctgggactacatgcgcccgcaaccatgcccggctaatttttttgtatttttagtagagatggggtttcactgtgttagccaggatggtctccaactcctgacctcatgatccgccccccttggcctcccaaagtgctgggtttacaggcatgagccactgcgcctggccaatttttgtatttttaatagagatggggtttcgccatgttggacagactggtcttgaactcctggcctcaagtgatccacccgcctcggcctcccaaagtgctgagattacaggtgtgagccactgtgccgggcctggatagataccttctaccagtcaggaaactgaatctcagagactaagtaacttgttgaggataaaacagtaagtaagtgagggaggtcagatggcatttgacctcaggccttgccatgaggctgccctgacttcccatttctcatgatggttttgagccctttcttcaaaatctggttccttgttacttttttttttttttttttttgagatggagtctcgctgttgtcacccaggctagagtgcaatggtgggatctcagctcgctgcaacctccacctcccgagttccagcgattctcctgcctcagcctcccgagtagctgagattacgggcgcccgccaccatgcccagctaatttttgtatttttagtagagacggagtttcaccatgttggccaggatggtctcgaactcctgacctcaggtgattcacccgcctcagcctcccaaagtgctgggattacaggtgtgagccaccacgcccagtgttttgtttttttttttttgaaacagggttttgctctctcaggctggagtgcaatggcgcaatcttggctcactacaatctctgcttcctgggctcaagcgattctcctgccttagcctcccgaatagctaggactacaggtgtccaccaccatgcccggttgatttttcatatttttcgtagagatagtgtttcgccatattgcccagactggtctggaactcctggactcaagtgatctgcctatcttggcctcccaaagtgctgggattacaggcgagagccaccgtgtccagcattttctgttggtttttttttttttttttttgagatggggtctcactctgtcgcccaggctggagtgcagtagcatgatcccggctcactgcaacctctgcctccctggttcaagctattctcctgcttcagcctcctgagtagctgggattacaggcgcgcgtcaccatgcctggttaatttttgtatttttagtagaaatggggtttcatcatgttggtcaggctgatcttgaactcctgacctcgtgatcccgcctccgcctcccaaagtgctgggattacaggcgtgagccaccgcgcccagcctctgtttttttttttctttttttaattctccaaactgcctcagaatggttccttgttactttctgcataaagtgtgaaggtgttagcccgacattcaccgcccctcctcctccagcccagcctcccagcctcacctctgtgtgtcagccatagggcctgccagcatttgcaaactgacctttcattccttcctcctcacctctgtgcctttgactgtgcagtgacctcctgtggtcagaatcgcaccctctcagcgcagatcagctcctccttttttaatttttttgaggtagagtcttgctctgtcgctaggctggagtgcagtggtgcgatctcggctcactgcaacctccacctcccaggcttaagcaattctcctgcctcagcctcccaagtagctgggattacaggtgcacaccaccacgctcggctagtttttgttttcagtagagatggggttttgccatgttggccaggctggtctcaaacttctgacttcaagtgatccacctgcctcaggctcccaaagtgctaggattacaggcgtgagccaccgggccacctggcctcccctggtcgtaactgctgtgggagtggtgcccatgatggcattaactgaattcgtttgggggacctcatctccccttaaggctgccagctggctaaaggcacagcggtcgctggtatacctctagaccatggatctgagggcatcttggagaccctgggatactggggcgagggcttctaaggcagagaggagcagccgggcatgggcgagggggaggggcacactctgttgagaaggaaagtcttacggagcctcatgtttgtgccctgcaggagctggagaatcagtactgtcccagccgatgggttgtccgactgggagcagaggaagccttgaggacctactcacagataggaattgaaggtactagtgtgacctctccgtggccgcattgggtgtccttaagcatgtggcagtgattcagaatgctgggggttgggggggctgtgctgcaccacctgggcctcgaggggcatttcccaaacaccaggcactttataaacctccctgctcaggggcaggtgcccaggaccccttgctgcagggactactggaggcaggagaggtccgggggaggtccacggctcagtcgaccatgcctggcctttcttgctcagccatccatacccaggcccgtaaggctgcgggctgtggttggcatagggaggtgaagtgaacagaggaacgttccccatccgctgctgaatgtggaatgcggtcactattcctaaaaagcaatactttgggaggccgaggcaggtatatcacttgaggccaggagttcaagaccagcctggccaacatggcaaaaccctatctctacaaaaaaatacaaaaattagctggacacctgtaattccagctactcgggaacctgaggcatgagaattgcttcaacctgggaggcagaggttgcagtgagctgagattacatcattgcatgccagcctgggtaacagtgagaccctgtctcaaaaaaaaaaaaaagcaatgaagcctcttttttttttgagactgagtcttgctctgttgcccaggctggagtgcagtggcgcgatctcagctcactgcaacctctgcttcccgggttcaagcgattctcctgactcagcttcctgagtagctgggactataggcgcacctctccacacccagctgatttttgtatttttagtagagatggggccaccatgttggccaggatggtctccatctcttgacctcgtgatctggctgcctcggcctcccaaagtgctgggattacaggcatgagccatcgtgcctggccgccttttctttctttcttttttttgtttttgagacagagtttcgctcttgttgcccaggctggagtgcaatggcatgatctcgactcaccgctaacttcgcctcctgagttcaagtgcttctcctgcctcagcttcctgagtagctgggattacaggcatgcgccaccacgccctgctaagtgttttgtatttttttttttttttagtagagatatggtttctccatgttggtcaggctggtcttgaactcctgacctcaggtgattcgccctcctcggcctcccaaagtgctaggattacaggtgtgagccaccatggctggactttttttttttttttttttttgagacggagttttgctcttgctgcccaggctggagtgcaaaggtgcaatctcggctcactgcaacctccacctcccaggttcaagcgattcttctgcctcagcctcctgagtagctgggattacaggcctgtgccaccaagcccagctaattttgtatttttagtagagatggggtttctccatgttggttaggctggtctcaaactcccgacctcaggtcatccacctgcctcggcctcccaaagtgctgggattacaggtatgagccaccgtgcctggactttcaccttttctttctttaaagaaatctggacttgggaacctgtaaactagtgaagtcttaaggtccatttccatctctaccctgtatctgcaaagtgctgtaccacgatctgaacacctggtaatgcatccgtgctgggatggggagcaggccccgaggaggaagtgtaggtgaggacgcagccaaccatgcttggcaaattagctctgttgcagcaggctcaacacagcctttcagaggcagatgcctgggctcctgggcttggtggttttctaagcggagagaacccaggaggaggaacagacttgttagaagtgtattccagcaattccaccatcctcctgtctcaatagattgggggggagctgtttcctgggctcttcatgttccttgctgtgctcagctctgatccaaattcatctctatttgctcgataaatacatgagtgtggtgaaacatacaagagctgtaagcagccaggcgtggtggctcatgcctgtaatcccagcactttgggaggccgaggcgggcggatcatgaggtcaggagatcgagaccatcctggctaacacggtgaaaccccatctctactaaaaatataaaaaattagccaggcatggtggcgggcgcctctagtcccagctactcaggaggctgaggcaggagaatggtgtgaacctgggaggtggagcttgcagtgagccgggatcgcgccactgcactccagcctgggcgacagagcgagactctgtctcaaaaaaaaaaaaaaaaaaaaaaaaaaaagctgtaagcaaacctatttgcctgtcttaattgtcttgagtgataaaaagagctgaccctattgagaaagaatgtcagatgtaaaaagcacgcactattgaaacttcaagtcatatgaatgaaagaaaattaaaaggaaaggattaaaaaggaaaaaaaaaaaagaggccaggaactgtcacacacgcctgtaatcccagtactgtgggaggtcaaagcacgaggatcctttgaggccaggagtttgagaccagcctgggcaacatagcaataacctgcctctacaaaaaatttaaaggccaggcgtggcagctcacgcatgtaatcccagcactttgcggggctgaggtgggcagatcacaaggtcaggagattgagaccatcctggctaacacggtgaaaccctgtctctactaaaaatacaaaaaattagctgggcgtggtgcgggcacctgtagtcccatctactctggagactgaggcaggagaatggcttgaacccagaaggtggagcttgcagtgagctgagatcatgccactgcactccagcctgggcgacagagcgagactccatctcaaaaaaaaaaaaaaaaatttaaaaattagcagggtgccgtagtgtgcacctgcagttccacctacttgagaggctgaagtgggaggattactgctgccttggagttcaaggctgcatatttctttatgtattgggttttttttttttttctttgagacaaggcctcgctttgtcacccaggctggagtgcagtggcgtgattttggctcattgcaacctctgcctcctgggttcaagccattcttgtgtctcacattcttgtgtttcagcctcccgagtagctggaatttacaggcgcgtgccaccacgccagctaattttgtatttttagtagaggcggggtttcaccatgttcgccaggttggtctgggactcctggcctcgagtgatctgctcgcctcccaaagtgctgggattataggcgtgagccacactttgccttctttgcaccagggagaattatattttttctcattttttatttgtattcgtccttacaatgccagcctgttaacttgcaatgagggatgttcgcttttaatgagtagacagcctcatccccatcaaggcctggccgccctcatctgggctcagggagaacaaagtctaactgctgtgtgagtatggtcagggcgcaggaggctggcagagagggggtttaagaaccatttcctttaccactagcttttaaattagttttactgtgaccttcagtaaaaatacttttttttttttaagacggagttttgctcttgttgtccaggcttggagtgcaatggcgcaatctcggctcaccgcaacctccgcctcccaggttcaagcgattctcctgcctcagcctcctgagtatctgggattacaggcatgtgccaccacgcctggctgattttttatttttagtagagacggggtttctccatgttggtcaggctggtctcaaactcccgacctcaggtgatccacctgcctcagcctaccaaagtgctgggattacaggcgtgagccaccgtacccggcccaaaaaaatacattttacagtcagcaaaatgctgtatatattttttatccagatacaaaagttcaaattctgtatgatttcatttaaatgaggtccctagagaagtcaaattaataaagacaagaaatggaatggtggttggtaggggcaaggggagggaggaatggggagtgagtgtttaaaggggacagtttctttctttttttttttcttttgagacagggagagtctcactctgttgcccaggctggagggcagtggtgctatgtcatctcactgcaacctccacctcctgggttcaagcagttcttgtgcctcagctgcccgaatagctgggattgcagatgtgcaccaccacgcccggctaatttttgtgtttttagtagagacagggtttcgccatgttggccaggctggtctcaaactcctggcctcaggtgatccgcctgcctcgacctcccaaagtgctgggactacaggcatgagttgccgcgtgcagccctgcagtcctgttttttttttttttggggcggagtttcactcttgttacccaggctggagtgcaatggcgcgatctcagctcaccgcaacctctgcctcctgggttcaagcagttctcctgccttggcctcccaagtagctgggattacaggcgtgcgccaccacgtccagctaattttgtatttttagtagagatggggtttctccatgttggtcaggctggtctggaactcccgacctcaggtcatctgcccgcctcccaaagtgctgggattacaggcaagagccaccacgcccggccttgcagtcctgtttttaataccatgcacagcattataaattattattattattattatttttgtttttgagacggagtcttgctctgtcacccaggctggagtgcagtggcaagatcttggctcactgcaagctccgcctcccaggttcacgccattctcctgcctcagccacccaagtagctggtactacaggcgcccaccaccatgcccagctaattttttgaatagagacggggtttcaccgtgttagccaggatggtagcattagaaattatttctaacccaggctgggctccatggctcatccctgtaatcccagcactttgggaggccaaggcggtgggaatcacttgaggtcaagagttcacggccagcctggccaacatagtgaaaccccatctctactaaaaacacaaaaagtagccaggcatggtggcgtgcgcctataatctcagctacttgagaggccaaggcaagagaattgcttgaactcaggaggcagaggttgcaatgagcaaagattgcaccactgcactctagcctgggtgacaaagcgagaccttgtctcagaaaaaaaagaaaagaaattatttctacccagccaggcacagaggctcacgcctgtaatcccagcactttgggaggccagaggggggcagatcacttgaggtcaggagttggagaccagcctggccaacacgacaaaacaccttctctactgaaaatacaaaaatgagccaggcatagtggcacatgcctgtaatcccagccaccggggaggctgaagtgggagaatagcttgaacccaggttggggaggttgcagtgagtcgagaccacgccattgcactccagcctgggcaacaaagaatgaaactccatctgaaaaaaaaaacccagaaattatttctaacccaaaacaattgaaaacaggtactcaaacaagcatttttacacgcgtgttcgtagcaccatttccacatagcctgagttgtaaataatagcaatgaagcttttgctttaatgagaaaggaagtttgccataaggtttgttctggggtgtcttgctgaagccctcctgtgttcttgccctggggttcagggactggagggccctctgtggggggcatgagtcacttcattctctgtctctgcaccccagctgtcctctcctagagagaggcaatttctctttcccgaggttagtagagttttttaatatctgagagaggcttatgcatgataatgaacacctatagctgcttggttttaatggccattccacttagaacataaattccatgatgtttttcttaatcgtagcacaactttaatctagtccatttataggcttgagaactcctgtgtgaattaaatcacgaccttctgatgaagccactccgatgagcctgtgaggcacattgtcttcacactgtgctggggcagggttgttggcaaacccccatggatggcagccggcaatggcctcacagtgacaaatgcgtctgccttttgacccagaattctacccctgagagtgcgtcctacagatgcttgcaagtggtatggtaatggatgtacaaagctattcacagcaggggtgtttgtggtagcatggcctgggagacagcccagatggctttcagcaaaggattggtggcaggtctgcagccctggggcttatcagacaccaaccctgctggcaccttgatcttggacttccagtttgcagaactgtgagaaaataaaatttccattaagtttccccagtctggtattttgttatagccgcccaggctgactcagacaggagcccaggatggatgtgagcgtgttataaccagctcacgcttgtggctgtagggagtccgggtagaagctggaagagcctagaggggtggctgctgccttccagggaacaggtcaaagggtatccaaccagagtggtctcagtgcagatggggaggagactctagacccaggacaagcagtggagggggcatccaaggatttcctgatgatcagatgtggtttgagaaagagagggggccggtggcgcatgcctgtaatcccagactttgggaaaccaaagcaggaggacgcttgagcccaggagttcgaaaccagctggcaacatgcaagacctggtctctacaaaaaaattaaaaattagctgggtgtggtggtgcttgggaggctaaggtgggaggatcacttgagccctggagttcgagaacagcctgggcaacatggcgaaaccctgtccctacaaaaaatacaaaagttagccaggcgtggtggcacacgcctatagtcttagctactctggtggcagaggtgggaagcttgtttgaacctaggaggttaaggctgcagtaagccgagattgcaccactacactccagcctgtgtgacagagtgaaaccgtgtctcaaaaataaaaagtgaattcaggagttccagaccagcctggccaacaccgtgaaaacccatctttactaaaaatacaaaaattcgcctgggccagatgcactggctcgcacctgtaatcccagcactttgggaggccaaggcggggatatcactcaaggtcaggagttcgagaccaacctggccaatatggtgaaaccccatctctactacaaatacaaaaaaaaaaaaaattagccatgcatggtggtgcgtgcctgtaatcccagttacttgggaggctgcggcaggagaatcgcttgaacccaggaagcagaggttgcagatcacttgaacccaggaaacagaggttggagtgagcggagattgcgccgttgcactccagcctgggtgacaagagcaaagctctgtctcaaaaaaaaaaaaaaaaaaaattagacaggtgtggtggcgcacacctgtaatcccagctgctcagaaggaggagacaggagaatcacttgaaccccagaggcggaggttgcagtgagccaagattgcaccagtgggctccagcttgggcgacagagcgagcctctgtctcaaaaaaacaaaacaaaacaaaacaaaaccaaaaccacacaaggcttttcagtgaaatgctcactcctcttccctttcgtgtgcccagttcccctggcccccgtcaaggtggccactgttcttcatatggatatagactccccctccctttcatccaaatggccccgtagtacacacagttccaccctgccagtttcacttagtatttcttggagatgtttcctcatctgtacgtagatagcttctcgtcagtacgtcagtacgcagggagccctgcaggggcaagtggttggtaacgtgggtgctggcaaaacaggttttgcaacctcactggcgttctgcaaaggcagcttcctgcctggattggcccatgggcaacttccctttgatttccctcagctttaatccatccagctgaagtggagacagcccggtttatggttctgcattctggcatagacgcaattcgtacaagctctcagccccatgctttttcttcctctgccgtgtttacccttctggagttgcagaatgaatcacccacccgagggaagcacggttgtttttttttttcttttctttttttttgagacagtcttgctctattgcccaggctggagtgcagtggtgcaatctcggctcgctgcaacctctgcttcctggttcaagcaattctccttcctcagcctcctgagtagctgggagtacaggtgtgcgccaccacgcctggctaatttttgtatttttagtagagatggggtttcaccatattggccagggtggtctcgaatgcctgaccttgtggtccacccgcctcggcctcccaaagtgctgggattgcaggtgtgcgccgccgcgcccggccaggcttttttttctctaggcctgctgtggccaccaaggctggggaccagggggcctccagggacagggatcccaagttgcacgttaatacacggagccctttctgagatgcaggttctacagggaactggattccacctcttttggggagatcaacccagcagcccaaggatcccctgatggtgcctgagcacagctgtgagaagggggtatctggatccttggggtgacaggatgggagaggtggagcatgggcctgcaggctggcccccagaggccttaggtctctgctgactagctagaattctgaaaactgtgttatgtaagacgtttagcatctgcagtgccaaataaaggtgacccccacaacgacataaaaaaaaaaaaagatatgtccaaatcctaaccctgggaacctatgaaaatcctaaccctgggaacctatgaaggtatttccttatttggtgtgttttgttttggtttggtttggtttggtttgtttgatacagagtcttgctctgtcgcccaggctggagtgcagtggtgtgatctcagctcactgcaacctctgcctccgggttcaagcgattgtcctgcctcagcctcccaagtagctgggattacaggcacgcgccaccacgcccagataatttttgtatttttagtagagacagggttttaccatgttggccgggatggtctcaactcctgacctcaagtgatctgcccgcctcagcctccctgtaaccagctgggattgcaggttcccggttggtatttccttatttggaaagaccatctttgtaggtgttattagctaaagtcaagtcattctgggttagggtgggccctaaatgccattgactgctatcctgctaagagacagaagagggagggacacacagggaggggaccacgtgaagacggaggcagagacgggaagaggcagaggtgactggagtgacgtagccccaggccttggaacgcctggagccaccaggagctgcaggaggcaaaagaggcattggcagagtgtggcagtgtccacaccttaatttcagacttctggcctttagaactgtgagagaatcacgttctactgctgtgagacactcaatttgcagtactttgttacagctgccctggtaaacaaatgcaatatttattttcagcaaagcagggagttcctgcaaagatgactagaccaggttccttctcccaagagcgcagtgtcctagctgtgaatactaggagtgcgttgctgcggtgggaggggaggcagggtttactgactgatcattcccagtggtctggatgctctctttctttctttcctttctttcgagacagaatctcgctctgtcacccaagctggagtgcagtggtgcaatctcagctcactgcagcttctgcctcccaggttcaagtaatcctcccacttcagcctcccgagtagccggaattataggtgtccaccaccacgtccagataactttttttttaatttttagaaaatataggctaaggcacgagaattgctggaacccaggaggcagaagttgcagtgagccaagatggcaccactgcactccagcctgggtgacagagcaagactccgtcgcaaaaaaaaaaaaacgatgaatgctaggataaaaaataaagcaagaggccaggcacagtggctcatgcctgtaatcccagcactttgggaggccgaggtggatggatcatctgaggttgagctcgagaccagcctcgccaatacagtgaaaccccgtctctactaaaaatacaaaaattagccaggtgtggtggcacgggcccataatcccagctactcaggaggctgaggctggaggattgcttggcgccgggagtttgagactgtagtatgctttgattgcacctgtgaatagccactgtactccagcctgggcaatatagtgagaccctgtcctttaaaacaaaaaagtatagcgcacataataagtgtgtagtaaagtcgtgctgaaaagggtcctcgcagaaccacagttcacttgttgacagacgtcaggactggcagtcttttttttttgagttggcgtctcgctctgtcccccaggctagagtgcagtggcgtgatctcagctcactgcaagctccacctcccggattcacgccattctcctgcctcagcctcctgagtagctgggactacaggcacctgccaccacgcctggctaattttttgtatttttagtagagacagggtttcaccatgttagccagggtggtctcgatctcctgacctcgtgatccacccgcctcggcctcccagagtgctgggattataggcgtgagccactgcacccagcctggcagtcctctttcgatgggaggtgctcagagctgaagctcaacacgccaacttaagggagctttcagctggaatgtttctacctgagctgaaatagaaattgccgccacctggctgggcacagtggctcatgcctgtaatcccagcactttgggaggccaaggtgggtggatcacgaggtcaggagttcaagaccagcctggccaacaaccctgtctctactaaaaaatatatatatatatataaaaattagctgggcatagtggcgtgcacctgtagtcccagctacttgggaggctgaggcaggagaatcgcttgaaccggggaggtggagattgcagtgagccgagatcgcgccactgcactccagcttgggcaacagagtgagacttcgtctcaaaaaaaagaaaagaaaaatttctaccacctgagcttgtgctgacagcgacttgtccatttctgagacagccaccacaagggcccgggccaccaggaagagcctgctgcatgtcccctatggagacggcgaaggggagaaagtggacatttacttccccgacgagtcgtctgaaggttgtcggtgaaggggctgggggtcccggggcttgggggtccagtggcagagctcagcagggcgggccttgctcacacgccctgtgcttggttttgcagccttgcctttcttcctgttctttcacggaggatactggcagagcggaaggtgagtcgggggatgtggatggtggactgcaagagagattccactttccctgggggactcctcctccagggctgccgcaaccaaactgccacaagctgggcactccttgcagggctgtgtctcacagcgctggagaacggaagtctcaagtcaaatgtgggcagggttcctagggagggtccttcctgccttctccagcttctggtggccttagacagcccttagcttgtgtctgcatagctccagcctctgcctccattcacatgtgatcctggtgttcctgggtctcaaatcttcctctctctttttttttttttttttttttttttgagacagagtctcactctaacccagactggaacgcagtggtgcgacctcagctcactgcaacttctgcctcccgggctcaagcaattcttctgcctcagcctcccaagtagctgggattacaggtgcacgccaccacacccagctaatttttgtatttttagtagagacagggttttaccatgttggccaggctggtcttgaactcctgagctcaagtgatcctcctgccttgacctctcaaagttctgggattacaggcgtgagccaccacaccagcctccttttttttttttttttttttataaggtcatagtcacaggttctggggttaggatttggacatatcttttggggggacacagttcaacccactacacccagtgagaagcatgttcagcctcctcttgaatcaagggaaaagccagagtgaccaaccactgtcccagtttgcttgggactgaggaggggtttcccaggacatggggttttcagtactttaggaaaaaaaaatgagagtcccaggtaaaatgggacagttggtcactgtaagctaagcagtgggtatttgggaatttgggatcttggcagacactgctgttccctagggtcttcctacagagttgccttcaagcatgttcatgttaatagcttacatttaatggccaggtacggtggctcacgcctgtaatcccaacactttggaagggcaaggcggacggatcacttgaggtcaggagttcgagaccagcctggccaacgtggtgaaaccctgtctctactaaaaatacaaaaattagctggacgtggtggtgtgtgcctgtaatcccagctactcgggaggctaatgcaggagaatcacttgaacccaggaggcggaggttgcagtgagctaagatcatgccactgcactccacccagggtgacagagcgagactctgtctcaaaaaaaaaaaaaaaaaaagcttacatttattgcacacaaaactctctacactgctagtctttaattctcaaaaacagttccctgagagagggaacataattgcctctattttacagatgacaaaaccaggcttagaagttacacaaattgccttgcacagtggctcacacctataatcccacacattgggaggctgaggcaggaggattgagttagaaaccagcctggtcaacatagcaagacccccatctctacaaaagaaaagataaatttgctgggcatagtggtgcacacctatactcctgcttgggaggctgaggcaggaggatcgcttgagcccaggaggtcgaggctacagtgatccatgatcgcaccattgcactccagcctgggcgacagagcgaggccctatcgcttagaaaacaaaaagttacatgaagttcccccaaggtcccgtagctagcatgtgatgtggcagggagagagcctgtccgcttcactctctcacatgggaccagaaaggggtgatgctgtgcgtggacaggacatctggcaagtggtgtgtccaggacacaggaagcagcgtagtggccaagctgcctccagctgtcacatctgtgtgtctctgcagtaaggatgagtctgccttcatggtccacccgctgacggcacagggagtggccgtggtaatagtggcttacggcatcgcccccaaaggtaataggagtggttgctgcaggtccgagggccggtgggctttaggaggaagtgcatccctgacccagctcatgctctctgtgcaggcaccctggaccacatggtagaccaggtgacccgcagcgttgcgtttgtccagaagcggtatccaagcaacaagtgggtgttgccagtagattttcttcctgttggacctcagtgggtgggaggacagtgcaatcagtacctaggatacagccaagctgcccctctggcctgtggagcagaaagcaaattgggactcttcgaagggggcctgatgttgtggggaaactgcgtgcaaatccagctctctgctctgacccctcccaggggaatttacctgtgtggacactcagccggggcccacctggctgccatgatgctcctggccgactggaccaagcatggggtcacgcccaacctcagaggtttccatgggagctacagcctggctgggcaaccttcatctccccatgagccttggggtttgggccaactgcttgaaatcctcccggccatgagtggcttgaccgcagggcttcgagccctctgagcaaggccttctctgcctcctctgtgccccttcccctggtcctgcccctctggcggtgggggtgggctggccctgccttgctccgcctggagcctggccctgtgacaattctgtaccttcacaggctttttcctggtgagtggggtctttgacctggagcccatcgtgtatacttcacagaacgttgctctccagctgaccctgtgagttacttggccaccacctcccctggctcaccaggagcctggctcctctctgtcctgacccctgtccactccccaccccagggaggacgctcagaggaatagcccccagctgaaggtggcccaggcacagccggtggaccccacctgccgtgtgctggtggtcgtgggccagttcgactcccccgaattccaccgacagtcctgggagttttaccaggtactcccagtgcaggtttgtggccagaggtcgagggtcatgtgggctcattattttcctctttcttttacccaagtggacaagaccctccatcatttatttaacacgtactgagtgaaccctgacctgtgccaggcatggccccatgtcctgccccacctcccctcccactgctcaggcccctcttcccatgtctcccctgcccagaccctgtgtcaaggagagtggaaagcctcatttgaagagctccacgatgtggaccactttgaaattgttgagaatctgacccagaaggacaacgtgctcacccaggtggggcctcatccctggcagccctttcatggtagacagcacaggtcctgtcgcagccccttagatgtgcaaaccaggagttcaagaccagcctggccaacatggagaaactccgtgtctactaaaaatacaaaacaaattagccagatgtgatggtacgtgcctgtaatcccagctactcaggaggctgaggcatgagaattgctttaacccaggaggcagagattgcagtgagccaagattgcaccactgcactccggcctgagcgacagagtaagactctgtctcaaaaaaaaaaaaaaaaaaaaaagacctgagaacctaggaaagaaagaacctaagaaagaccatcttgtttctttctttttttttttctttagagacagggtctcctctcttgcacccaggctggagtatagtggcaaaatcttagctctctgctgcctcctgggctcaagtggttatcctgccccagcctctcgagtagctgggactacaaaggcgtgccactgtgccctgctaattattcaatgttttgtagagatggggtctctctatgttccccaggctggtcgtcgtcgtcttccttcttcttcttcctccttcctccttcatcttctttcttctcctcctccccctacccccccttcttcttcttcttccttcatctcagcatattatacctctaaccagactgtcttcaactcctgagttcaagtgatcttcccacctcagcctcccgaagggttggggttgcagacgtgagccactgcatccagccctgtctcatttccttaatcaaattcctgcaaagagctgctctgattctggggcttttgtgtcttctcttcctgttccagattatcttgaaaacaatcttccagtagttctgacgatacttggagcctggtccacgtgcatcccaccttgggaagcctctccaaagagctttcggagctgacactgacagcttcagtttcccccagcacccaggagagccttgctgtgtctgtctgcccggcaagagtccattctcactgctgggacactcatgaaaatctccacgtcctccctcttcccagcctggatggagctccagggctggggaacgtccgcaagtcaatgctcagagatgcccggagctgcctcttagactcgtctggcccatctacctgctgacagagcatgacaaagatgacgctcaaaagtaatgccattacttcttttttttttttttttttttttttttttgagatggagtcttactctgtcacccaggctggagtgcagtggcgtgatcttggctcactgcaacctccacctcccgggttcaagcaattctcctgcctcagcctcctgagcagctgggactacaggcgcctgccatcatgcctggctaatttttgtatttttagtagagacggggtttcaacatattggccaggctggtctcaaactcctaaccttgtgattcgcccgccttggcctcccaaagtgctgggattccaggcgtgagccactgcgcccggccagaatggcattatatttaaatagttcataaagaagcacaaaagaatattatttcataacatgtaaaaattatataaaacgtaaatttccatgttgataaataaagttgtattggaacacggccctgctcgttcatttacgtattgtctagggcagctttcaagctgcagggtggagctgagtggtggtgacagtgacctcctggcccgtagtgcctgaagcatttcctatctggcccttttcaggaaaagtttgcggacccctgggtaagggcttccccaagccagctaccctctgccttctgcttcagtctcctgtctgctctgtcctccatctccctgacatttgggtctgtccctgaatgccccggggtctcagcgttggggccaacaccttgaccttgacaggacaatgctacccacatgtaggacaagcttcctctgcacccgagagtggtgtgcatgtcccaagaagccagctatatccatccaccacccaccccaccacaccgcctctttctctcacaccgaatagcattcaagaatttccactgtgggctgggcgcaggggctagtgcctgtaatcccagcactttaggaggccgaggtgggcgaatcacctgaggtcaggagttcaagaccagcctggccaacatggcaaaaccctgtctctactaaaaatacaaaaattagccaggcgtggtggctggcgcctgtaatcctagatacgtgggaggctgagttaggagaatctcttgaatccgggaggcagaggttgcagtgagctgagattgtgcccctgcactccagcctgggtgacaaagccagactccatctcaaagaaaaaaaaaaaaattccactgtatgtgtgcagcaaaccatcatgacacacatttacctgtgtaacaaacctgcacatcctacacatataccctggaacttaaagtaaaagttgggggggggggtaaaaaagaatttccaccgtgacattattgagtatagcaaaaaaaaaaaaaacaagaaacagcctagtgttcattagggaataaacgcattcaagcagcatcaaaccctgcagccattacaaagagatctatgttgaccatgtggaatatctccaagagccacagtagcctcccttatctgtaggattcactccaagaccctctgaaaccatggataatactgaaccctatatacactatgttttttcttgtatatacatacctacgataaagtttaatttataaattggcaaagggtatataaatattccttctaagagattaacaataactaataaagtagaacgattaaaacaatatactgtgatcaaagttatgtgaagccaggtgctgtggctcatgcctgtaatcccagcactttgggaggctgagacaggtggatcacctgaggtcaggagttggagaccagcctggccaacatgacaaaaccccgtctctactaaagataaaaaaaattagccgggcatggtgacacatgcctgtaatcccagctacttgggaggctgaggcaggagaatcgcttgaacctgggaggcggaggttgcagtgagctaagatcacaccattgcactccagcctgggcaacaagagtgaaactctgtctcaaaacaaaacaaaacaaaacaaacttatggggttgctctctttctctcaaaatatcctttttttggcagggcacggtggctcatgcctgtaatcccagcactttgagaggctgaggtgggtgaatcacctgaggtcaggagttcaagaccagcctggccaacatggtgaaaccccgtctctattaaaaatacaaaaaattagctgggcgtggtggtgcaggcctgtaatcccagctacttgggaggctgaggcaggagaatcactcgaacccaggagctggagtttgcagtgagccgagatcatgccattgcactccagcctgggccacagagcaagactccatctcaaaaaaaaaaaaaagaaaaaaagaaagtcttttttttttttgagactgtatctcactctttctcccaggctggagtgcagtggcccaatcatggctcactgcagcctcgacctcccaggatcaagtgatccttccacctcagcctcccgagtagctggaagtataggtgcacgcccgactgatttttttttttttttttagacggagtctcactcttgttgctctggctggagtgcaatggcaggatctcggctcactgcaacctctgcctcttagattcaagcgattctcgtgcctcagcctcccgagtagctgggattacaggtgcccaccaccatgcccggataattttttgtatttttaatagagacagggtttcaccatattggtcaggctggtctcaaactcctgacctcaggtgatccacctgcctcagcctcccaaactgctgggattacaggcgtgagccaccgggcatggcctttcctggctaattttttaaatttttgatagagatggggtctcagtgttgcccaggctgatcttgaactcctagattcaagtgatcctccctccttggtctcccaaagtgctgagattacaggcgtgagccaccgccccgggctggaaaatacttttttaaacgagggcaatgtgaatctgaaatgccatttgaggaaagatctgttcgcctgacatcctgtttgagcctgggtggacaggacagcacctgccagcatcgggaagcactgcagatgggaagaggcttggtcactctccaaaggtggcaggagttggagggggtgagctgaaggtaaggagaaaggaggtggggacccaggagacaggggctgcgcagcgggctcggggctgacacccccacggatacagttcactggggctcaaacataaaaggaacccaactattgtgggaggaaaagactcttctgcctttctgccttttctttttttctttttctttctttctttttttttttttttttttgagacagagtcttgctctatcgcccaggctggagtgcagtggcgtgatctcggctcactgcaagctctgcctcccgggatcacgccattctcctgcctcaacctcccgagcagctgggactacaggcgcctgccaccacacccggctatttttttgtattttttagtagagatggggtttcaccgtgttagccaggacggtctcgatctcctgaccttgtgatccgcccgcctcggcctcccaaagtgctgggattacaggcgtgagccaccgcgcctggctcttttttctttcttttttttttttccgagacagagtttcactcttgttgcccaggctggagtgcagtggcgcaatcttggctcactgcaacctccacctccagggttcaagcgattctcctgcctcagcctcctgagtagctgggactgcaggcgcgcaccaccacgcctggctaatttttgtatttttagtagagacagggtttcaccatattggccaggctggtctcgaactcctgaccttgtgatctgcccacctcagcctcccaaagtcctgggattacaggcgtgagccaccgtgcccagcctgacccctctgccctttcaaaaactatgttcgttctctcacagccttctcttgtcatattaagtccacaccgcaggcctaatttgtccagtgaatgctatgcaaatatttcatgcacctgctgatcgcaggaatgatatgtacttggtacgcactgatcgtacctcggggtgggagaagagagggcaaggaagcaaagaatagccccctcctttcctggtgcaccttcagatgtgccgatggggcccaggctcgctgcagatggcccccttcccagagacaggggaggatcctccacccactccccagcctccaggaccatcctgactcctgccttcaggcactcaagttatgcgtctagacatgcggatatattcaagctgggcacagcacagcagccccaccccaggcagcttgaaatcagagctggggtccaaagggaccacaccccgagggactgtgtgggggtcggggcacacaggccactgcttccccccgtctttctcagccattcctgaagtcagcctcactctgcttctcagggatttcaaatgtgcagagactctggcacttttgtagaagccccttctggtcctaacttacacctggatgctgtggggctgcagctgctgctcgggctcgggaggatgctgggggcccggtgcccatgagcttttgaagctcctggaactcggttttgagggtgttcaggtccaggtggacacctgggctgtccttgtccatgcatttgatgacattgtgtgcagaagtgaaaaggagttaggccgggcatgctggcttatgcctgtaatcccagcactttgggaggctgaggcgggtggatcacgaggtcaggagttcaataccagcctggccaagatggtgaaaccccgtctctactaaaaatacaaaaaaattagccgggcatggtggcgggcgcatgtaatcccagctactgggggggctgaggcagagaattgctggaacccaggagatggaggttgcagtgagccaagattgtgccactgcactgcactccagcctggcgacagagcaagactctgtctcaaaaaaaaaaaaaaaaagtgaaaaggagttgttcctttcctccctcctgagggcaggcaactgctgcggttgccagtggaggtggtgcgtccttggtctgtgcctgggggccaccccagcagaggccatggtggtgccagggcccggttagcgagccaatcagcaggacccaggggcgacctgccaaagtcaactggatttgataactgcagcgaagttaagtttcctgattttgatgattgtgttgtggttgtgtaagagaatgaagtatttcggggtagtatggtaatgccttcaacttacaaacggttcaggtaaaccacccatatacatacatatacatgcatgtgatatatacacatacagggatgtgtgtgtgttcacatatatgaggggagagagactaggggagagaaagtaggttggggagagggagagagaaaggaaaacaggagacagagagagagcggggagtagagagagggaaggggtaagagagggagaggaggagagaaagggaggaagaagcagagagtgaatgttaaaggaaacaggcaaaacataaacagaaaatctgggtgaagggtatatgagtattctttgtactattcttgcaattatcttttatttaaattgacatcgggccgggcgcagtggctcacatctgtaatcccagcactttgggaggccgaggcaggcagatcacttgaggtcaggagtttgagaccagcctggcaaacatggtgaaaccccatctctactaaaaatacaaaaattagcctggtgtggtggtgcatgcctttaatctcagctactcgggaggctgaggcaggagaatcgcttgaacccgtggcggggaggaggttgcagtgagctgagatcatgccactgcactccagcctgggcgatagagcgagactcagtttcaaataaataaataaacatcaaaataaaaagttactgtattaaagaatgggggcggggtgggaggggtggggagaggttgcaaaaataaataaataaataaataaaccccaaaatgaaaaagacagtggaggcaccaggcctgcgtggggctggagggctaataaggccaggcctcttatctctggccatagaaccagagaagtgagtggatgtgatgcccagctccagaagtgactccagaacaccctgttccaaagcagaggacacactgattttttttttaataggctgcaggacttactgttggtgggacgccctgctttgcgaagggaaaggaggagtttgccctgagcacaggcccccaccctccactgggctttccccagctcccttgtcttcttatcacggtagtggcccagtccctggcccctgactccagaaggtggccctcctggaaacccaggtcgtgcagtcaacgatgtactcgccgggacagcgatgtctgctgcactccatccctcccctgttcatttgtccttcatgcccgtctggagtagatgctttttgcagaggtggcaccctgtaaagctctcctgtctgactttttttttttttttagactgagttttgctcttgttgcctaggctggagtgcaatggcacaatctcagctcactgcaccctctgcctcccgggttcaagcgattctcctgcctcagcctcccgagtagttgggattacaggcatgcaccaccacgcccagctaatttttgtatttttagtagagacaaggtttcaccgtgatggccaggctggtcttgaactccaggactcaagtgatgctcctgcctaggcctctcaaagtgttgggattacaggcgtgagccactgcacccggcctgcacgcgttctttgaaagcagtcgagggggcgctaggtgtgggcagggacgagctggcgcggcgtcgctgggtgcaccgcgaccacgggcagagccacgcggcgggaggactacaactcccggcacaccccgcgccgccccgcctctactcccagaaggccgcggggggtggaccgcctaagagggcgtgcgctcccgacatgccccgcggcgcgccattaaccgccagatttgaatcgcgggacccgttggcagaggtggcggcggcggcatgggtgccccgacgttgccccctgcctggcagccctttctcaaggaccaccgcatctctacattcaagaactggcccttcttggagggctgcgcctgcaccccggagcgggtgagactgcccggcctcctggggtcccccacgcccgccttgccctgtccctagcgaggccactgtgactgggcctcgggggtacaagccgccctcccctccccgtcctgtccccagcgaggccactgtggctgggccccttgggtccaggccggcctcccctccctgctttgtccccatcgaggcctttgtggctgggcctcggggttccgggctgccacgtccactcacgagctgtgctgtcccttgcagatggccgaggctggcttcatccactgccccactgagaacgagccagacttggcccagtgtttcttctgcttcaaggagctggaaggctgggagccagatgacgaccccatgtaagtcttctctggccagcctcgatgggctttgttttgaactgagttgtcaaaagatttgagttgcaaagacacttagtatgggagggttgctttccaccctcattgcttcttaaacagctgttgtgaacggatacctctctatatgctggtgccttggtgatgcttacaacctaattaaatctcatttgaccaaaatgccttggggtggacgtaagatgcctgatgcctttcatgttcaacagaatacatcagcagaccctgttgttgtgaactcccaggaacgtccaagtgctttttttgagattttttaaaaaacagtttaattgaaatataacctacacagcacaaaaattaccctttgaaagtgtgcacttcacactttcggaggctgaggcgggcggatcacctgaggtcaggagttcaagacctgcctggccaacttggcgaaaccccgtctctactaaaaatacaaaaattagccgggcatggtagcgcacgcccgtaatcccagctactcgggaggctaaggcaggagaatcgcttgaacctgggaggcggaggttgcagtgagccgagattgtgccaatgcactccagcctcggcgacagagcgagactccgtcataaaaataaaaaattgaaaaaaaaaaaagaaagaaagcatatacttcagtgttgttctggatttttttcttcaagatgcctagttaatgacaatgaaattctgtactcggatggtatctgtctttccacactgtaatgccatattcttttctcacctttttttctgtcggattcagttgcttccacagctttaatttttttcccctggagaatcaccccagttgtttttctttttggccagaagagagtagctgttttttttcttagtatgtttgctatggtggttatactgcatccccgtaatcactgggaaaagatcagtggtattcttcttgaaaatgaataagtgttatgatattttcagattagagttacaactggctgtctttttggactttgtgtggccatgttttcattgtaatgcagttctggtaacggtgatagtcagttatacagggagactcccctagcagaaaatgagagtgtgagctagggggtcccttggggaacccggggcaataatgcccttctctgcccttaatccttacagtgggccgggcacggtggcttacgcctgtaataccagcactttgggaggccgaggcgggcggatcacgaggtcaggagatcgagaccatcttggctaatacggtgaaaccccgtctccactaaaaatacaaaaaattagccgggcgtggtggtgggcgcctgtagtcccagctactcgggaggctgaggcaggagaatggcgtgaacccaggaggcggagcttgcagtgagccgagattgcaccactgcactccagcctgggcgacagaatgagactccgtctcaaaaaaaaaaaaaaaagaaaaaaatctttacagtggattacataacaattccagtgaaatgaaattacttcaaacagttccttgagaatgttggagggatttgacatgtaattcctttggacatataccatgtaacacttttccaactaattgctaaggaagtccagataaaatagatacattagccacacagatgtggggggagatgtccacagggagagagaaggtgctaagaggtgccatatgggaatgtggcttgggcaaagcactgatgccatcaacttcagacttgacgtcttactcctgaggcagagcagggtgtgcctgtggagggcgtggggaggtggcccgtggggagtggactgccgctttaatcccttcagctgcctttccgctgttgttttgatttttctagagaggaacataaaaagcattcgtccggttgcgctttcctttctgtcaagaagcagtttgaagaattaacccttggtgaatttttgaaactggacagagaaagagccaagaacaaaattgtatgtattgggaataagaactgctcaaaccctgttcaatgtctttagcactaaactacctagtccctcaaagggactctgtgttttcctcaggaagcattttttttttttttctgagatagagtttcactcttgttgcccaggctggagtgcaatggtgcaatcttggctcactgcaacctctgcctctcgggttcaagtgattctcctgcctcagcctcccaagtaactgggattacagggaagtgccaccacacccagctaatttttgtatttttagtagagatggggtttcaccacattgcccaggctggtcttgaactcctgacctcgtgattcgcccaccttggcctcccaaagtgctgggattacaggcgtgaaccaccacgcctggcttttttttttttgttctgagacacagtttcactctgttacccaggctggagtggggtggcctgatctcggatcactgcaacctccgcctcctgggctcaagtgatttgcctgcttcagcctcccaagtagccgagattacaggcatgtgccaccacacccaggtaatttttgtatttttggtagagacgaggtttcaccatgttggccaggctggtcttgaactcctgacctcaggtgatccacccgcctcagcctcccaaagtgctgagattataggtgtgagccaccacacctggcctcaggaagtatttttatttttaaatttatttatttatttgagatggagtcttgctctgtcgcccaggctagagtgcagcgacgggatctcggctcactgcaagctccgccccccaggttcaagccattctcctgcctcagcctcccgagtagctgggactacaggcgcccgccaccacacccggctaatttttttgtatttttagtagagacgggttttcaccgtgttagccaggagggtctcgatctcctgacctcgtgatctgcctgcctcggcctcccaaagtgctgggattacaggtgtgagccaccacacccggctatttttatttttttgagacagggactcactctgtcacctgggctgcagtgcagtggtacaccatagctcactgcagcctcgaactcctgagctcaagtgatcctcccacctcatcctcccaagtaattgggactacaggcgcaccccaccatgcccaccttatttatttatttatttatttatttatttattttcatagagatgagggttccctgtgttgtccaggctggtcttgaactcctgagctcaagggatccttttgcctgggcctcccaaagtgctgagattacaggcatgagccaccgtgcccagctaggaatcatttttaaagcccctaggatgtctgtgtgattttaaagctcctggagtgtggccggtataagtatataccggtataagtaaatcccacattttgtgtcagtatttactagaaacttagtcatttatctgaagttgaaatgtaactgggctttatttatttatttatttatttatttatttttaatttttttttttgagacgagtctcactttgtcacccaggctggagtgcagtggcacgatctcggctcactgcaacctctgcctcccggggtcaagcgattctcctgccttagcctcccgagtagctgggactacaggcacgcaccaccatgcctggctaatttttgtatttttagtagacggggtttcaccatgctggccaagctggtctcaaactcctgaccttgtgatctgcccgctttagcctcccagagtgctgggattacaggcatgagccaccatgcgtggtctttttaaaattttttgattttttttttttttgagacagagccttgctctgtcgcccaggctggagtgcagtggcacgatctcagctcactacaagctccgcctcccgggttcacgccattcttctgcctcagcctcctgagtagctgggactacaggtgcccaccaccacgcctggctaattttttttggtatttttattagagacaaggtttcatcatgttggccaggctggtctcaaactcctgacctcaagtgatctgcctgcctcggcctcccaaagcgctgagattacaggtgtgatctactgcaccaggcctgggcgtcatatattcttatttgctaagtctggcagccccacacagaataagtactgggggattccatatccttgtagcaaagccctgggtggagagtcaggagatgttgtagttctgtctctgccacttgcagactttgagtttaagccagtcgtgctcatgctttccttgctaaatagaggttagaccccctatcccatggtttctcaggttgcttttcagcttgaaaattgtattcctttgtagagatcagcgtaaaataattctgtccttatatgtggctttattttaatttgagacagagtgtcactcagtcgcccaggctggagtgtggtggtgcgatcttggctcactgcgacctccacctcccaggttcaagcgattctcgtgcctcaggctcccaagtagctgagattataggtgtgtgccaccaggcccagctaacttttgtatttttagtagagacagggttttgccatgttggctaagctggtctcgaactcctggcctcaagtgatctgcccgccttggcatcccaaagtgctgggattacaggtgtgaaccaccacacctggcctcaatatagtggcttttaagtgctaaggactgagattgtgttttgtcaggaagaggccagttgtgggtgaagcatgctgtgagagagcttgtcacctggttgaggttgtgggagctgcagcgtgggaactggaaagtgggctggggatcatctttttccaggtcaggggtcagccagcttttctgcagcgtgccatagaccatctcttagccctcgtgggtcagagtctctgttgcatattgtcttttgttgtttttcacaaccttttagaaacataaaaagcattcttagcccgtgggctggacaaaaaaaggccatgacgggctgtatggatttggcccagcaggcccttgcttgccaagccctgttttagacaaggagcagcttgtgtgcctggaaccatcatgggcacaggggaggagcagagtggatgtggaggtgtgagctggaaaccaggtcccagagcgctgagaaagacagagggtttttgcccttgcaaatagagcaactgaaatctgacaccatccagttccagaaagccctgaagtgctggtggacgctgcggggtgctccgctctagggttacagggatgaagatgcagtctggtagggggagtccactcacctgttggaagatgtgattaagaaaagtagactttcagggccgggcatggtggctcacgcctgtaatcccagcactttgggaggccgaggcgggtggatcacgaggtcaggagatcgagaccatcctggctaacatggtgaaaccccgtctttactaaaaatacaaaaaattagctgggcgtggtggcgggcgcctgtagtcccagctactcgggaggctgaggcaggagaatggcgtgaacctgggaggtggagcttgcagtgagccgagatcgcgccactgcactccagcctgggcgacagagcgagactccgtctcaaaaaaaaaaaaaaaaagtaggctttcatgatgtgtgagctgaaggcgcagtaggcagaagtagaggcctcagtccctgcaggagacctctcggtctctatctcctgatagtcagacccagccacactggaaagaggggagacattacagcctgcaagaaaagtagggagatttaaaaactgcttggcttttattttgaactgttttttttgtttgtttgttttccccaattcagaatacagaatacttttatggatttgtttttattactttaattttgaaacaatataatcttttttttgttgtttttttgagacggggtcttactctgtcacccaggctgagtgcagtggtgtgatcttggctcacctcagcctcgaccccctgggctcaaatgattctcccacctcagcttcccaagtagctgggaccacaggtgcgtgtgttgcgctatacaaatcctgaagacaaggatgctgttgctggtgatgctggggattcccaagatcccagatttgatggcaggatgcccctgtctgctgccttgccagggtgccaggagggcgctgctgtggaagctgaggcccggccatccagggcgatgcattgggcgctgattcttgttcctgctgctgcctcggtgcttagcttttgaaacaatgaaataaattagaaccagtgtgaaaatcgatcaggaaataaatttaatgtggaaataaactgaacaacttagttcttcataagagtttacttggtaaatacttgtgatgaggacaaaacgaagcactagaaggagaggcgagttgtagacctgggtggcaggagtgttttgtttgttttctttggcagggtcttgctctgttgctcaggctggagtacagtggcgcaatcacagctcactatagcctcgacctcctggactcaagcaatcctcctgcctcagcctcccagtagctgggactacaggcgcatgccaccatgcctggctaattttaaatttttttttttctcttttttgagatggaatctcactctgtcgcccaggctggagtgcagtggcgtgatctcggctgacggcaagctccgcctcccaggttcactccattcgcctgcctcagcctcccaagtagctgggactacaggcgctgggattacaaacccaaacccaaagtgctgggattacaggcgtgagccaccgcacccggcctgttttgtctttcaatagcaagagttgtgtttgcttcgcccctacctttagtggaaaaatgtataaaatggagatattgacctccacattggggtggttaaattatagcatgtatgcaaaggagcttcgctaatttaaggcttttttgaaagagaagaaactgaataatccatgtgtgtatatatattttaaaagccatggtcatctttccatatcagtaaagctgaggctccctgggactgcagagttgtccatcacagtccattataagtgcgctgctgggccaggtgcagtggcttgtgcctgaatcccagcactttgggaggccaaggcaggaggattcattgagcccaggagttttgaggcgagcctgggcaatgtggccagacctcatctcttcaaaaaatacacaaaaaattagccaggcatggtggcacgtgcctgtagtctcagctactcaggaggctgaggtgggaggatcactttgagccttgcaggtcaaagctgcagtaagccatgatcttgccactgcattccagcctggatgacagagcgagaccctgtctctaaaaaaaaaaaaaccaaacggtgcactgttttcttttttcttatcaatttattatttttaaattaaattttcttttaataatttataaattataaatttatattaaaaaatgacaaatttttattacttatacatgaggtaaaacttaggatatataaagtacatattgaaaagtaattttttggctggcacagtggctcacacctgtaatcccagcactttgggaggccgtggcgggcagatcacatgagatcatgagttcgagaccaacctgaccaacatggagagaccccatctctactaaaaatacaaaattagccggggtggtggcgcatgcctgtaatcccagctactcgggaggctgaggcaggagaatctcttgaacccgggaggcagaggttgcggtgagccaagatcgtgcctttgcacaccagccaaggcaacaagagcgaaagtccgtctcaaaaaaaaagtaattttttttaagttaacctctgtcagcaaacaaatttaacccaataaaggtctttgttttttaatgtagtagaggagttagggtttataaaaaatatggtagggaagggggtccctggatttgctaatgtgattgtcatttgccccttaggagagagctctgttagcagaatgaaaaaattggaagccagattcagggagggactggaagcaaaagaatttctgttcgaggaagagcctgatgtttgccagggtctgtttaactggacatgaagaggaaggctctggactttcctccaggagtttcaggagaaaggtagggcagtggttaagagcagagctctgcctagactagctggggtgcctagactagctggggtgcccagactagctggggtgcctagactagctgggtactttgagtggctccttcagcctggacctcggtttcctcacctgtatagtagagatatgggagcacccagcgcaggatcactgtgaacataaatcagttaatggaggaagcaggtagagtggtgctgggtgcataccaagcactccgtcagtgtttcctgttattcgatgattaggaggcagcttaaactagagggagttgagctgaatcaggatgtttgtcccaggtagctgggaatctgcctagcccagtgcccagtttatttaggtgctctctcagtgttccctgattgttttttcctttgtcatcttatctacaggatgtgactgggaagctctggtttcagtgtcatgtgtctattctttatttccaggcaaaggaaaccaacaataagaagaaagaatttgaggaaactgcggagaaagtgcgccgtgccatcgagcagctggctgccatggattgaggcctctggccggagctgcctggtcccagagtggctgcaccacttccagggtttattccctggtgccaccagccttcctgtgggccccttagcaatgtcttaggaaaggagatcaacattttcaaattagatgtttcaactgtgctcttgttttgtcttgaaagtggcaccagaggtgcttctgcctgtgcagcgggtgctgctggtaacagtggctgcttctctctctctctctcttttttgggggctcatttttgctgttttgattcccgggcttaccaggtgagaagtgagggaggaagaaggcagtgtcccttttgctagagctgacagctttgttcgcgtgggcagagccttccacagtgaatgtgtctggacctcatgttgttgaggctgtcacagtcctgagtgtggacttggcaggtgcctgttgaatctgagctgcaggttccttatctgtcacacctgtgcctcctcagaggacagtttttttgttgttgtgtttttttgtttttttttttttggtagatgcatgacttgtgtgtgatgagagaatggagacagagtccctggctcctctactgtttaacaacatggctttcttattttgtttgaattgttaattcacagaatagcacaaactacaattaaaactaagcacaaagccattctaagtcattggggaaacggggtgaacttcaggtggatgaggagacagaatagagtgataggaagcgtctggcagatactccttttgccactgctgtgtgattagacaggcccagtgagccgcggggcacatgctggccgctcctccctcagaaaaaggcagtggcctaaatcctttttaaatgacttggctcgatgctgtgggggactggctgggctgctgcaggccgtgtgtctgtcagcccaaccttcacatctgtcacgttctccacacgggggagagacgcagtccgcccaggtccccgctttctttggaggcagcagctcccgcagggctgaagtctggcgtaagatgatggatttgattcgccctcctccctgtcatagagctgcagggtggattgttacagcttcgctggaaacctctggaggtcatctcggctgttcctgagaaataaaaagcctgtcatttcaaacactgctgtggaccctactgggtttttaaaatattgtcagtttttcatcgtcgtccctagcctgccaacagccatctgcccagacagccgcagtgaggatgagcgtcctggcagagacgcagttgtctctgggcgcttgccagagccacgaaccccagacctgtttgtatcatccgggctccttccgggcagaaacaactgaaaatgcacttcagacccacttatttctgccacatctgagtcggcctgagatagacttttccctctaaactgggagaatatcacagtggtttttgttagcagaaaatgcactccagcctctgtactcatctaagctgcttatttttgatatttgtgtcagtctgtaaatggatacttcactttaataactgttgcttagtaattggctttgtagagaagctggaaaaaaatggttttgtcttcaactcctttgcatgccaggcggtgatgtggatctcggcttctgtgagcctgtgctgtgggcagggctgagctggagccgcccctctcagcccgcctgccacggcctttccttaaaggccatccttaaaaccagaccctcatggctaccagcacctgaaagcttcctcgacatctgttaataaagccgtaggcccttgtctaagtgcaaccgcctagactttctttcagatacatgtccacatgtccatttttcaggttctctaagttggagtggagtctgggaagggttgtgaatgaggcttctgggctatgggtgaggttccaatggcaggttagagcccctcgggccaactgccatcctggaaagtagagacagcagtgcccgctgcccagaagagaccagcaagccaaactggagcccccattgcaggctgtcgccatgtggaaagagtaactcacaattgccaataaagtctcatgtggttttatctactttttttttctttttctttttttttgagacaaggccttgccctcccaggctggagtgcagtggaatgaccacagctcaccgcaacctcaaattcttgcgttcaagtgaacctcccactttagcctcccaagtagctgggactacaggcgcacgccatcacacccggctaattgaaaaatttttttttttgtttagatggaatctcactttgttgcccaggctggtctcaaactcctgggctcaagtgatcatcctgcttcagcgtccgacttgttggtattataggcgtgagccactgggcctgacctagctaccattttttaatgcagaaatgaagacttgtagaaatgaaataacttgtccaggatagtcgaataagtaacttttagagctgggatttgaacccaggcaatctggctccagagctgggccctcactgctgaaggacactgtcagcttgggagggtggctatggtcggctgtctgattctagggagtgagggctgtctttaaagcaccccattccattttcagacagctttgtcagaaaggctgtcatatggagctgacacctgcctccccaaggctttcatagatcctctctgtacattgtaaccttttattttgaaatgaaaattcacaggaagttgtaaggctagtacaggggatcccgcataccgttctcctccttttccccgttgtgaggacagtgcactgtattcactttcaacatccaaggtctgtgttgagagggtgagttgtgcggcccagcttgccccaagcccgtcttgccatcacgaaggatttcctgactcagctgaatctagctcaacaaagcaaaggactaactaagctgcagattttctctccgctgggcttagcctacattatttacacctgttttcagctggatgggaccaaactggggccttgacttctggggtttccacgtgatccccaaagaggagacatccattcattcactcaggtatttgcttgtgcacctactgtgcgccaggtgccagatccaggaattgaagcccaggaacaactcttgcagtgagctccccgggtttttgttttctgaacggtgggaagacaggtcagcaaatagccatgcacgtctgcacatgtgtggctggtgtctgcaggagtaccgagaagacggtgagctctgccctggatggcaacaggaaagggcatccctgtgcagctgtttgtcctggcacaggtggcaggctgccagcgggaccaggaagggaaggggaggatgcacaggtcggagggaacggaacgggcactgcaggtgcgctctgcgatgtgaggaaggaagcaaaggctggttccgggatgatgtcggagaagccttgcagcctagggcactgcccattccacgttacccagtgagtcaaagcctcccagaaagacatttagtcactcaaagccagtgcaggtctcagctttgtccggggaggaactttcactctagaaaacacgaactcatttccctttgaggaagttgtttctccaggatatcatttccagccaccatccaggatgctgggcaggtgctgcagtgcccaaggcacggctgccgaagaagcttgtcccttagaaaccccttgtggcctcggaggcgcctgcctgcctccctgagaatggaaccctgttgggccgccaggctcgctgggcaggtgctggggaaggctgggtcaccgtgctgagcccctcacaggcctgggagttgtgcttggggaggagagctcccagctctttggctgcctcccaatcatggccacatctcacaaacaataccactgtccacgaaaaatgaaaaggtgcctggttctaacccatggccccaaccatgaaagagcccttagaatgtgggggtttgactcgaacagtggctttgagtctcccaggggggattagtgtcctaatgccctgagttaatgaattgacttgttggacagggaaactcagtgaggttcattttctgtggggggacgtttgtcaaatgctgtgaaatcagttgtagcatacgcgacgctcagctgctccgacagtgactcagccacggctccagctgcttccccagccctgtagtggaggtggcagatggtgtcatcagcctggcgcagagggctgtgcccactggcatcacaagggccaggcctgctggtcctccagccactggatccaggtagttacatatgggtttaaaagaagagaggcagggccagttgcggtggctcatgcctgtaatcccagcactttgggaagccgaggtgggtgatcatttgaggttaggagttcaagatcagcctgaccaacatggcgaaacccagcctccactaaaaatacaaaaaaattagctgggcatagtgctgggtgcctgtagtcccagctactcaggaggctgaggcaggagaattgcttgaacccggaaggcagaggttgcaatgagtcaggatcatgccactgcactccagcctgggcaacagaacgagactctaaaaaaaaaagatcaataaataaaataaaaataagagaggcagggtgggaatattacttgaggccaggagtttgagaccagcctgggtaacaaagcaagaccctgtctctaccaaaataataatttaaaaaattacccgggaatggtgtgacatgcctgtggtcccagctactctggaggctgaggtgggaggaacactcgcacataggaagttgaggctgcagtgagccgtgatcacaccactgcaccactctagcctgggtgacagagcaagacctcatctctggggaaaaaaaaaaaaagaagaggcttggaagccacattgttttttgtcacttataactagagtttcgtccatcaaaagcccattctgcactgatttcagtgataggggtctgatgctggcttggaagagggcctgacagcttagagacaggcttggagttccaagttgatgaaagaacgatgaataatgaaaaataatgtgttgttctaaagtagtgccttttcatactgagctagggtataatttgggtccatttcaagggaaatatactagcagaattcatcaaagtagcccctcgaagactggtgcctgctgcctacgggacaatttaatcagtggttccagctgcacatctagagttgggaacactgaacccaggctttctcatgcagatggggtgtggattgctaaggtggctgtctcctagcgctgcagcatgagtgaaacacgtgtccattctacagagacgcggctccgtgatgctgaaacctccttctttttttttttttttgagacggagtcttgctctgtcgcccaggctggagtgcagtggcgatatcttggctcactgcaacctccgcctcctgggttcatgcaattctcctccctcagcctcctgagtagctgggactacaggcgcgtgccaccatgcctggctaatttttgtatttttagtagagacagggtttcaccgtgttagccaggatggtctcgatctcctgacctcgtgatctgcctgcctcggcctcccaaagtgccgggattacaggcgtgagccactgcaccccgctgaaacctccttctagataacagcggcgttaagcatttttttttttttttgagatagagtgttgctctgttgcccaggctggagtgcagtgatgcgatctcggctcactgcaacctccacctcccaggttcaagcaattcttctgcctcagcctcccgagtagctgggactacaggcacacgccaccaggcccagctaatttttgtatttttagtagagacggggtttcagtatattggccaggctggtctcgaactcctgacctcatgatccacccgtctcagcctcccaaagtgctgggattacaggcgtgagccactgcacctggccaaaacctcctcctagataacagtggcgttaagcattttttttttttttgagatggagtcttgctctgttgcccaggctggagtgcagtggtgtgatctcagttcactgcaacctctgcctcccgggttcaagtgattcttctgcctcaggctcctgagtagctgggataacaggcatgagccaccactcccagctaatttttgtatttttagtagagacagggttttgccatgttggccaggctggtctggaactcctgacctcaagtgatcctcccacctcggcctcccaaagtgctgagattacaggcgtgagccactgcacctggcctttttttgttttttaagacagggtctcactctgttgatcacagccacagctcactgcagcctcaacctcctgcctgggttcaagcaatcctcccaccttggcctcccaggtagctgagaccacaggcacaagccaccatatctggccctacgtaagctttatgtgggtgcaataacagatctcaaaccagctctcagctcaagagaaggggaagctgggcacagtggctcacgcctataatcccagcactttgggaagccgaggcaggaggatcacttgaacccaggagttcgagaccagcctgggcaacatagggagacccctgccctccctgtctctgaaaaaaaaaaaaaaaaaaaaagaaaggagaggctgggcttggtggctcacacctgtaatcccagcactttgggaagcccaggcaggaggatcacttgaaccctggagtttgagtccagcctgggcaacatagggagaccttgtctctaaaaaaataaatagagtgagagagagaaggggaagtcaccgggaggacacacatggagcacgcagcccaaatggggctcctctgttctccctgcagagtcagttcgtacctttcacatgcacaaaggtgttgatccaaccgaagcaatattgattcttgttatattgctttattgtggggtcagtgtcagagtaccacgagttttcatcacgcaccgttctttccccagctgcagtgtgtttagggggggaacgaggccccaccccctatccctatcgcctctgcctttataacggctgctactctctgagcacctgttgagttctttcaccttccagatctaatgtgctatccccacccctagagaacagggctgctggatgccacatggctcccagagaggggctgtggtcagggaagccccagctccaagggggctggaaaaccccagagctgcccacgtgcggcaacacagtctggtgctgcaggtgtgaggacggctacaaaatacctgagccattctgtcactctgtctgaactctgtttgaaatattgtttcaataactgctaggctggtttttccttcctgactatattcctcaaaccaacaagagcctagcagaggaaagcatggccaaaacgccccaagaagagagccttggcttcacctccaagggccaccatccgggaggatgtcctcagacctctgatcccctctctgcaggctctgcccagccctgtgtggcaacccagaggaagcctccccttcgtttgagatttaaccccagaccttaggcgatggctgcccagcctgtcccttccgcctgtgtggctgcccacgcgggcgttgctcatggggctagtcctgggtggatgggtgggggcctctcgccggctcctctgcctcccacccccactggcaccccacgcctgtcctagaaggttctttctgcctgttttctccgtgagtgactggacaggcagaggccggccttgctggagggggcatttgtaattatgagtgaatccaaaacaaggttttttccttccgcagccccccgcccggctgtggggcccagccactgcacttcaccggatgccgtctggttggtcctcaggactgatacagaccaggaccccagggccagcccgtgccaggctcctatgcttccaggagcacgggtgggtggtcctgctgcctggccggccatcctcctggggtcggtctctggccgatcctccctcctcctctcaagccctgcacagcccggccaggcaggtgcatcttgtttggctgctgaggagccgggggttcagggaaattaaggaacgtgcccagggacccggggccagcccgtggggacgctgggattggagcccaagccccaggttcgccgcgcggctctcgacttcctctcctttcccccaggggcgagctcagcgaccgcagagaggtggggtcgatctccctgcgaccccagggggcccgcgaggccagtgcgcgggcaggagcggggacgtgctcagaagagccgggcgccgccgcgcccgcccgccccccgtcccccggctcccggctccgcgcgccccccgccgcccccggggccctgctacccccgacccgtcccctcccgccggccgcccccatggcccggctgggcgcgctgctcctggccgccgccctgggtgcactgctcagcttcgcgctcctggccgccgcggtcgccagcgactactggtacatcctggaggtggcggacgccggcaatggcagcgcctggcccgggcgcgcagagctgctctcctcgcactcggggctctggcgcatctgcgaaggtaaccggccaccgcgccggccctcctccctccgcgacctcgtccctccgacacccccttaaccccgccctgctcgtgttgccccgccagacccccttccaggacccctctcttgcatcccgctctgccccagggtgtctctccgctccctccccatcaccctccgtcttcccccaaaactgacagcccaagggctacaggagggagggagcccagttcggggcccctcacagccggaggagggggctgtggggcgacagtgggggagggaagcctagaggtgtgtagttggggggcctcatccaagtcaccaggggttgtttcttgatcacgctccccggggtttgggcctggcagccccttgtccccgtccctgtcaggcactgtcagagctgttcaccccacacctcctgatgccgcgggggcaggggttccaaatgtgtacagaggcttcagagtccggggagagagaaggggatcccagcaggctggagggtccacagggccccctccgttccccccagctccctcctccggagctggggccagcctggggagcttccccttcacagcgcgagggctggcagggcaggggtgtgtgtgtgagtgagcatgtgtgtgcatctgaatatgtgtgcatgtgctgaacatgaacatgtgtgagcacctggctgtgtatgtaaatatgaatatgtgagtgtgagtgtatgtagttgtgtgtgcatgtgaatatgagtgtgtgagcatgtcagtgtgcatgtgtgtgcatgtgagagtgtgtgggcatgtatatgagtgagtgcatgtgtgggtggtgcacatgtgctggtggcttcctcagtgcaactggggaggagttaggagccttgtgttcatccaacagactgcctaactgtgctccaaagacctcctgacatgcacctgtgtgcacgtgtgcacacgcctgtgcctatgcaggtggctctgcacgcgtgtgagaaccagagagtatgtatgcccacatgacacgagtcaggaagattccagagcgaggcttcccaggagcccgttttgtacaccctttttcctttcaggcaaagcctgagttccacacacaaacgcattacaaggacccctgcctgagggactctgagggggcctccatggagcgtttgaaagtttaaacatgcacctgtgcaggcataacttgcacgtgaaaataaacaaggtgaaggctgggcccggtggcccacgcctgtaatcccagcactttgggaggccgaggcgggtggatcacgaggtcaggagatcgagaccacagtgaaaccccgtctctactaaaaatacaaaaaattagccgggcacggtggcgggtgcctgtagtcccagctacttgggaggctgaggcaggagaatggcgcgaaaccgggaggcggagcttgcagtgaaccgagatcgcgccactgcactccagcctggggtgacagagcgagactccatctcaaaaaaaaaaaaaagaaaaagaaaataaacaaggctaaaggtcttgggccttttcatcccacttggagtcccagccctgagtttcagcagaagagaagctggcagggccctgtggtgccagggggtcccctgggctcgggtaggctgctgggtgcaccacagcgtccaggccccaggcttcgaggcctatgtttcccagggcagaacggctgcatcccgctggtcgacccttttgccagtgagagcctggacgtctccacctcggtgcagcacctcatctgtgagtcctgggtggggccacctccccatcctttccaaatattcaggcaaggcagatcccagccatccccatccccatcccgcagcactgcttccactgcccctgcgtttccaagaggacgtttccacgcagacctgtcccagtgctgtgctgctgtccctaaccacaggtgcccagctcccagcctatcctgttttcccctgtctcagtttccctctcagtggtgatggctcatccctttgttattggggaagccaggcagctcccagcttggctggatcctgcgggccttgcagactcctggctccccatttaggactcgattcttccagatggcctgctgtctacctggctggcaccttccacctggcgggttgggggacatgtgaggcctggggatgggggctgggagtgttctggggacgcctcccctcctggccttaggaagcccctgccagagtcagagggggccactgggagggtccagtggtgtccacagagatgggcgtcagccgcttttcctgagaagacgaagcaccacgtcactgtcctccggcagacaagtgctgaagggcccacctggaccagaattctcacctgagccccctttcctgcagtgctgcaccgtgcagtcattgtggtcctgcccctgagcctggtccttctcgtgtgtggctggatctgcggcctgctcagctccctggcccagagcgtgtctctgctgcttttcaccggctgctacttcctgctggggagtgagtctggggccctgggggaatggctccaaagatgggagctgggccacaggtcccgggagtggggtgctgcctctcctgttgccctcgtcccctgctcccttctgggcgggtgctgagtctggcgatggagccgtggcaggcagctccctgtggttccagaaggtacccatgtatatttgttctcacgttgctataaagaaatgcctgagactgcgtaatttataaagaaaagaggtttaggccgggagcagtggctcatgcctgtgatcccagcactttgggaggctgaggtgggtggatcatctgaggtcaggagttcaagaccagcctgaccaacatggtaaaaccccatctttactaaaaacacaaaaattagctgggcttataaagaaaagaggtttaattggctcatggttctgcatgctgtagaggaagcatgatgcttggcttctggggaggcctcaggaaaatgacaatcacaggcggaaggccaaggcagggagccagcatttcacatggctgggacaggaggaagagagtagggaggtgttacacacttttttttttttttgagatggagtttcgctcttgttgcccaggctggagtgcaatcgcatgatctcgactcactgcaacctccgcatcctgggttcgagcaattctcctgcctcagcctcctgagtagctgggattacaggcatgcgccaccacacccagctaattttgtatttttggtagagacggggtctctccatgctggtgaggctggtcttgaactcctgacctcaggtaatccacctgcctcagcctccctaagtgctgggattataggtgtgaggcaccgttcccagctgggtgctacatagtttttttttttttttttttgagacggagtctcgctctgtctcctaggctggagtgcagtggcgcaatcttcgctcactgcaagctctgcctcccaggttcatgccattctcttgcctcagcctcctgagcagctgggactacaggcacctgccaccacgcccggctaatttttttgtatttttagtagagatggggtttcaccatgttagccaggatggtctcaatcttctgaccttgtgatcctcctgcctcggcctcccaaagtgctgtgattacaggcatgagccaccatgcccagccctgggtgctacatacttttaaacaaccagatctcagaactcactcactatccagagaacagcaccaagggaaatggtgctaacccattcatgggaagccactgccatgatccagtcatctcccaccaggcgccccctccaacactggggattatcattccacatgcgattcgggccgggacaccaaaccctagcaccgtgataggagcagggcttctggttgtgggtcagagcctgggacagggaggagcaccggggtccaagcttcttggtgcggggggcatgagggcctccagggcaaccccaggacctgctctactgggtcagatcatgcgggggggcctggggccagcccctcaccacacccttctccttcctgtactgtcctggtgggaggagcaagggttccggggtttggcacagatgaggcagggccaggcatgaaggcaggtgagacagggcaccagaggcctcagctctgaccccagcacaggctgagactgtaaccggtaaccacccatccactgacgcggctccagctctgactacatgccgagtgctggccaagtgctcctccgaaggctcctccgagggccccccagtcccagctgcaggtgagaaatctgaggcctggagagggccgagggcctgggctccccttcacccccactggtgctgtctcctcagtttccaccgactgcccagcactggctgttgcggaaggtggactaggggctcctgacagtctgtcctcagccgcccctgtcaatcaaggctaggcccgagccaggccctgatgtctcaggccagctccactgtcaaggctgtggccacaaggagcagaccatccagggctgggggcaccctccctgtttctctgggaggcctctgtcactgaggaggcccgactgggtgcagagattggggaaaccagcagccttggtattggtcacaggccacatgagaacaacagtgaagtcaaggtctcctctagacaatgaaatcaggaagaatccaaatgacctgaccctgcggcccatctgtgagtgttcaaaatccaattaagaggaccttcgggagccagcgactagagtgtaattgggttgggattgtaaccagaagaacttacagggacacggaccctctgcattgtgcctgggagcgaaggcaccggctagggggtggaggggccggaggtagctggtggatgggtgggggttccactgcgactccagcctccccaggcagagggggcctccatcctagtatgagggtcagctgtgggccgaagcacagagggctctcaggatgtcacaccaaaggcacctgcccagggtcagctcggccctcacccctcactagcactgcaaggagggggagggagatagagggccccagatcgattgggtgcccttccctgagacaggatcttggggggcctgggggaccgacagggcccacggtgacagagtcctttagagtttcccagcttgaggttgcaggtgccagccgcagaggcctcctttaggaggtctgccaggagctgagcctgggccccatcaccagggatttgggaggtacttcaggtcccagtttgggagcttactcttcaccttcattttgggagaaaggccgtgtcctcggccaggctacaggaggcagctggtgtttggagagggctcagctggtggggcggcctgccaggaagtggggccttgggctgcagctgcagccagtgctacaggcagagacaggcagagacaggcacctcctgccgcacggtcagcccccgctgctgggggctgacccccacccctgcttctcccagggaccgcttcattcaatttggcttcacattcttccccaaaataaatccataatttctgttgctacgctgcccagccgggcaggcatccgtgtgtcctccctccctcagcctccccatgccttcttctccccactctctgtcccactcttcttcccaagtttggttcccaggaggaatcacagaagaccaggctgtgttgtgccccttcactgggcaccagtgagatccagacctggccctgaatgtcagcttgggtcagttgccttcttttggctgggcagtgcccagaggggaccctgtgcacccaggaagtgcctgtggggaaatcagggccacctgcccccctggctaacattccctacagtcggcgccaaggacaggctttctcatcagcctgaagctgtgggaagggggtggcactccgggctggttcctccaagctcagtggacaggaaaatgccctggaggcatgggccgagtcccctacctagctcgttgctggaccctgaactgccggatgaagcctggtgcccgccaccctgtgcaaagcccagcttcattcctttgacaacagctttgaccatgtggagagcgggagggaggagagaggagggcccagggcaggcatcctcccctggggaagggcctgaaactcagagctgggaggacaggggggctctggaaggggagtcagagggagggggatgttagccccggaggtagggagggcaaaggtgtgaggaagaggaggcgggggtgcagggcagggactcactctgatcagagcactgggcaacgctgctgccagcagaggccatggctctgtgtgtgtgtgtgtgtgtgtgtgtgtgtgtgtgtgaatgtgtgcaaatgtgttcgtgtaggtgtgcatgtgcatgtgtgtgctgggggccatggagggtacagagtgtgtggggggcagttatgtgagtgggaaccatgttgaggggcaggtggcactgtttgcaggaggctttatgggatgaggtctctgaggtttgaggactgaattggagcctcttaaagctccactccgccaaatgcagttgactacctttagccctgtccaaccccaagcaggaggtggtgtctgggagaggcggccaggttgacagccaggcagggctaaccatgacaggaagggcggtgtgctgcctgcagctctgcctgaatgctagcggggccggggatgctgaggccatgtctgcaggaccacctgggcctgggcccgctagagcagacaccgagcagctgccctccccatctctcccccaggtgtcctgacactggcgggggtcagcatctacatcagctactcgcacctggcctttgcggagacggtgcagcagtatggcccgcagcacatgcagggcgtccgcgtcagcttcggctggtccatggccctggcctggggctcctgtgccttggaggcattcagcggaaccctcctgctctcagctgcctggaccctcagcctgagccccccaatctgtggtcatctgagtccccagcaggtgggagggaggtaagagggggctgggtttccctttgcacctcccgggattgggcggtcagggccagggccccttgagagtctgggaatcccttctctgggcctcgctggggtcctggccaggaaggggctgggggtgacaaggggtggagggcagagccaagaatccagctcctcatgtttctctgtagatatttggggaggctcccctgccccggcaggcttgttagggactaattggttcaaccgcctcttagagatgagaagagccagtccagaaagaggaagtaagtggcccaggtgacacaggctgagtggcagagttgggtgggggcacctctcaagggtgtggcctgaactcgcccctcccccagcaggctagtgagtcactgctgcccccattcctaaggacctgggagaaaagtaggtgcctgttaaatgccgcaggactgggctccatgctcctctccagccccgcaatggccctactcaatgactaccctttatccattttacagagggggagactgaggcccagagcggcagagggacccacccagatcgcctggcgccagagagatgccgtctcaggccaaggcctccctggcctctgttctgtccactctccccgaagggcaggcttggtggagaagaggctgatgagagggcccgagagcccctccgatttgcaggggtggggggcaaggagctgagcgatccagatgtacccctctgccccctcccttgttctcaagcctgctaggtacttttcactgagcacttccgggaagagcaggcacccagatctctgtccttgtcctggcacaggctgctgctgcttccggcccccgacccttcctctctgcagcaacccgggggaggtatgccactgtgagtgccctggtgggcacactgagctggcagagatggaagtcccagaagggtggggtgggggtgtcatgccatggtggaggagtttggggccactccttgcctgcctcaaagggggcctggctgagggtgcttcttgaccacaggggccagggctgcctagggtggcgcagggctgggcctggagtttgggatgcaggcttgttaaacacagggcagaaccccaggttgggaggggctcagtttgcaggcccaggcccgcaggcccactgctggtcccagggtgagacaggtgagaagagggatggccagcacacacttgagtccccttgggccacaaaggctggggcacgcccaccgttatgcagatggacagttgaggtggctgcaggagaagggttcccagggcctgtacaacacgtggaagcactaaacggccccgtttggggtttgggggcccttcccgagtcttgagaggtcttgagaggtgtgctggggaaggtggcagcctcttgtagcttgatcttcctccaccctgccccacccctaggtctctttattgattcaaaggttaaggaagctcctgggggcttgagggggtggcacagttttggtggggcccagtgaggacaaatctggggggtgagcagggcctcctcttcctcctggtgtttgaacgtttaccattccatgtgggaccattgtgccaatttgtccttaagtaaatcacttgtgctgtgtgcagtataagccttttatttttcttagaacttttcaaaataggtaacacatgcctgtctgtcataaacagtacaaacgtgagcaaacactgtcaccagctgtgcgcgtgtctgtctgtccatccagaggtgttctgagagcgtgtgtgcacgtgtgtgtgtgtccactgtgaagtcatctgtagacatacaagcctacttcttattcccagatcagcacagggagtggggaggggggcctgggtctccgttttggaaacgggggctggcttcgtgggcatgtcctctcagcttgggaggaaaggtgtggcggactcttcctctcctcctcctggcccccaacttctgctgatgaggcttctcctgggggtttgctgggaagccagggatgtgagcctaacttcaggcctctcacggcagatgtgcttgggctctggggataggacactggggaagacacaccggggaggggctgctgggaccaccagcgttcccggagagtgtgtgtggtggggagggtgtgctgcttgacccttcccttccagaacagagctgcccaccttgcctccacgtgttctggggcgtgtggaacttagccaggccaggtaacttcttcactctctcattggccagccacatccctcaccctctggttggttagtggactccctcacgctctgattggctagtcaactccttcactctgactggccagccacatccctcaccctctgattggctagttgactccactctggccagttgatgccccacactctctgattggccagtcagtgttccttaccctctgaatggccagttaactccctcactctctggctagtctccacagtgattggcccaagggttctgtctgtgttcatggttctctgagtgtcaggctttgcagctgtgattaagaggcggatgagtgcctcccagggaagagacagtgcatggttcaaggtcacccagaatagacaacatgacatcaggctcaaatggtgctgcgtcgtttacagcaagaggagagagcctgtgcaccaaaaccgcttgcaatggtggttcccacggtgggatccactggcccacgtgggcctctttcttcaattttttcttagaatttttcaaaataggtaacacgtgcccttgtgccacaaatagcacaaaggcgagtaaacactgtcaccagctgtgcgcacgtctgtccatccagaggtgttctgtgtgtgtgtgagcaagcgtgtgcacgtgccagaaacaagccctgactcagaggcccttcccccagcatcgaaggcgcttgctcctctcgccacagcaaagccccttctccagggatggcccagctccgccaggtcctgggcccactggcatcccactcgggcatgtttatctgcaccacctggtaggtgcccctgccaggggcctgacctctgtgaggacaggggcctctcatcagctcaggccctatgcccaaccagcatttataaatgcagtaggcagcccgcaagagagcccccatctgtcctcatctcctggtgctcacgcctctgtaggccttaccacactgagtcagcgctgacttgggtgtcaagtaggaagtaccagcgtgtgagggggtcataaaaaggcagcttctgcctcggtctcagactgctcaccctaggggaagcaagtcatcagactgtgaagacactcaggaagccctgaggagatgctcacatggacaggactgaggcctccgccaacagcagcagcagcgtgtcagctgtgtgaggacaccacctgcgagaggattattcagataatgcagttctcactgatgtcttgacggcaacctcgtgagaaactccaaaccagaactttccagctgtaagccactcccaaattccgcctctcccccgctttttttttgagacagggtctcactctgtcacctaggctggagagcagtggctccatctcggctcactgaggcatggcccttctgggctcaagtgatcctcccacctcagcctctcgagtagctgggaccacaggtgtgagtcaccaggcctggttactttttttgtttgtttggttttggttttttttgagacagagtttttgctctgtcgcccagtctggagtgcagtggtgcgatcttggctcactgcaacctctgcctcccgagttcaagcgattctcctgcctcagcctcccaagtagctgggattacagatgcgtgctaccgtgcctggctgatttttgtatttttagtagagatggggttttaccatgttggccaggctgatctccaacttctgacctcaggcgataccccatgcctcggcctcctaaagtgctgggattacagacgtgagccaccacatccagccacctggctactttttgtgtttgtagagacggagttgcaccatgttggccaggctggtctcaaacttctgggctcaagcagtccacctgccccggcgttccaaagtgctgggattgactacaggtgtgcgtgagccaccacacccggctcactctccaattcctaacccacagtgctatgggaaataatgattgttgctttaaggcagtatgttttggggtcatttgttatgcagcaatggataaccaatataatgcacttttgctggtgcttgccccagacagggcagtaagggagacacggaattacaggggcttagagttactggcttccttctttttttttttttttttgagacggagtcttgctcttgtcacccaggctggagtgcaatggcgtgatatcggctcaccgcaacctccgcttcccgggttcaagcgattctcctgcctcagcctcctgagtagctgggattacaggcacctgccaccatgccctgctgatttttgtgcttttagtacagatgggggtttctccatgttggccaggctggtcttgaactcctgacctcaggtgatccacctgcctcggcctcccaaaatgctgggattacaggcatgcgagttgctggctttcttttgattctctgagttaccaccttctccagcacaggacagcagttctggggccctgggaactcctgtatacggatcttccacagtatggatctggattcttctaagagatggagggacagagggaaactcccctttgcctgccacgtggactcttctccccttacactcactgcagtccaagatttccaccgtcccctccctccctcccttccttccttttctttctttcatttctttcttgagacggagtttcactcttctctggtgcccaggctggagtgcaatggtgtgatctcaggtcactgcaacctctgcctcccaggttcaagtgattctcctgcctcagcctcccgagtagctgggattacaggtatgtgccaccacgcccggctaattttgtatttttagtagagatggggtttctccatgttggtcaggctggtcttgaattcctgatctcaggtgatccacccacctcagcctccctaagtgctgggattataggcatgacccaccacacccagcccatgctgtggtttctcatagctcttcctctagtccaggccccctcctgagctctgtgcttacattcctggcagcttcttaaccacctcttcttggggtctcaaagttaacaatcttaagctaaagtctctactttaccattctaaacaatcctccttctgggattcctattaagggctttctaaagcactgatctgactgtatacctcccctctttaatacacacacacacacacacacacacacacacacacacacacacacgcagagatttatatacatatatacatatccagaatgaaatagacaaaaatattaatagttattcttagatgataaaaatacaggtaatttttattttcttcttcttcttctttttttttttttttttttgagatggagtctcactctcttgcccaggctgaagtgcagtggcgggatctcggctcactgcaacctctgcctcctgggttcaagcacttcttctgcttcagccccctgagtagctgggattacaggcacgcaccaccaggcctggatacttttttgtatttttagtagagatggggtttgctatattggccaggctggtctcaaactcctgacctcaggtgatccacctgcctaagcctgccaaagtgctgggattacaggcatgagccaccatgcccagcctctttattctttttaatattatcacaagttatttatttatttatttatttatttatttattttttgagatggagttttgcccttgttgcccaggctggagtgcaatggcacgatctcagctcactgcaacctccacctcccgggttcaagtgattctcctgcctcagcctcctgagtagctgggattacaggcacatgccatcatgcctggctaattttgcatttttagtagagacagagtttctccatgttggtcaggctggtcttgaactcctgacctcaggtgatctgccctcctcggcctcccaaagtgctgggattataggcatgagccaccgtgcccagccattatcacaagttatttatacttcctttctcttgttcttgatcagtctcattagaggtttatcaattttattactcttttcaaagaactatcttttgtttatctggatattttctcttgatttatctccctcttcactaattctctctccagctgtgtctcatctactattcaacctatctactgagttcttaagttatcatatttttcagttctagaatttccatgtggccttcttatagttccaagattcctgccaaattttttttatcttgacttataattccttgaatattttattttttatttttttgagatgggggtctctctgtgtcacccaggctggaatgcagtggcacaatcttagctcactgcaacctccacctcctgggaggctcaagcaatcctcccacctcagtcccccatgtagctgggtctacaggtgccacatctggctaatttttgtacttttaagtagaaacagggttttaccatgttgcccaggctggtttcaaactcctgggttcaagcaatctgcctgcctcggactcccaaaatgctgggattacaagcatgagccaccacacccagcctagaatatttaatttaattaattaatttatttatttattttgagacggagtctcaccgtcacccaggctggagtgcagtggcgcaatcttggctaactgcaacctctgcctcccgggttcaagcgattctcctgcctcagcctccagagtagctgggattacaggtgtgtgccaccatgcccagctaatttttgtatttttagtagagatggagtttcaccatgtttgctaggctggtctcgaactcctgatctcaagtgatccacccacctcggcctcccaaagtgctgggattgtaggcatgagccaccacactcaagctatttatttttttagagatgggtctcgctctgtcacccaggttggagtgcagtggcatgatcacggttcactgcagccttgaactcctgggctcaagtgatcctcccacctcagcctcctgggtagctgggactacaggcacaagccactttgttatctgggtcacctaagggtctgtttctttttttttttttttggagacagagtcttgctgtgtcacacaggctggagtacaacagtgtgatcttggctcactgcaacctccacctcctgggttcaaatgattcgcttgcctcagcctcccgaatagctgggattacaggcccacaccactatgaccagctaaatttttttttggatttttagtagagatggggtttcaccatgttggccaggctggtctcaaactcctgacctcaagtgatctgcccgcctctgcctcccaaagtgctgggattagaggcatgagccactgcgcctggcctcttttgtccatttttttctcattttcaatcacatcttgtcccattctatacctggttatttctgattgagtgggggcatcccacatgaataactgtagaggaaattggaggctctgggagacgtcaccttcctccagagaagacggatctttacttctggcaggcagctaggccagaggcacccaccaccccagattgccgtaatcagggatcacagtgcttcacagctggcttcacttctcacgatggtcagtctacttccaattgcccttactcctagtgggtggcccctcagggactcaacccaaagcttgagggtttttttgtttgtttgtttgttttttgagacagagtcttgcttgagggactcttaccagggtctttcagcaggccttgaacttcagcttctgccctcagccctgtgtgcctgtgaaaagttctgctcagttcctcagctcccgagcagacgcgtcgaggaaaagtgtcccaaatgccaggctcacctctctaggttccctcttctcccagatcttgacctcacaattcatgactgccttgcaggctcttcagtactatcagattgtttgtttgtttatttgttgagacagggtctccctctgtcgcccaggctggaatgcagtggtgtgatctcggctcactgcagactccacctcctggacttaaatgatcctcctaccccaggctcccacgtagctgggaccacagatgcacaccccaccacgcctggcttcatttttttttttttgactgagtctgcctgaactaccctaagagttgctaaaagtaagatttactcccacatcatctacaatacagacatattattttgttaagcagagtaatttcttttccttttttttttttttgagacggagtctggctctgttacccaggccggagtgcagtggcgtaatctcggctcactgcaacccccacctccccagttcaagcgattctctcacctctgcctcccgagtagctgggactacgggtacgcaccaccacacctggctaatttttgtatttttagtagagatggggtttcaccatgttggccaggctggtctcgaactcctgacctcaagtgatccacccacctcggcctcccaaagtgctgggattacaggcgtgagccaccatgcccggccctgagtaatttattttctaaaaaggaaaatacgtattagaggaccacaagataaaatggaaatccctcaccacggcagttaaagccctgaccatcaagttcccatgtccctttctgcttccttctgacgtttcccttcctgaactcaggaagctgtaactggccacgtggccctgaagaaagggctcctctctgacctagagcgaaggcctgccccgctgcctcccgagctctggtgacgggagctggaagggtgtccttcctgtccctacaccctgtcccagacactggaggaattcagtgtgtgctgacaagcatgggggaggtcctaaccctgagtgttgtgggggtgaaggggaccaaagagccccaggagcaggtaacacctcctctgctgcctgcttgctgggaacacctccactccctgcttccaccccagcccgggcacagggtcccggtcactccgtcctcaggactccaacggcctcagcacaaactcccacttcctcagcaccagttcagtgtcctacaccgagacgtcgcggtgccacacggaagcacggactgctctgtccataggaacagtggcacgcacgccacgtggccagtgtgggccagctcatcagcactcacggcccgcaacccagccatgctcaccaccaccatgttcgtctccacgaaggtgggatcaactgagcagacggacaacaccagctcctggagtcctgggccaggtcctgaggtgagcagaggtgaccccaggccctgaccctgaccccattgccagcaaggtcacccgggaggcagggggcagttcggtcacggtaggagaaggaagggccctgtgtcctgacttggcctttgcagtcacacagactgggctctgctgcgtttagctatgtgatctcagacaaacctattgacctctctgggcctctgtttcctcattgtgaagtagggacatcatgggattgttggaggactcagtgagcagatggaagacccaggttagaggctctgccagactctgcagagcatcacaatcctggccgtccaccgagggcttccccaggctggactctgcgctgagtagggtctgctgaagcagctggtgccctgggtcccgccctagtgactcaatggccaccctgagtcccaggatccagaagcctgcaggcctgctgggggacccccgacggcacagctcaggccaagtcagaggaagcacagggaagcgagggtggggcgtcctgtccaggcaccttgggtgaatctctgggcgttcccatggtcttgccacagtgcctgctttgtgtcaaccagtcccaccagggccaccgcagccagcatccccacctggtgcatgcttccacccagggctttttggaggcgccaggcttcttcaatgaagtccttgggcctcccagccagggaccccactggggcgcccaggccctgggaggtggagaggagagactcctgccagctcacatccctgtccttgggccagggtggggacagatgcgtagccccatctgcagaggtgttaaaggggaacctggggccagctgccagggatggagctcaggaatccaaccctgcctcctgctggggcgccccaccccacctgtctgtgggaggccagcccagggctttcccaccttggagaggcagaaagacacagagtcacagtgctccacaatgtaggtgggcgggacatgcagggccagcaccacgttcatcagctgggccctgtccaggtggacccaggccccataggtctgggccaggaggtgcacctgggggtgaggtgcaggcagagtcagaggggccaggcctgagggaggcatagagggaggagggtcctgggcttagctgcctgaggaatcaggagggatcaggagacctggctggtgactggctctggtgatctgggacccaagcagtcaggctgtgctgcctaagcctccatgctgggctctgggaggatctgggggtgcacatttaacccagctttgtcgcacactgagcatgggccaaacgaccgtgggccaagggtaaatgtgtgtcacctcatttaggctgcacaacaactcgagggagacgccgctgctcccatttcacaggcaaggaacgcaaggcttggagagttaggctgctgcctaactagtgtctggtaaacagcagagctcagacactgcggcctcctcacctcgcacgtgggtggcaaggaccaggtggagggcactcacacgagcttgttcctgcagcctcatggggcacacgtttctgcgccagggcagcaggtcctggtgctgctctgggactcagctctggggacttgggggtgggggcatctctgctgttgggctggtgcagggactaggggccctgacctggggtaataattccctttgtgtctcagcctaggaccacacatgtgtccttcctgtgacaggtctggccgctgatgggtgcccatggcataaatcagaggggactgaaccccaggatgggccaggggcacaggaagccaggatcaggctggtggggggcacacagtggtggggctgggcctacctggcgtaggtagttgatggggaggatccggacccccgagatgctgtgtgagttctccaggcaaatgagctcgcagacctggtggtagggactctggaggccccgcgtgatcatcctctccagctcagccagtccagagtgcagtggggcagctctgggagggagtgggagtgcactccagccctctgtgggtcaggaagaggatgagggctgaggggtccaggggcacctcttggcggagtggggggctcctctggagtaaggagccagaccctgagtcctgtgtctgctcccccgaggcctgggccttggagcctttcctctgttctgtgcatctagacagacgtcccagctggggggcactgggcccctcccctattaactcttcagatgctgctgtctggctcccgtcgggagcgcgggagtgctccgagtgtccactagagggcaccaggcaccaagcaccgcccaggtgtctgcccggcaagcctggggccagccccagccgctgccgcccccacgtggcaaatctggggctctgctctccttccttcctcccctggagaggctgccatcccagccagcttctccatggctgtccctttctcccctccgcaggtcccagcctggtgcctgggaagggggtttgcccctgagcagcctgtgctggctggaggatgcccagggccccaggtgagcaatgcctgctccttacctgagccaccccaccctgctcatagacgtggaggtggcactcctgcccaaggaggagctgggagccccggcgccagcagtgacacatcactgagacagaaggagggcaggtcttggcattgagtctggaggcatgtggccctgctcagcgtggctaggctgagccctaaggctacagtcaactcacaaatgcctgaggccggcaaggaaacagcaccttcaagacacctcagtgctacgtgccagaagaccatcccattaaacacacaagtctaggatagctgtgctgcgctgggaatcgctgggccacacccagcctgcacacctgcgcctggaggcccctccacagagcatcgcctgctggagaagctgctgcaatgctgcttcttggtggacacgcagccgaggcacctgcagtcgtcagaccctggcaggaaacagacggcacacacacactgggaaactggcagtgtttaatcatgggacggtttatagaggggaggcaggagcagggaagcccggagaacaggcctgaggggtgagaggaaggtgtggctgcaggaacccggagccagggctatgtggagaggtccctgacgctggcccagaggccctggggaccctcggaagaggagctagggaggagcagacctgcagcccccactgtcctcctcccccatctccttccagggctccccaccaacccaacagaaatggaggaatgtggtccatgagtgtcagagcccccccatatgcactgaggacctgctaggcagacagaagtcgccctgcgctcaccagagatgaggttggccatagtgttggagggcacaaagagggtgcgccccagccctagcagctccacagccatttcttgcagctctgcggagggacagggaagccgctgtgcttgcacactcgggtgtcagcaccgtccatgctgctttccctgtgtcacttgggccagagcacgccctgagcccaggtgaggcccctagcccgaggctccggtgagcagctgagtgggtttggagccccatccaccagctgcacactctgtgggcttagcaaccacacatccagccccacagggccctcagtcaactctgcaccccacctaccctgggccatggcctctccccgctccccccaagaacctctcttgtggtttgaacctgtccccggcagacctcacacctgtctcacttcctttcccctcagccctttgcaggtggggcctgtggtttctctgctgacttcctttcctcgtcaggagggatgagtggggggctggacggggtgtgagggtgcagctggagggtgaggaaggctcccgctcttgctgtaaagcccactgtggtccccccaactgtggcatcaagtccttagcatgacactcagggctggagtgacctggcctctgccccccctcctcagagcctcctgcactctccacacctgccacatccccacctgcgccctgaagacctttctcaccagtctgcttctgctcctgaagacccctgccctgtgagccggcgctcccttccctgcctgggatgcttccactcagcctgcaggagggctcctctgtgaagcccccttccccgtgagccacagcctcgccccatcctctgcttcccagggcaccctctctagactcccatcaactcaagcgcctccccagcctctccttgagcggcagtgacttgttgacatgtgaggctgcctgggagcatggagatcagcatctccagcaacgctgggcagcagctggatacatgcttagccccagccatcccttaaccccttagcagacgggccctcgggattcaactggtgaccccatggcttgtcctggcctagctgaggggtgtgcacaccccaacagtcaaagtggttcactatggcaactcacaacccagggctggggctgggggtcgctgtaccctggagacactccctaggttattagaacccactccttgcgaggtgcagcctgtagaacctgcccctttctacatctattttccatttgccttctgtgggggaaggcagtgcaggagaacagttgtgggtttcagagtcagaagacccgggttcaaaccttggttctgccatttactaagtatggggcctggagcgcctccctccacatctcagaaccctcctctgcaagactggacatcacccatctcagggggcagctgggtgacaatgcaggacacacacaaccacctggtgagcctatagaaatgcaggttcttctcggcaggccatgtgaatctgcatttcttttatttatttatttttatttttatttttttttttttgagatggagtctcgctcttgtcgcccaggctggaatgcagtgggacgatctcagctcactgcaacctctgcctcccgggttcaagtgattctcctgcctcagcctcctgagaagctgggattacgggtgcccaccaccacgcccagataatttttgtatttttagtagagatggggtttcatcatgttggccaggctggtctcgaactcctgacctcgtgatccgcctgccttggcctctcaaaatgctaggattacaggcttgagccactgcgcccggccggaatctgcatttctaactttcaggtaacagcagcacgcacgcagacggcaagcctatcctgtggcaggtgttcattacacccatttatgtcggaggttgcaattttttgaatttttgccatcagaccttggcgatgaccttgagcagtaggacataaatacctcccagatgcttagcgttccaataatggaacactaggcataaatgggttttaagcgccaagggagccacttcccctgcgtcccagaccatcacggacagcgctccgctgccgcctccacgacccccggcctgcacgccggtcttcgccgtagtcgtcgtcccccacgaccgcctcggccatgacgcacctcatggccggcccgggcctggtcaccttgtcgctgcgcaggcccaccacgtaggctgcgacccccgcgctcccacaccccgcccggagcgccccatgtaccggggccgccgctcgggccagtctgcggagcatggcgcgggcagcgcccgactccccaccccggcgggagctgctgactcctctactccccagcgaaggcggcgagagcgacgtggtcggtgcggccagaattcctagagctgggaagcagccgccctgggccgggggtccagggagcgagccccgtggcacgctgggagttgtagttcgcgctccctcgcggcgggcgtgcgcgagcgtctgcgaacgggccccgtggcacgctgggagttgtagtacgggctgcgtcgcggcggagaaccagcgagcccgtgatgctgaagcagaaggttctgctcattgaaggagaaaccgaggccgagcgagtgtgtgtgtgtgtgtgtgtgtgtgtgtgtgtgtgtgtgtgtgtgacagagtctcgctttgtcgcccaggctggagtgcagtgacgcgatcttgactcactgcaacctccgcctcacaggtacaagcaattctcctgtctcagcctcccgagtagctgggattacaggcgcgcgccaccacgcccagctaatttttttttttttttgtatttttagtagagaggagttttcaccatgttggcctggctggtctcgaactcttgacctcaggtgatccacccgacttgacctcccaaattgctgggattacaggcgtgagccactgcacccagccctgggcgagcttttataacacagacgctcatgtggcacttgccatgtgccaggctctgccccaggccctttgcaaatgttagctcagttaaacctcccaacgactctaggagacaagcactattgctatccctgtcttgcagatggggaacaggagacgcggagctaacggacagctggaggccacttgggtaggaattggtccgggcggggtaccgctgtctccagagggcagccctaaatcactgtttcatgctgcccctaaaacacagcttccctcgtttaccatcttcagtattgatttgttgagcaagttcggtgcgccaggcagtgtccaggtgtccaggtgccaggctgggggacagggctatgtctccagccgggttccagtctaaggggagaccgctaaaagaatgcgtggggagcccctcctccataggcccctgcccctgggtggactgcctccatgggggcagggtggtgctgaagttcaagccagctgtgtggccttggacaagccatgtagcttctttgtgcctcggtttcctcaactgcagattgggctgttgtgagcattcagtgactggatatgtgtttggtgctgaccccaatgcctggcttgctgtaagctcagggtggtcaccccactgtggctgttttttaattttttaagacagggtctcactctatcccccaagctggagtgcagtggtgtgattacagctcagtgcattcttgacttcctgggcttgggtgaacctcccacctcagcctcccaagtagttgggactacaggcaagtgctactatgcctggctaatctttctgtgtttttcgtagagacaaggtcttgctgtgttgctcaggctggtctcaagctcctgagcccaagtgattctccctcagccccacaaagtgctgggattacaggcgtgagccatcacgacctgcccagctgtggctgttattatcattgtcgttactgatcccagcttggaactctgagggcccgggggctttggggtgaactctgacacagtctagactgtggggtgcccttcccccacacagggagcacaggcacccattgccactcagcggctcctcttcctctttctgtcccccataggagaaagatccaggaggggccacagctgctgggccaagcgtctggtgagggtggcccttggtgaggaggacacccatcctagatcagtcatggccaggcctttaccacaggccagctccaggtcaggcctggggacttagggcgagcagaggtggcctgccctccagagctcaggtcccaggggtgggggacaagatgctggccgtgagaggatggcagcgaggaagcagctctaacagtcccagtccaggcagcagggcaggctttttggaggaagcagtgattaggctgagcttcgaagatggagccgactttggacagagggatagcaggggtgaagcctctgggtagagaggagctgctgcgtttgtggccctgagggccagcgtggctggggaagtgagcaggggtggggatggagcccaaaagctacatccggggcctgatgacctctcaggggctctccatctctcttccttcagcttggtgggaattgtaagtacccgcagggtcagtggtcccaaggacacccatgtgatggacaggcttgctgccttcccctccccagagcccttctgggcctgacccacaatctgcaccaaattcctgcccttagaaaacaagccccttatctcattgtctggctccagaccttctgctgggaagtagggggcggggaacggaggcctctgtgggaaggaaaggaggtggtctggcggggcagggactgggggcagggatagcagcgctcaggggagaagggggacaaacaaatggacccccggcccctcgagctatggcagaatcacagaatggcctcctgtttgccaagcttcgcagtctgcaaagcctgccctctgcagcttccctgccaatggtcccagcggctttgcagtggaaggatgggcagggaggctggggtcacagaggcccgaggaccctgcccgagaggcacagctggtcacccaacagggcctttctccctttctcccaaatcagagctgtctccccagataggtggcctctccctgggggaacctggggcagaacagtttccttcttctgggtcctcctatctagtccccgggtcacctgggccagccctgccttgtcccagtggggtctgacagtgtggaggagcaagaagggtgggctctcacacggaaaggtgcagtgaggcctgtggcaggtggaccccatgaccccagcttggcctctggggggttgtctgggctcctacatgtgtgtgtgtgcatgcgtgtgtacatgggtgtgtgtgtgtgtgtgcatgtgtgtgtgcgcacgtgtgtgtgtgtgaccctggctgcaactgagatctgagttgtcttgctggtaagctggggacgggccgcagttcccaggctgggatgagaagcccaaagccctctgtggagccaactctacttgcccccacccctgtcccagcactgaccctcttccctcccctctctgcagttcttcttgacattctcactagaagggtcaccatcactggaggtcctggggtcatctcctgccccaacgcaggctggccccacccccacatgccagctgctcccttctctcctgagcccctgccccccaggactgacccctgcagcccagcccttcccaaacttctgagctcctctgtccgtgggtgcagtggggcccctcggcggggcttcctccctggcctctgtgggatccagcccttctgcctcccagacgcctccccgccccacactctggcttgcaacacttctgttcccgaatgcgctggcctctctttcaccccgagacctctgcacctgcattctgtctggaaaacccccaaccgtcggcacgcatccctggtcaccaccttctaagtcttcagatcttagctgagacgcctcattctccatgaagccctcctggcccagcccagtgggggatggaggtagccctcctcctgtgctgcctatagcaccttttcttcccactgcgcacgggtcacagctgcctgtttactcctctgacttctccgtgtggctgatgccctgtgcctgcagggcccagacgccctcctcctttggtgtgtcctgcatgcctagcccagtgccaggaccacaggactcagtaaacaccagccaggtgactgacaatggagggacatgtggttcgccatcccctgcccctgggaccccccaggcagaagtgtgcacaccccccagggtgtgagacccctgtgcagaaggacatggcgaggattccagaggaacaggggctggcctggcctcagcctctcagagtcaggtctgggggtcctgaagacagccccctccctggccttcttgagagatttgcggctcccctgagcagtgggaggccactgggctggctggagggggccttgcgacataagccccaggtgggctgcctttcacggcgcccccggctccctggcacccgcccaggcgcaggcgctggggtgtgggcacacactcacatgctgagttcagtgtgcggattcctgtaacgctgggctgctggcaggaagtgcgcgccggggaggctgctgctgggaacccagggctggccccgctgagataaagggaggcagcagatcgcagctggagatagcggccctgggtcctggtaaacaggtggggggggtggggggggggaaatgtcctttccatcccatcctcttggccctgagcctgcaggatctatagcgccctagcctaagcccagccccgatagcttgggatccagaggggagttgtcggcactgccatcatcattcccagcctgggggactgggtggcaaaggacagggcgctgggcctgggggcctggctgggcccatggtgggcatgcacttggcccacgtgggggccactgggtgtcaaggtcatgtgtgctgttgggagggtgggaaggggaagggagggagctcctccaagcccctgcacttccccaactgggaccccctagtgggaaagatgtccctctccaggttcgccttcagcaccatctccggaaatccagagtgaggtgccatgagggtgcgagaccgggagagaatggggggtggagtgaggggggcgtgagggctgttccccagccaggtgcagagcaggggggctacagagctggggagaccctgtgcatgacttcaacaggaagccacaggatgttcacctgcactccatcagctcaccgtgggctagcgggagctcggcatggcccatccccagtgcccaacacaatgggcgctcaaatacacttgcttgtttaaaaaattaagaaatttaccacgcatacagaaatgctcatgaagcatatttgtacagtgttatgaataaatacatataaaataaactcccgtgccatagccactcagaccaataaatagtccatggtggggcgtggtggctcacgcctgtaaccccagggctttgggaggccaaggcgggtggatcacctgaagtcaggagttcgagaccagcctggccaacatggagaaaccccgtctctaccaaaaatacaaaaaattacccaggcatggtggtgggcgcttggaatcccagctactcgggaggctgaggcaggagaatcacttgaactcgggaggcagaggttgcagtgagccgagatcgtgccattgcactccagcctgggcgacagagcaagactgtgtctcacacacacacatacacacaaacacaaacacacacacacacaaaagaaatagaccatggccaggattccagaagcttccttcctatttacaacccttccctctgcagaagttactgctgccctgacattcttcttcatatatatatacacatatacatatacatacacatatatgtatacatatatatacacatatatatacacacacacatagatagatagatagatagatgatagatagacagatttgagatggagtctaactatgttacccaggctggtttcgaactcctggactcaagcggtcctcccacctctgcctcccaaatctctgggatcacagatgtgagccaccaggcctggcctggcctgacttttatgaccaggacttgcttttctttatgattttgccaccgtagatgtatcccttaatagcagttgagtgttgagtgtggcctgtgtgtgaactttacagaagtcgaatcagggtgtctccttttatgtctggcttcattaggctgtttgcaagagtcacccgtgctgtggctgtcatttattctctgctgccaggtacttttccactgggtccctagagcatagtttatttctccattctacctgtttagggacatttgggattttgtttccagactggccatgtacggtggtgctggtgggcattcttattcctgtctgctggggcacaggtgcctgcttcgggagggcggacgcctggcggtggggctgctgattctggggtctctcatctgcagctttactaggtgtgccaaatcctttcccaaagtgctggaaatgccctcctcccccactttcccacacttctccatctcggtaacactagtgttatcagacttcttcatcttagctgtccttgtgatatgtggtgatatctcctggcaattttaatctgatcttttttttttttttttctttgatggaatctcactctgtcacccaggctggagtgcagtgacgcaatctcggctcactgcaacctctgtctcccgggttcaagcgattctcctgcctcagcctcccgagtagctgggattacaggtgcccaccaccacgcctggttaatttttgtatttttagtagatgggggtttcaccatgttagccaggctggtcttgaactcttgacctcaggtgatctgcctgcctcggccttccaaagtggtgggattacaggcatgagccaccgtgcctggcctcttttttttttttttttttttttttgaagaaactgagtcttgctctgtcacccaggctgcagtgcagtggtgcaatcatagctcattgcagcctgaactcctgggcttaagcaatccacccccatcagcctcccaaggtgctgggattataggcatgagccaccacactgggccctgctctttctgttaactgctaaaggagagtaccttttattatttatttatttatttatttattttttgagacggagtctcgctctatcgcccaggctggagtgcagtggcgcgatctcggctcactgcaagctccgcctcccaagttcacaccattctcctgcctcagcctcccgagtagctgggaccacaggcgcccgccaccatgcccggctaatttttcttgtatttttagtagagacggggtttcaccgtgttagccaggatggtctcgatctcctgacctcgtgatacacccgtcttggcctcccaaagtgctgggattacaggcgtgagccaccgcgcccagccccttttcttatgttttagccgtttgaattcctctttgtgaagagcatgttctggtcttttctcattgactggtcaggctggttggtatgtgcaagcatactgatccttgcgggttctgtgcgttgcaaagatttcaccccagggctgggtgcagtggctcatgccttcaatcccagcactttgagagtccaaggcgggcggatcacaaggtcagcagttcgagaccagtctggtcaacatagtgaaaccccatatctaccaaaaatacaaaagattatctgggtatggtggtatgtgcctgtaatcccagctacttgggagactgaggcaggagaatcacatgaacccaagagtcagaggttgcagtgagcagagatcgagccattgcgctccagcccgggcaacagtgcgagactccatctcaaaaaaaaaaaaaaaaaaatttccccacagtacagctgcggtggctctcgcctataatcccagcactttgggaggccaagggacggggatcactggaggtcaggagttcgataccagcctggccaacgtggtgaaaccctgtctctactcaaaatacagaaattagccaggcgtggtggcacatgcctgtaatcccagctactggggaggctgaggcaggagaattgcttgaacccaggaggtggaggctgcagtgagctgacatcgagctactgcactccagcctgggtgacagagtgagactctgtcaaaaaaaaaaaaaaaaaaaaaaatttcccccgtgctgtggtttgtctttttttgttgttattgtttgagacaaggtctgactcttttgctcaggttggagtgcagtggtatgatcatagctcactgtagcctcaacctcctgggctcaagcagtcctccggcctcagcctccagagtagcagggacataccaccatgcctggctattttattttatttgcagacatgaggtcttgctatgttgtccaggctggtctcaaactcttgtcctcaagcagtcctcccaacttggcctcccaaagtgctgggattacaggcatgagccactgcagctggctggcttttctttttcttttctttctttttcttcttctttttttttttttttttttttgagatggagtcatgctctgttgcccaggctggagtacagtggtgcgatctcagctcactgcaacctccacctcccaggttcaagcgattctctgcctcagcctccccagtagctgagattacaggcaccgaccaccacacgcagctaatttttgtgtttaatagagaggggatttcaccatgttggccaggctggtcttgaactcctgctctcaagtaatccacccgccttggcctttcaaagtgctgggatgacaggtgtgagccgctgcacccggccccgcttctgtctttagatacggttgcaagctgtggtgtgtgtggacaggggaatggggacttagggattgggctggggggaccctcaggaacccctctactgccttccaggtgtccccagcttgggctgagaccagggcacccccttgtgccttctgcccccacctgctccctcctgggcctaccagcctgcggccgcactggctgctgacagctgggacgctggggtctggcgttatttactgcggcagcttcctcctccttccaggaacttgtcctctaacttggggcggcagcgaggcctctaatctttcggatctcgtttaccggcattggcctctcacttcctgttgctaggcctggaccgaggcacggggtcagctccgtgcactgcgccttgcctgttgccggggcctctgttctggcccctcggcagggaggacagagggtcagatgccgggcctcaggcacagtggccatctggggtagggccagctccacagaggcaggggacccaaggctgagccggctgtgggctctgcttcctggagtccagggtccagcacggggaccaggttattccttcgctcctcctggcttggcagagcgtcatggaaggtggccttccccagactcccccacatcccctcctcccacttctgcagccaccagagccagggcccttgtgggaaaggacagggaagtctcaggagtttgggcacagacaagatccctggagaccgtggggtctgctgccctggagatgtggaatcccaggccttgcccacctcctccaccctgggtgggttccccaaccacccagaggagtgctggcatctcggggccaccagggcatgggcaagagtggctgcccagcccctgccaagggcctgaagccagcgccaggcagaccctgccttgttgagcagtatcttcagtaagggctctgtgtgccgaacacctgctgtgcgccctgcacacttatcccagagatgggattcaaacccaggttgcccagcgcagagaaacagcattctccttctgcatccgtgaaggaagctttgtcttctaaaagccctagcccttctgttaccttgtcctcagccggcctgcttctgtccctgtgccataagccagatgaatttctctcccaggctggccctgcagaggatgagagatggcccttgttagaggcaccctgggcaccccaggcatggctccccagctgatgatagaacaactgagacagacccggcatggtggctcacacctgtaattccagcactttgggaggccgaggcaggcggatcacttgaggtcaggagttcgagaccaccctggctaacatggtgaaaccctgtctctactaaaaatacaaaaaattagccgggcgtggtggcaggcgcctgtagtcccagctactcagaaggctgaggcaggagaatggcgtgaacccgggaggcagagcttgcagtgagccgagatctcaccactgcactccagcctgggtgacagagcgagactctgtctcaaaaaaaaaaaaaaaaaaaaacatctgggatcaggaaacgaggaaaagtatggtcttcatagtggcagagtttgcaggggtctttgggaagaaggaaggttggaacttgaggctgggggatggatcataggggaggggctccatcctagctggggaagggagggctgtcctgctgacattggcctctagaatgggatatgcaggatgacccccctggggcagggaggagaatgttatacttagcatttaaatctcgctctttttaaatgcctatctttcgtgaatgttttataatgcaagtaatgtattcatgcggtcatggaaacttgtaatctaaaaataactatgcatatatcatttttgttggtaagggtgcacgatcaaaatagtgtgaaggtttgaaggtcactttctcctaggtcttattgtttctttaattactttttatttatttatttatttttttggagatggagtcttgctttgtaacccaagctaaagctcactgcatcctcgaactcctgggctcaagagatcctcctgcctcagcctctagggtagctgggacggtaggcgtgtgccaccgcatctggctctaggtcttataatttctgtccttggccacccacctgctgattccaaggtctaggatggcaggatgaaggaaggtcccacatttggggacctgcaggacaggctgcaacagaaaggcctagtttaatgagtagcatgggcgggcctggagaccgagaggtgatgtaggcacgcatggggttcaggcctctctgtggtgagcgcttgcccccgctggaagcagagacaagaccctggctgggtcttctgttttgttttgttttgttttgttttctgagacagagttttgctcttgttgcccaggctggagtgcgatagcgcaatgttggctcactgcagcctctgcctcctgggtggaagtgattctcctgcctcagcgtctcgagtagctggaattacagccacacaccaccacgcctggctaattttgtattttcagtagagatggggtttctctatgttggacaggttcctctcgaactcctgacctcaggtgatccgcccgcctcggcctcccaaagtgctgggattacaggcgtgagccactgctcccggccatgtgccgtctgattaggaacccaagagccccttcctgggaacagaaggacaactggcacctgctgaggcacgcccacttgccgagctgccctgggatccctgggcagagcgtcatcgcttaagaacctaattccacaacaaatatttgtcacgctcctgccagggccctggcaggagcagaggcggtgtgtactgccatgcattcctggtctgttgggtgattgacacatacaagacgccagcggtcctgagagtcaggtgccttcctggaccccttggtgagcggaggtgagttgccatcaaggagggaagattcaggaagataactccaaggtcctcaatccgtccaccagtcagtggatggcaaacataatccatgggcactgattaggtttgccagcccatgctgagtgctgggttcagtgtccttcgtctcctgccaaggggagaggacctcgaatggacgcctgggaccatgatcccattttgctggggaggaaacagattagggaggaagggaaccttggtggtgagcagtaaagccaggattggaacccgcgccgctaaggtctctgcctccctgtaggacccaccctggctgtggggaggcactagcttggggaggagcccctggctggtcctcccaggtgtgtgtggagtcagccaggggcagtgctggcagggcctccaggcactgtccagcctcctcctcttctgcacttggaagaattccagctgtttttcagcctctctcttcctccaggaagccttgcatgatagccctacccctctgccaagacacacaccctcttctccctttttccttggcacctggcttatctcacagttgcctttgtcgtcggccagcgtccctcactgggtttcaggctcatggagggcaagacctgagtctttcattctcaggatccctagcagggggcttagggcataatgagcattcaggaaataactggagaaacgtggatgaggaaacggatagcagagggtggagaggggcttgcttctaaaggcgagacgtgaacctagtgggatgaccaggcagggtgggggtggtggggagttgtggggaggccagtacagaacagctccagggagggcatggagcatggtgtgagcaggaggcctgtctgacctccggggatggccccgtgggacagaggaccttgaaagccaggcagagggatgggatcagatactaacgcccatagggagccctggcaggtccttgagcaggggcatggcagggcaagccttcctttagcccagggtgagcttgcgccaacccgtgctgcagaggagaagggcatggaggatagctactccctctgggtgttcttccggcccggctaccctcagccagagctcaggaatcacactcccctggaacctggagttttggattcaatctttattcaataaatggcttattgggaaccgacagggtggctagagcctgcctggtgttggggttgggggaccctgcctggtggtttgggctctgtgggtgtgtgaggaccactccacggtggtgctggcgttccccattccactctgggctcagcgcccctgacacactccccctgcccactctggaggccaggccccctggtgctgggggaggcactggcttggagaggagcccctggctggtcctcctagaagagagagtctgtggggtgggcctccacagccctgccgggccccacacgggcagctgttcccggaatgggggtttgaaacttttcttttgttggcgaatatgcatgtggtcttaattattaatatgcagcacttatctcccccaaatgttttatcgggattcggcagatccgagtgtgcaggcagtgggtgcgggggcagggcagggatattatgggagcacagggaggccccagaagttggagtgtcctccaaatcagctggatgacccagaggaaggaaagaccctggttaacgatggtcaagttaactctttcaggccctgcccaatgctgcaaaatcgcacctgggtgtttggcctgggtaggcctaccgcgcctttctgggttctggcctatgccgatgtctcccctgccccgcaggaccctggtggactggagggaaggtagggagccgcatctctcagcagcaacccaggacttaaggagggccattgcccttttctggtgggggtgaaggaggaggaagcagcgtgaccttggaatccgtcacctattaacttcccgcgtatcacctgatctcattcggcgtccaccaccccctggaagtgggcttatcgggcccatttttagacgaggaaaccagagtgagacgagtcacagatctgaggacctccagcagagcagggaggtgcccaggtggggggcgggcgggtggtctttcttttggggcagcatcccaaaagaaaggaaaaacagcagggggcgtggctcccctcactgccccgcaaccatccctgcctggccagggccttttgggcagtgccactggagattcctggaagtgccttcgggccacacacacacacatcctccgggaccctcccagccccccactctgcgcttcccgggtttgcaggagggccccaaggccagccgggagccctgcaggacctgggaggaacctgagcctgaagggtctaggagcccgccgtgtctgctctcaagtgccccgcgttcccttggcctgatccccgatcccgtgcaccctgcacccagtaggccctccggggccggggctgaatcagcttcggaggcttcagcaaggcattgcagggggtccctacgggaggtttagtccagggcactcgcagtgttgtgggacgctgggcagggctgatcccagccactgagtcttcccgggcagagagcagacaggggggcattgggatttggaggggcacccgggaacctcctgtcccttccgggccgcctccccttaccctgatttcccttgcagggagggctgtgcaggtttgtggtggggtggggaggacttcctagaatttgttgctttgattggaatcttccctattggggcagggttggggtgagctcttgcccaccctgcccaccccctgccgccagaatcctgggctccctccgttgagttgtgttggggtcggggagcttcgtttatggcatccctgaattcaccccaggctttgaagtcaggctcgctccacaggaaaagctcttccaagagggagattccctggacctcctgggcctccgcctggtaattggcgcttcgattaacagctcgggtgcgaggggcacttcagtggggggcagggcagctgagtcaggggcccagcccaggggagatgttacaggagggaggacgggaagggaggcggggaggttggtaattccagattgaggagggtctccgtagctctccgagtgggtgaggacccctcggaggcaagtgtggggtcccccagggcctgctgggcccccttgggcccctggaacaatgggttcccactagccaacctgttcccacagccagaagttgccatggtgaccccctcccaccttcagctacagcttttccagtaaaaccactgcagaaatccatacttcccgacaggcacgcccggccccccaccccccactctgcgcggtcttggagcctcggggagttaaccctgcgcatgctggtgtctgttgtttgggggagacgggagtgagagccggcaatgcgggccccaggctggagaggagagggtggacgggggcaagacaagctgccctgtccttgaaggccccagcgagtgacttgagcaactccaggaagctggagcggagcagtgaagctagctctgacctaggggcccccttggcacagaggaggcctagctggggcccacagcgcagctcaccccttctagagtgaccccctgcccgcagtcgctgggacacgagacccttcccggcctggctgcagctgctaccctgttagccgatcccctcttcctcctctcccctcccggcacaaacctttttcctggaggcagagagggctcagtcccaggtccccgtggccctgctgccagcacctggcggcccccaagggcactgcgtacctggagcccggctttgcatccacaggtctgccctagggggctgttgaactccagaagtcgctgcctgctcagggtctccgtgtcctccccctgagaagtggggataatgatctgggctgcttccaagcttggggaagaggatccccctagaaggttctgtcctgctgcctctgccaggtggaggggcccctggggacaccccaggctgcaggggctcagggggctccgtggcccaggcccagcctcacttctgcagccagagtgagcaaggagatgctgtaattgttctctctgtagcccaggatgaataattgagaggtctttgaagagaattaattagccagcttattgactggaaacgctttgctgcagatgatggaggatggaagcctgcgtggggcccgtttgccggctggggccgcaccagacattcaattcacacccatggctgctcagcgggaccaggggctcggcctttgcctagtacctgctctctcctgctcaggaggaagtgggggagctgagccccaacttggcaccctgctgtggttctgtcctgatttctggtatggggagggggggcagcaccccttagactcaactctgctctgtcttctaagaggcaagatgggggcctctccaggagtgggggtgggtgtggctcagtcttgggagcagttcccttgcaggatagactctggtcctgggctccttcagtccagcccaccccaccgcctgagccccagccccttttcgggaactagggagtgacaggaaaagacgaaagcgttcttgcctgcaggctgcagggggtcagacatgtcgatgtccctggtgaggctgaggagggccggttctcatggaatggacaaggcgctaggcaggaaatgctggatcactagccccgggtaccagtcattaatagtagtagtaaacattcctccagcaggccctgtcctaagcacactgcatgcactaactcctgtagaccctgtgaagacagggggtgggcttgttccccagctgggtctgcagagcctcagggcagaacctggcacagataaagctttgttgattgaatgaatgagtgaatgaaggaaatgaatgtgaggaagctgagtggcaaagttagactcacacatcgggtttgtttgtttgtttttttgagatagaatctctctcagttgcccaggctggagtgcaatggcgcaatcttggctcactgcaacctctgcctcccaggttcaagcgattctcctgccttagcctcccgagtagctgggattacaggcatgtgccaccacacctggctaatttttgtatttttagtagagatgggatttcaccatgttggccaggctggtcttaagctcctgacctcaggtgatccactcacctcggcctcccaaagtgctgggattacaggcgtgagccaccgtgcccggcctcacacaccgtttttaagctggctcaaggatccgtgctctgatgcatcctccagtcccaggcgacgtcaacatggaagatgtgggcaagaggcaaacagtcatgaagggcttgggccatgtggaggatgagcaggaggtgggggccctgagagcgggcccagggttcagccctgcctctgcagctgctggagcaccagtgaagagagggcaggtgccagcaggcatggtgcaactgtgggggacatgggcggggcagggggtacctgggtggagctggttggggaccattgctcttggtccagataaggcatgacaaggcctgggccaagacccctgaaatggggcatggagagtctgtgacagctctgagatatgtggaggggaaggggaatggaacctggtgacttgtggacctgcggaatgggggacaggagttgagatgactccaggtatctcccgacatgagcacatgtatctgcaaatgaggcgggggtcaggaagcacagggagcttgctcttgccccgggggcctaggatgccctgggctgtcatcattccacactcacccctgacctgctcctgctcgctcagggaggctgccttacagggaggtatcagtggctccctcatcctctgcctctgtggagcccacagtgggaggcacctgcagaacatgggggtgggggacagtgcagttgggggcgtgggtgttccttcctctatctgcctccctcacagagttgtgatcaagcgagttgtagagaaacgccactctctgagacgaattcaggctagtgctcaaaattctctccaccccaaagaaggggctagattttcttttatactttgttttagaaaggggcggtggggggagtctagttaaaacaatcttacagaagcaaagcagacaaaaaagttaaaaggataaatggttacgggaaagcaaacagttccaggtgcaggggctttaaatgtattacaaggtgatagacgcggggctttgagtgttatcaaccggatacaaacgcggggactctgggtgctatcaaccgggcgaattcctaggaactgcggatataacttgccacagtatcttatcagttaattgcatccttggatgtgctggcagtctgcttgcacaagttaagtccttgaggaagggggtgggtaaggggctgtaagtgaaggagccaagatggagtctgtctggctctctcagctaagggagagtcaattcaggttaaaacaaggttgggtatcacaatagccctctccatgcctctctgtccagggctgggattggttggcatactctgcatgcctttccccagccctccagctgtcctagagttgggctgggataaccctccagccgccctgtgagttgcactgggatcagtcaggtgtactctgcatgcctcaccccagcccccgagccgtcccgtgggttggagttgtttgcgtcactggctttctgttctcagctgacttagctgggacgtcaacaactccctatgtcagaggcaagtctccgcctgcatctgccagagctccacacagctgcagacacctgtggcttcatctgagtcctcatctcggcctctgggaaccactccttcctaccctttgcctggagacagtggaagccgagggacatttctccgaatggcgttcacttggctccagaaatgagaactggaatgaggaagaggaatcagtctccctccaggtggctgaagctaggcacgtggaacctgggagcagcgggcagccacactggtgcccttcagacagcaggagggggctcttgtccgaagctctgagttcaaaacagaggggacatgggggaacagcaggaggtaggatcaggccccccaactcctgccgagagctcacacctgtcttcagcccctcctgcattcctgccagtggtagccatttgcccttttggttgcctggtgtccaaataccctttctacgttggaggtagggtcctgggggtccctgctccctttcccaggctctgaaaactgactcctgggaatgtgaccaaaatgattacattaaatgcttccacctgaatgtttaatcgtgaagatgagatgccaagttcaagagtaatttaggggccaggtgtggtggcttgcgcctgtaaccccagcattttgggaggccgaggcaggtggatcactggagaccaggagtttgagacaagcctggccaatatggtgaaaccctgtgtctactaaaaatgcaaaaattagtcaggtgtggtggtgcacacctataatcccagctactcgggaggctgagacaggagaatcgcttgaacctgggaggtggaggttgcagtgagccaagatcaggtcactgcactccagcctgggcgacacagcaagactctgtctcaaaaaaaaataaaaaataaaaaaagagtaatttaggattgttcccaagggttgtggtagagccagacagcactgtgtcacagcatgcagtgagtatccagcctcgataccctatgcagcccattctatgctaacggttacccccactgaattccttttctgcataggttaaccagagtgccactgtcagtcacaatactgactagtggcttctcttgggtttcctgagaaactccctatatcagttagtgagtgccataatcaggctgtgtaacaagcagccccgcaatcctggtggcattctacaataagcatttgttttgctcacatctctgtgggtctgtgggggttcaccagatccaggcttggattagctggctggcgtctgggctgtgagttgggtccaggtttgcttcacatgtttcttatcaacctcggcccagcaagctacctgaggcgtgttccttccagggtgacttcagcagtgaaagagagcaagttcattgtgcaagcacagttcaagtctactcactccatatcccctgacatcccactgatcaaagcaagtcccatagctatgccccaagtcaaggatgtgaatgcataattctactacaagggagtgaagaagcaggactgatcattccatcctccccttatttgtttttagtttttattatgaaaaaaaaaatttttttttgagaccgagtcttgttctgtcgcccaggctggctgaagtgcagtggtgtgatctcagctcactgcaacctccacctctcgggtttaagcaattctcttgcttcagcccccccgagtagctgggactacaggcttctgccaccacgcccagctaatttttgtatttttagtagatacggggttttgccatgttggctaggctggtctcaaactcctggactcaggtgatctgcccacctcggcctcctaaagtgctgggattatgggcgtaagccactgcaccaggaccatgaaaatatttttttaaaaataggcagaaggggccgggcacggtggctcacgcctgtaatcccagcactttgggaggcagaggcaggtagatcacgaggtcaggagatcgagaccatcctggctaacatggtgaaaccccatctctactaaaaatacaaaaaaaattagccgggtttggtggcgggcgcctgtagtcccagctactcgagaggctgaggcaggagaatggcgtgaacccaggaggcagagcttgcagtgagccgagatagcgccactgcactccagcctgggcgacagagcgagactccatctcaaaaaaataaataagtaaaaataaataaaaataggcagaagggtgtaatgaatccccatagaacatcacccagattccacaattattattattttcccatatttgtctaacctgttttttttcccttggtaaagtgtattttttaaacttttttttcccatatgtaaaacaaataatttatgtaaagatatatgtatatatacacacataacaaaatttaccattttaaccattttcaagtgtacagttcagtggcattaagtaattaccactgttgcacagttgctctccagctcctgaacattctaatcttcccaaactgaaactgtccccattaattaacactagctccccattcccctggaccccaacccctggcaaccaccatgctattttctgtctctataaatctaacaatctcacatgagtggaatcacacggtatgtgtctttgtgtgactggctgatttcatttagtgtgatgtcttcaaggtgcatccacgtgatagcataggtcagaatttccttcctttttaaggctgaataatattccaccgtatggatagaccatagtttgtttatccattcatgcatccatggatactagggttgcttctatcttctggctattgcaaatgaataatgctgctatgaacgtgggtgaacatatctctgagtctctgcttttaattcttttggggatagatacaggagtggaagtgctgggttatacgctaattctatgtttaatttttggagcatctcaccacactgttttccacagcaattgtaccattttccattcccaccaaaattgagtgcacagggccaagcgctgtggctcacacctgtaatcccagcactttgggaggccatggcgggtggatcacttgaggtcaggagtttgagaccggcctggccaacatggtgaaaccccgtctctactaaaaatataaaaattagtcgggccatggtgaagcatgcctgtaatcccagctactcaggaggctgaggcacgagaatcgcttgaatccaggaggtggaggttgtggtgggccgagatagtgccactgcactccagcctggatgacagtgagactccacctcaaaaaaaaaaattgagtgcacaggattccaatttctccacatcttcaccaacacttgttattttctgttgttttttttttaaaaaaaatagtagccgtcctaataggtattgagtggcgtcgtcttgtggttttagtttgcatttcaggctccatttgacttcggctggtttgaggtgagtttctgtttcttgtaactggcgctagttcaggtaggctcagcagctgcagaactcaaagagatatgttcacccgcgttcatagcagcattattcatttgcaatagccaaaagatagaagcaaccctagtgtccatggatacatgaatggataaacaaactatggtctatccatactgtggaatattattcagccttaacaaaggaaggaaattctgacctatgctatcatgtggatgaaccttggagacatcacactaagtgaaatcagccagtcacacaaagacacataccagctcagcagctgcagcacggtagccaacaatagcagctgtggcttgtggagaagtttatttctccttctgtaacagcccagggcgggtgcacccggtctatgcagccctactcccttaggggacccaggcggatgctgctttgctaccttgacgtggagtttctgagctcgctctgccggttgccacctgggtccccaggtgggagggtggagcacctgccaggattgatgggctaagggcggaactttccccttgcattccatcaggggtatttatctttttttttttttttttttttttgagatggagtcttgctctgtcacccaggctggagtgcagtggtgcgatctcggctcactgcaacctccgcctcccaggttcaagcaattctcctgcctcagcctcctgagtagctgggattacaggtgccaccatgcccagctaattttgttatttttagtagagacggggttttgccatgttggccaggctggtctcaaactcctgacctcaggtgatccgcccacctcggcctcccaaagtgctgggattacaggaatgagccaccgcacccggtctcagttgatatttctaagaatctgcatagaatagaccagccgaccctggatcctatcagagggtggaggctgggaggaggaagaggatcaggaaaaataactaatgcgtactagacttagtacctgcgtgctgaaataatctgtacaacaaaccccaatgtcacgggcttacctatataacaaacctgcacgtggacccctgaacttaaaaggtttttttaaaaaaagagggtcgggtacagtggctcacacctgtaatcccagcactttgggaggccaaggtgggtggatcatctgaggtcaggagttccagaccagtctggccaacatggtggaaccctgtcgtctctactaaaaatacaaaaattagccgggcatggtggtgggcgtaatcccatctactcgggagactgaggcaggagaattgcttgaacctgggaggcggaggttgcagtcagccgagatcacaccactgcactccagcctgggcgacagggcaagactctgtctccaaaaaaaaaaaaaaaggggaagcctgttgcccaaaagggctgctgtggtacctaaaaatgtgggctttctccttctgggagggggtaggaagaagtcgcccccactctccaggcccacggctgccccgcccctgctcaccagccggctggctgtggcaaaactaaagcctgccccgtgccctgagcccggcatgttgttcagcctctctgaaatggtctccttggatcatgggcagagatggtacgatgggatcccacccgaggggtcccggccggtgctcacggggctgggaccagctgctcttactctgtttttctacctttctcagccacttggaggaagagagaattttgttaccttttacaggtaaggacgctgaggttcacaggataagtcacttccagccaggtgtgtgtgacctcagatccatactcagagggaggtgggctgggcagagcctcccacctgctcccctggaggcccatgagtctgggcactggggccccaattcctataaaccggggttgattacggaggactcccctcacctgcaaccccgcctcccaccacagagcccaggcagcagggaagcctggagacaggcgcagagcctctgggcctgggtgcctacccctgcccacccccagggcctcaggccacaggagaccacctaaagcaggagccgggagtagggcccaggctgggctggcacagctgggcctgtgaggggtggaggggccgctggggaagggacttaccagcagcagctctgctgggacctgggaggctctcctcatttccagtaacaagcgggggtgggggcagtgggagggaggaggcggctttccccaggtgccagctgtgcttgaagacagcctgtcccctctgctgtctcctgttctcagctccttaatcccctccccgacctcgtagttgactcctgggctgactcctcccctggaagggaaagaagagccgggctcacccacacccaacaggtgcagcagctgcttgaggtcacagttgctgagaagggaagctgaggccagtggcagctccagccagggttggtgcagcctgctgaggggtcgaggtcacccaatcacccacccagctccacctgcccccacccctcccacccagcctggccaccagcccagacaccttcctcacatggcctgaagacccctgctgacctgtggcaccatgtggcccagcagggtggccaggctggccggggtcatggggtgggggacgctgctccccacctgccctggggtggtcggtgctgttggggaggccactctctaggggcatctgccaggtaggcagaccagaaacttaccccgagttctgtgacccgctccggggagcggggcatctcatgtcctctcagccacgtctgaaagctgggacatggcagagtgggcagggctgccctctgagctgacccccttcccctcctccccatcttgtctctcctcagatctagggctcactctgaggcgtgggtgacacttgccccccaaccccagcctcttcagtgcagggaggcagggcctgaacttcggagggccttggggcaggttcctggggcttgcagtgaggcctcccctttcccagggagaggaagggagaagccgcgtctggcgagggaagcctgtaccctcaccctcactgtgtccagatctgcacccctaacctggcctggggagactggcaccaggtggagctggtccccaaggagccccaaaccccagaacatctgctgcaggggtcagctctcagggggccccagggccagtcctctctgcaccccaccttccctgctcaatgtggcttgtaggaggttatgcaaagcattatgcaaagcacatgcaaatgagacccaaccacaactggtcactctctccaggcaagaccactgaagccctctggtcatcagcaggaatgcaggggcgcctatggcaggccggactccaggtcaggccttggggcagtgaggaagaaggtgcatgccaggtaagctatagtcaaaagggagggacacacaccaccaggcgaatgaatgaagcaaatcaatggcactcctccctgccccagaattcaaaatgacagaccggtgcagacagatgcatgtgtgttctgagaggtggttgtgtacaagcaagctcactccttcagtctcccattcattcacttattctgcaaactcggtgtctattatgagcctgggctgttccaggggctggggatatcccagcagatgaaaatgcctgctttgcagggctccagtagggagagaaagatacaggtgacaagtcaggatgagcaaggaggacacaccggtgtatgttccagaaaccataaggaggctggagccaggcacagggagccctgggccttgggaagagtatggtctgtgcaggggccatgtagtgggagggggccctgcaacatcaacccaggtgccctggggaggttgtggtggaaacaggcagagcacggagggaaccaagttccccgggcaggagatgccaggggctgcggccaggggtggcagtggaagggctgagaagtggtcggattctgggttaggaagagaaagctgccctttgccctctgaagcttcgccgaaaaatcagcggacaaaaggcagattcataggagaaaaggctcacaaaatttactgtaactgcatagcacaggactccccggacgtgattacccagtaatccagaggggtccagaacctgccatgcccttcctcatgggagaagaggtggtgggaaaccacctctttgaggcaaagtcaatgatttttggggggaaatgaaatgaatgggccccttgctcagacaatggttagtgaataattctctttgggaatcaaataggaccaaagaacagacaatggtttgggaggaagttggtctgggctctaggtgtggtggttcattgcagcctcttcctttgtgatgtgagttttaatcttctccggttaataacatttcagggaaggcaattgtgttcctcttggccagtctggtttctaggtagttaaggaaagtccgagaacagcctcatcctgtgctttgggaagacatggggctggaggtaggtcagagagaccttggggccccttcttgtcaaggcgccatattttctgagccccaacagtgtattttgggaatgctgttatatttccatctaatttgcattaaggaaaagctatatgtgttttggtgcctgggtacctgtgttggggaggctgggagtggggacagagtgggggagggcatcttctgggtgctctgcagacccaggggtctgtggtgttctccttcagggcaaccccccaaaacccaccacccaaactcagcgaaactacaaggtggggctgtgatggggcctagaggtttatgtaacaatcatgggaacggaggtcctcacccgtggaggccccgctaggggttgagcctattccaggggttccctggagttcacctctcctcactgcctcctgttcttattggttttctggtgggggaggaaggggcaaagccgctcttctgtgaaggtggatgttttttttttggcagcagctgaaatccatttgctactaggcctaggagtaagtgggcgatcaaaactgaatcgtgcagtttttactccaaaacaagccctggctctttaagacttggggctgattttcactctcgggtacctggggcgaaggtcgggaagccaggccttctgtaaagcttttaaggacagaaggtgtagcctcccaagttagcacactctggagccccgaatgcagttgccctctacagacctggtcagggcctcaccctgcagcccaggggaagggactgggggctttaaagctctcgcaggtctctgtttggctgtgtggcccaggaccagctccttctactctcctgctgtgaatcagcagcaccacccccgacttagtagcatagtgtgaggctgacgtgcacgtgggtgtgaatcccggtcagcgccactcgttgtgcctttgcgcttcaatggtccctgccaaggctgtggcagcagctcctgagctccccaccatacctcgcctaaagccttagggacaagttcagccacctgagaccaaaagcgccctgcctggctagctctaagcctccaaataacccctgggatcccagcagttcttcactgtaagagtttacttgtggctgggcatggtggtgaacacctgtagtcccagctgcttgggaggctgaggtgggaggatcacttgagcccaggaggttgagatggtagtgaaccatgactgcaccactgtactgtatgtaacctgggtgacagagtgagtgagaccctgtctcaaaaaaaaaaaaaaaaaaaagtgggccgggagcagtggctcactcctgtaatcccagcactttgggaggccaaggcggacggatcatgaggtcaaggtatcgagatcaggccgggcacggtggttcacacctgtaatcccagcacttcgggaggccaaggcaggcggatcacgaggtcaggagatcgagaccatcctgcctaacatggtgaaaccccgtctctactaaaaaaaaaaaaaaaatacaaaaaattagccgggcatggtgatggatgcctgtagtcccagctactcgggaggctgaggcaggagaatggtgtgaacccgggaggtggagcttgcagtgagccgagattgcgacactgcactccagcctgggcgacacagcgagactccgtttcaaaaaaaaaaaaaagatatcgagatcatcctggccaacatgatgaaaccccatctccactaaaaatacaaaaattagctgggtgtggtggctactccggaggctgaggcagaaaaatcgcttgaacccaggaggcagaggttgcagtgagctgagactgcgccactgcactccagcctggtgacagagcgagcctccgtctcaaaaaaaaaaaaaaacagaacaaaacaaaaaaagtgttcacagatgggcttggaggtccatggtccatccttgttcttcaggccagccaaaggtggccaaatttagtaaaaaagcaaacaaaaaaccaagacacctagttaaatttgaatttcagagaaataacaaatacatttttagtgtaagtatatcccatgcaatatgagagagatacttactctaaaaaatgtatttggccaggcgtgtgggctcacacctgtaatcccagcactttgggaggctgaggtgggtggatcacttgaggtcaggagttcgagaccagcctggccaacatggcaaaaacccatctctactaatacaaaaattagccgggcctggtggcgagcacctgtaatcccagctaccagagggctgaggcatgagaattgcttgaacccaggaggtggaggttgcagtgagccaagatcatgtcactgcactccagcttgagtgacagagtgagactgtgcctcaaaaataaaaaaaaatgtatttgttgtttctctgaaattcaaatttaactgagcatcctgtgttttatctggcaatcctagtcccaccctcttccaaattcacatctttttttttttgagacagagtttcactcttaatgcccaggctggattgcagtggcatgatcccaggtcacagcaacctctgtctcttgggttcaagcaattctcctgcctcagcctcccgcgtagctgccgtgcaccaccacgcctggctaatttttgtatttttagtacaacggggtttcaccatgttggctgggctagtctcgaactcctgacctcaggtgatccacctgcctcggcctcccaaagtgctgggattacaggcgtgagccaccacgcccggccctccaaattcacgtctataagaacgattttcctgccccaaccatacatttctcacagataaaggtgcatttttatcatttcgtctttcctggggctgaaatggcttcttctttttgcattttatggttttacaattgtagcagtaaaacattcttgccggcaagatgattgaaaatttaactacaaaaggcatcattcattttatttttgtcttcattggagacataaaatggattcgcaatcatcccaccacagtggttgagtattgtgggttttagagttgctcacatagcacatttatactcaccagtgtgagggctctttgcagccgccaatggagtgatcgtttgtgttttggaagcagcagtaacatttattcctaataatcctgctgcagtgggttcttggtattttatagttgttattgcagtaaaatttatatcctacagaattatgacaatattcagctactaatatgattattatttgtgtgtgtgtgttaaaaccacggaaataaaatttactcccaacaatacagtggcaattttatgtccctaaacctgaccgtaaataataaacataactacagaatgcctgtaaacacataaaacatccttctcggaaaaagtgaactctccattgctatcctgatgagaccagcagctggggagcctggtctagcagttagggctcctgggcagacttcaaaaggatgaagcaacttcttcacaggactcctggagagcaagttgcttaacatttcagagtccaagtcagcccgtctcagagaacgtgggctggtccatcgcctgatgagtgcacggatacaatgtgtggtaaccacactgtagaacactgcttggccgtaaagagaatgcagttctcatacacactgcaactcggatgagccttcgagacattatgctccacgaaagaagccagatacagccaggtgcggtggctcactcctgtaatcccagcactttgggaggccgaggcgggcagatcacaaggtcaggagttcaagaccagcctggccaacatggtgaaaccctgtctctactaaaaatacaaaattagctgggcatggtggcgcatgcctgtaatcccagctactggggaggccgagacaggagaatcgtttgaagccaggaggcagaggttttggtgagtcaatatcgtgccactgcactccagcctgggcaacagagcgagactccatctcaaaaaataaaagtaaaaaaagccagacacaaacgatgtatacttttgatccacatactgtatgatcccattgaaattaaatagccagaaaaaggctaggtgtggtggttcacacctgttatcccagtactttgggaggctgaggtgggagggtcgcttgagctcaggagtttgaggccagcctgggtaacatagcaagacccccatctctacaaataacttaaaaattaggcaggcatggtggtgtgcacctgtagtcctggctacttgggaggctgaggcaggaggatcccttgaacccaagaggttgaggctgcagtgagccatgatcatgctgttgcactccagcctagacaacagagtgagaccctgtccgaaaaaacaaaaacaaaaacaaaaattaaaaatatctagaaaaagtaaatttccatagacagaaagtagacgagtggttgtcaggggctgggggagggaaggggaaatgggaagtgaccgctcatggatcctttttttttttttttttttttttttgagacagagtcttgctctgtcacccaggctggagtgcagtggtgcaatctcggctcactgcaacttccgcctcctgggttcaagcgattctcctgcctcagcctcctgagtagctgggattacaggcatgcggcaccatgcccagctaattttgtatttttttagtagagacggggtttcaccatgttggtcaggctggtctcgaactcctgacctcaggtgatctgcctgccttggcctcccaaagtgctgggattagaggtgtgagccactgcgcccggcctcatggacacttttgagatgatgaaaatgttctggtagggctgggcagggtggctcatgcctgcaatcccagcactttaggaggccaaggttggcggatcacctgaggtcaggagttcgagaccagcctcaacatgaagaaaccccgtctctactaaaaatacaaaattagccgggtgtggtggtgcatgcctgtaatcccagctactcgggaggctgaggcaggagaatcacttgaacctgggaggcggaggttgcggtgagccgagatcgcaccattgcattccagcctgggcaataacagcgaaactccgtctaaaaaaaaaaagagagagaaaataaaaagaaaatgttctgtggttgactacagtgatggttgcacaattccatgaattcaccagaagctgttgagtgtatactttcaatgggtgaatagtgtggtgtttaaacgctcttaataaagttgctaaggccgggcacggtggctcacgcctgtaatcccagcgctttgggaggccaaggcaggcggatcaccaggtcaggagtttgagaccagcctggccaacatggtgaaaccccgtctctactaaagatacaaaaaaaaaaaaaaaaaaaaaattagccgggcgtggtggcacacgcctgtaatccgagctacttgggaggctgaggcaggagaatcgcttgaacctgggaagcagaggttgcagtgagccaatatcgcaccattgcactccagcctgggcaacagggcgagactctatctcaaaaataaataaataaataaataaataataaataaagctgctaaaatgaaaaaaggaagaaaacatgcttctgttcctcctgccccccacccctgcctcccctgggctttcagctgctgtctctagagaatgtttggaacaggtgtctgggaatagctaacaaaatccctctggcttctccttgccttgtgggttatggatactgcccccttcctccatcgtgaaatgaaaagtgacatgaccctaaaatctaaaaggaccataaggcccattaggcaatctcaagagagccacctgcaagggacagaggtgtggcagcagccctggagagaaggaggccaagcagagagggtgcaggctgccaggatggagcctctgcccgccactcactgggcagcagtggagctgcctctgcctgtatcatccccattttatgaatggggaagctgaggcagaagcagtgatacagccagaatgaacagtcttaggcatcgtccacagaccagcgagttactccaccaggtgtctgtatcacccaaagaacctgaagtgcatgggctccttgcgagcttttttctctcaaaaaaaaattgtggggctgggcgccgtggctcacacctgtagtcccagtactttgggaggccaaggcgggtggatcacttgagttcaggagttcaagaccagcctgggcaacatggcaaaaccccgtctctactaaacacacagacagtttggctgtagtggcgcatgcctgtagtcccagctacttgggggactgaggtgggagaatcgcttgagcccaggaggcggaggttgtaggtgagccgagatggtgccactgcactccagcctgggcgacagagtgagatcctgtctcaaaaaaactgtggtaaaataggccgggggtggtggcttacgcctgtaatcccaccactttgggaggccaaggtgggtggcaccggaggtcaagagtttgaggccagcctggccaacatggttaaaccccttctctactaaaaataccagcgttagctgggtgtggtggtgcgcacctatagtcccagctactcggggggctgaggcaggagaatcgctagaacccaggaggtggaggttgcagtgagccgagatcacatcactgcactccagcatgggtggcagagtgagactctgtctcaaaaaaaaaaaaaaaatttgtggtaaaaaacacatagcataaaatttgccactttagcctttttttttttttttagacagagtctcgctctgtcgcccaggctggagtgcagcagcacgatctcggctcactgcaagctccgcctcccaggttcacaccattctcctgcctcagcctcctgagtagctgggaccacaagtgcccgccaccgtgcctggctaattttttgtatttttagtagagatggggtttcaccatgtcagccaggatggtctcaatctcctgacctcatgatccacctgcctcggcctcccaaagtgctgggattacaggcgtaagccaccgcgcccagccaactttagccatttttaagtgtttcaattcagtggcagtaagtatcttcacatcgttgtgtgaccaagtgtcagaggtgacgtgggctgtccaggacacatgactggtgggaactacagggtccccgtcctggtcctcacaccgctgttggccctggacaaggtatgtcttctgagtgcgaccagaggcccagagagcacgggattggctgcggttgccagtgcctggggcagttcccgctaatgccatcgtcctggggatccccttgagtcccctgctcctgcttcttagtttgctgcaccccagagggtgactgggacccccatgcctgggacactggttgcataggcagcttccagggccaccccagacctcccagctcagagtcctggggcctggggctgtgagttaatcagtgtccaggcaaccagggatgccacaagaagtcaggaagtttccagacttgcctggtctcagaattatctaagctcctttttttatttttttttttttaagacagggtctcgctctgttgcccaggctggagtgcagtggtgggattttggctcactgcagtctcaacctccagggttcaagtgattctttcacctcagcctcccaagtagctaggaccacaggcgtgtaccaccatgccccagctaagtttttaaatattttgctgagacagatcttgccatgttgcccaggctggtcttgaacttctgggctcaagcgatcctcccaacttggcctcccaaagagctgggattacaggtgtgagccactgcgcccggcccatctgagctacttttagaagtataggttctctggcttctctccagctgagaccaaaccacctctgaatctattgttaagaggtacaaggggcttgtgatacaaaagtggcaaagctggacaggcacagtggctcatgcctgtaatcctagcactttgggaggttgaggtgggccgatcacttgaggtcagaagttcaaggccagtctggccaacatggtgaaaccctgtctctgctaaaaatacaaaaattagcctggcatggtggtgcgtgcctgtagtcccagctactcgggaggctgggacaggagaatcacttgaacctgggaggcggaggttgcagtgagctgagatcatgctgctgcactccagcctgggcaacagaacaagactctgtctcaaaacaaaacaaaacaaaaacaaaaacaaacctgcaaggctgtcggttcatgcgctcattccttcactcattactgcagtcctactctgtgtattcattattgcagtcctactgtgtgtgcctcacctctgcagccggatcctgccccagccccaggcatgaaggcatggagcccctgcctgtgcacgtccttcttcctgggctaccctgcctctccccttgtgcctgacattgagggctgtgagacctcctactcgtcacccctcagccagctctgtttggccccccaaaagccttgggacctcctcgggtcctggacgtgggactggctctgattctagcctctgggctgggctgctgctgacaagtgttcagctcctgctgctcagatgaatgaagggacagaaggcgggtgtctaggcatggccgggacctgggattctattttttttttttttttttgagatggagtttcgcttttgtcgcccaggctggagtgcagtggtgcgatcttggcttactgcaacctctgcttccagggttcaagcgattcttctgcctcagtctccctagtagttgggattacaggcgtgcaccaccaagcccagctaattttgtatttttagtagagacggggtttctccacgttggtcaggctggtctcaaactcccgacctcagatgatccgcctgcctcggcctcccaaagtgctgggattacaggtgtgagccaccatgcccaaccccccagccaggacgggaacttcttaggatccggctgcagcccagggcagaggagttcccgcggcttcctccagtgagttaagtcaggcctgagtgagcatctactctttctgggccgctagagggagaccttcgcagcctcgtacttggctcaagacaccaggctaaggggtgtcagtgtgtgtgagtgtatgtgtgtgtgtgagtatgtgttttgtgtgtgtgtgagtggcgtgtgtgtgttgagtgtgagtgtgtgaatgagtgtgtgtgtgttttgtgtgtgagtgcgagtgtgtttgtgtgttgagtgtaagtgtgaatgagtgtgtgtgttgtgtgtgtaagtgcgagtgtaagtgtgtgtgagagagagtgtgtgtgtcctacctgggcatgcacgggtgggtgtgggcagtgacctgagccctgcacgtactgccaggtggcccggcttgccaaaggtggggaagggttatttacccaaagtgggagagacctgcaggctgggcggcagcggcaggaagaacagcgagcgaggccacagtggcatccatggaagatgttatttggggccttttccgtgcctgctactgttcttcgcatcctgcgtgtatcacgagaagcaatcctatcaaaggaggacctatgaatacaatatccactttacagaggaagaaactgaggctcagagaggctgagtcacttccagagctgagatttgaacccagggagtgggggctggggcctgggctccacagcacaaaggagccctgcctgctgggacaaggagctgccttgtggtatggccagtgtgcccaagccagcctttggagcccgctgggctggctctgggttccagctctgccgcctgcctgctgagtgtccttgggaaagtccctccacctccctgagccccgctttctcctctgtaagatgggactaatgacacctatttctctggttgtttagaggtttaatggttcactgtatgcagagggaggcagacttcagggcctcctcaggagccttggcatgcggccacagggcctttgtatgtactgtgtgtgcgcctaagatgcccattagaaagataagatgccacctcactgcggactccccttaatctccctgctgcagggccagctccaggggtgtgtgacctatggaggtgcactggtccccatgctcagagcacgctgtgctgggtttaatgatctccgtcaccatttcgaaattcttagtgattttttaacaaggagccctgcatcttcattttgcactgggccctgccagtgtcacagctgggcctgccctgcagtttctttttctttctttcttttttttttgagatggagtctcgcttttgttgcccaggctggagtgcaatggcatgatcttggctcactgcagcctccatctcctgggctcaagtgattctcctgcctcagcctcccaagtagctgggattacaggcgcccaccaccacgcccagctaatttttgtatttttagtagagatggggtttcaccatgttggccaggctggtctcaaactcctgacctcaggtgatccgcccacctcagcctcccaaagtgcagggattacaggcgtgagccatggtgcccggctgccctgcagtttctcctcctgcgccgtgccccgcatgatctgcccccagcgaggaaggagactgaagagcagcagggagggtccctggagacagagcgggcagagtgggctcgacgcacccctgacacccatcagcaggcgccttcctcaatgcggacaggcagaccctcctctcttgggcacacactcagtcagcccctgggtcagttgctcctcctaaaatgggactgacagttgaagacctccaagcttcccagtcatagcagtggcccctctcagcccacacccagtccactctggattgctagtggggatcccccgagacagggttctcccccaggctggtcagccccacatctgtgaagctttctgggcctctccacacccccagttctctgaggcaggcggggtctccagggcaaactcgtgtgagcctcacctgtgtgttgcaccgtcctgtctgcaaacagaaaccctcacgctgccgagccgatgcctctgtccccagcacctccttggggacggtggactccatggtcaaagggccaactcaggggagccacagtatctgtgcttcaggcagcccgagttgaggacgtgtggcattctgctggcatcgttcatgcctcactcttggctctggggctgggcacttgctttctggcccagcctgccgccagggtgaatggcctctggggcagatggcgttctgggaacaggtaatgtcctggccagcgggcaggccggagctggagcctgggtggagggctccccaaggaccaccctgggtcccactcggctttccctgcgtgggggcgacactgttgccagttacagaccgcccaagagtgccccgagatctaagcataggacacaacaggggctggtctcatccacctcggatccacccacctgcagcccagtccggctgtgtccctcaggtcacactcactgtgttttgagaactctcctccgggcctacaaagtttgccaaggcgaatgtcaaagggatatgggggcaacagctcccaagatcagccctaatccaccctcctcatctgccctctccatggggcctcactccatgtctccaacatctcaggttggtgtccaagccacggcctcacatggactcacctcctgcttcagtctctgtttctgaccaggcttcttgctcccagggaggagcgagcttggaccgctgctctcagaagggaccctcctagctggacctgcccctgatttggccgggtgccctgggctctgtgcccatctccaccaacctcccagaagcgagagctggatacctgcctctctgtgtccagcttccttccttccttcctcaacaatcagttattaaacacccaggatacagatgcacggtgctgctgcagctgtcctccaggctgcctttttttttttttttttttttttgagacaaagtctcactctgtcgctcaggctggagtgcagtggcacgatcacagctcactacaacctcaaccttctgggctcaggtgatcctcctacctcaacctcccaactaactgggaccacaggtgcatgccaccatgcctggcttgtattttgtgtagagatgaagttttgccatgttgccgaggctgatctcgaactcctgggctcaagtgatccacccacctcggcctcccaaagtgctgggatttcaggcgtgagccaccgtgactggccccatgctcttggcttctaatcatagactttggggctcattcagatcacctctcatagtgaacttttgtcactttcttctccaccatccactttaccccagggatgagccttcattggtctaagccagtctgactctctcacccccttggttataacgatataggatacatgtcccaacccgggtcagatggccctataaataggtttcagttgctttacctacaagtagttccttttttttttgagatggagtcttgctttgtcacccaggctggagtgcagtggcacgaccttggctcactgcaacctccgcctcccaggttcaagtgattctccagcctcagcctcccaagtagctgcaattacaggcgcacaccaccacgcccagctaattttttttttttttttttgagacggagtctggctctgtcccccaggctggagtgcagtggcacaatctcggctcactgcaagctccacctcccgggttcacgccattctccagcctcagcctcccgagtagctgggactacaggcgcccgccaccacgcctggctaattttttagtatttttagtagagatggggtttcaccatgttggccaggatggtctcgatctcctgagctcgtgatctgccctcctcggcctcccaaagtgctgggattacaggcgtgagccaccgtgcccggcctacacccagctaatttttgtatttttagtagagatggggtttcaccatgttggccaggctggtcttgaacccctgacctccgctgatccacccacctaggcctgccaatgtgctgtgattacgggcgtgagccactgcacccggccaagtagttccctttctgttgcattgggacctagaggcacatggcctgggcctgcccaagggtgtcttgtgaccatgagggagagtctgcagaggacagggcccctccccgtgcaggagggcctggctagttgagtgagtctctgatgaggcagtgcctccgagggtcagtcatgctcaaactcagtgtgccccaagtcctgacccctggtattctgggctatcactgcccaggaaaacagcactccaaaccctggccttcaggcctgttcctttatgcttatcgctggaatccctggtccagagggtcttcaaatccacacaagcccctcctgcttggccctaacccgatgggttaagcgtttcaagggagggcttgagaggtccccaggacatgcctggagggccaataaatgaccgtgaacggtggtgagtgaggcaggtggagagtgtgaccatgaagagcagggcagactccccagagtactgtagggaggcagctgcagtctggatgaagagtacacgccaaggccaattgtggttgctggtgggatgcagctgggaaagcgagagtgaggaccccagaccctggcggctgcaatgcctgggggcatgtgacatggtggtgaagggggaattgtgtgttgatcctaccctggccgcaagtccaggctcacaggccatggccactgaccacaggaagaggcctccctccttaaagtcgggagaatatcccagaactaaggctagtcctgcatcctggccgggaatcccaggccaacaccctccccgcgatcttaggtgcttagcagccctggctggtgacccctgggcggagagagtacggtaatttgcaagaaatccaagaaagccctggtgagtggttgcttttcctatgttgcaaccatccgcgaagtgaatgctgctctgtgtctctattgttgttttgatggtgttcgagatgatgaggagaacctgagtcacagcctttacgagtctgatttcctcaatttacaggagctgcctacgcgttctggaagaattcacatgctgatttgtaggcggcctggccaggtgcttcggagactccagcagcatcgaaggtgtgattttagatctgtactcccgaggctcttgtgttatttaagaaggtcagtgtgaggccgggcgcggtggctcacacctgtaatcccagcactttgggaggccgaggcgggcggatcacgaggtcaggagatcgagaccatcctggctaacacagtgtaaaccccgtctcaaccaaaaatacaaaaaattagccggcgtggtggtgggcacctgtagtcccagctactcgggaggctgaggcaagagaatggcgtgaacccaggaggcggaggttgcagtgagccgagatcacgccactgcactccagcctgggcaacatagcaagactccgtctcaaaaaaaaagaaaaaaaggtcagtgtggttaaatgcataagaagtaatcagtgtgttaaatgtatgagttaattgagcatagcccaagtgaaagtgattgtgttttcatattaaaattagatttataaagagaatgctaaaacttgttggattttggaatgcaaggtctaagtaaaggtaggttttaatattgacaacttttacacttgatatattgactctttttttttttgagactagactctgttgcccaggctggagtgcagtgctgtaatcatggctcactgcagcctcaacctcccaggctcaagcaatcctcctacctcagtctctcaaagtgcttagactacaggtgcatgccaccatgcccgactaattttttaaaaaaaatttttagcgagatgacttagtgagaggtctcactaaattgtccaggctaatctcaaactcctgggctcaagcaatcctcccacctcagcctcccaagtagctgggactacaggcacgcaccaccacacccagataattttcaattcttttttttgtcgatagggtcttactattttgtccaggctggtctcaaactcctgggctccagcaatcctcccacctcggcctcccaaagtgctgggattacaggtatgagccaccgtggccagccttgactcaattcaaattcaagtcactaagtcttccttggaaagcacaaaacctcccccaggcattaaaatattcaagtgacacagaaaagggagaggtgaagaggagctaccacctggaggagaaggtgggctctgagccgggcctggagccaggcagggaggtcttcttagcacccagcaagctgcaccacccaagcactgccctctgccaccccacctctgctggcatggaaacctccctctgggggtccctctggcttcttgggtggagcctctttttttgagacagtctcactctgttgcccaggctggagtgcaggggcacaatctcgcctcaccgcaacctctgcctcccgacttcaagcgattctcctgcctcagtctcttcgcatagctgagattacaggcacctgccaccacgtctggctaatttttgggtttcaccatgttgtccaggcaggtctcgaactcttgatctcaagcaatccacctgcctcggcctcccaaagtgctgggattacaggcgtgagccaccacgcctggccttgagtcgagtcttgatgtctcaatcacactgccccaaatccatacacttgtttattcattcagcaaacaataaagcacctggacactccaggttccatgccaggagctggagttcacaggagagcacaggcctcggccctggggctgagtcttgccgccttcttcatggcttgtgactgctgtggtctgaatgctggtgtcccgcagattcatgtgttggaacttaatgcctaatgggatagtactaagaggtagggccttagggggctggttaagtcatgagggcttcaccctcacaaatgggattcatgcccttataaaagaggcttgagggagcatgtttccccttccgccacatgaggacacagcaagaaggtgccgtttgtaaggaatgggtcctcgccagacaccagatcggccagtgctttgatggtggacttcgcagcctccagcactgtgagcaatgaatttctgtcgttagaaaattacccagtctaaagtattttgtcagtccgggcgcgctgcctcacgcctgtaatcctagcactttgggaggccaaggcgggtggatcaccaggtcaagagattgagaccattctggccaacatggtgaaaccccgtctctactaaaaatataaaaattagctgggcctggtggcacacgcatgtaatcctagctactcaggaggctgaggcaggagcatcgcttgcacctgggaggcagaagttgcagtaagccgagatcacgccattgcactccagcccgggagacaagagtgaaacaccatctctaaataaataaataagaaagtattttgtcatagcagcctgagcagactaagcccctggccctcactcagcctctcctcagcctgccactcctgatggggacctactctggctctgtcctccccacccaaacacagcacccccacaagcagtggggagaggtccccagtggagcaggagtcctcctggactttgtacctggggccaccccagcagttaccgctttaaaaagaccacaacaaatgctaagctttggtgttctttatagaattctttttaaaaaacaaaaaaatgatcatcatgttttgtttgttttccatttagaagagaaacactttctcattattttaaaaatagaaacattacagaataggtactgtggaaagtgaaactgtcctttcccccgccaagcctctgtccctctcttctttcttcctgggggctcagcctgccagggccactgagctctaccatacaggttatagctacctgtcacttcttttttttttttttttttttggcccaggctggagtgcagtggcacgatctcggctcactgcaacctccgcctcccgggttcacgccattctcctgcctcagcctcccaagtagctgggactacaggcgcccgccaccacgcctggctaattttttgtatttttaggagagatggggtttcactgtgttagccaggatggtctcgatctcctgacctcgtgatcagcccgccttggcctcccaaagtgctgggattacaggcgtgagccaccgcgcccggcccttaattttctttttaatgcttctccgtattttctagctttctacaaagattaagtaatccataaataatttaaataaagtatcatttaaaagtctattctttttggccgggcgctatggctcacgcctgtaatcccaacactttaggaggcctaggcaggcgaatcacctgagcccaggagttcaagaccagtctgggcaacatggtgaaacccagtctctactaaaaatataaaaattagtcaggcttgatggtgcatgcctgtagtcccagctactcgggagactgacgcaggagaatcgttagaacccaggaggtggaggttgaagtgagctgagactgtgccactgcactccagcctgggtgacaaagcaagaccttgtctcaaagaaagaaaagaaaaaaaaaaagtctattctctttgattcaatatttactcttctgggaaagcaccccaaagaaataattctaaatcaagaaaaaggcctggtgtggtggctctcgcctataatcccatcactttgggaggccgaggtggacggatcacctgaggtcaggagtttgagaccagcctggccaacatggtgaaaccccatctctactaaaaatacaaaaattagctgggcttggtgcatggtggtggtgcctgtaatcccagctactcaggaggctgatgcaggagaatctcttgaactggagaggtggaagttgtggtgagcagagatcgcaccactgcactccagcctgggcaacagagactccgtctcaaaaaaaaaaaaaaaaaagtgttgtgcaggaacaaaaagattaagccaagcagatttgagcctcctcaagaaggcccttcctgacccaccctccagcacacctgtctggtgggagactgaggcacaagagcaggcatctgcgtgggaccatcactgtcttcggagttgaactaaaaatagtggagcgtggccagtctacacggacaccagccatcctcttgtttcgtgtttgctaaatgctgtgctcagcacttttctgcattattttattttattttcccaagaactctgcgtgggcagccactcttcttatcccccgtttcaagaacttactcacggaggacctgctcaagggggacttgcacgcagctcagtgggggcagagctgggactcggagcagggcccacctacctcctggtccgtgctcttaccctgcaggctgagccgctgcagtgtggctcgtccagcagggcctcatgctttcgggtgatgcctaacagccattccccctcctcctcattaacagagctccagccccacgggatgaatagagatgggcctaagctggtcctaccaaccccctgctcttttgccagtgattgatctagagtgcctatgtcaccctcacccaggtctgccagtgaaatgtagcgggggggatttctggagggcatttgctcttgctcactgcactgttacgtgagggggtgatgcttggagctgtggcagctcctttgtgcccatgagaagcagtagccctaatactagggtgagcagaaatccgtttgacttccttcaatacaggactttcagcaccaaaactgggaaagtactaagcaaatcagtatgattggtcaccttaaattgatgacacgggaagatagaaacttgggcccttgtcaagatgctaacctctggactttttttattttttattttttgagacagagttttgctcttgtagtccaggctggagcgcaatggcgtgatctcggctcactgtaacttccgcctcctgggttcatgcaattctgctgcctcagcctcccgagtagctgtgatcataggcacgtgccaccacacccaggtaatttttgtatttttagtagagacagtgtttcatcatgttggccaggctggtctcatactcctgacctcagatgatccacccacccagcctcccaaagtgctgggattacaggcatgaaccaccatgcccagcctggacgttttgttatgtaaacaatgactgtcttttttttttttttttttttttgagacagagtctcgctccgtcacccaggctggagtgcagtggcctgatctcagctcactgcaacctctgcctcctgggttcaagtgattctcctgcctcagcctcccaagtagctgggattacaggcgtgcaccaccatgcctggctaagttttgtatttttagtagagatggggtttcgccatgttggccaggctggtcttcacccctgacctcaggtgatccacccacctcggcctcccaaagtgttgggattacaggtgtgagccacctcgcctggccacaatgactgtctttatggttgaactcttcgtttcttgcggctgaaatcacaggggtgagacttgctggcctcccatgccctgtcaccccttgcgtttatgctgttccagtcccggagcccctggcccccaggtctgccatggatactgtgtccatccagccaggcgcctccctaaggccacctcctcctcaggggcttcccaggtgtcccagcagccaggggcaggcgtgccccggggttactccttttttctgacgtgtctcatgccctgcctttgtcatgggtcgctgggcaatcactgcttctcttctcgcctgtcccctccaccttcctgttcccccacaaactgtgagcccatagggagcagagagtacggcttcctgtatctttccctcatcccagcctcatggatcacatggagagcaggccacagactcagtttaaccagtctgctacatgtcttctctgggccaggaaacgaggtcaggcctcctcattccttcctgggccggcgggctcccttcacctcatcctgttcctgggttattcgcttctgacgcgaggccctagggccaccccagctccacatcggcctgtcttctctgcgccctgtggctgactcagccctgaatcacctcttccaccccaggtcctcttcccgggagaagctccaccatgggtgccatttctccttgtcccaggcttttcttgcctctggggactccaagcccttctccgggggatttcacccagctgctgtatatgactctctgtcccctctctgggccttagtcttctcctctggtaaaaaaggattcaccttgatgctatctaagtccctcgaatgagactctggggacaggaagtatttcagtcgatgtcgtcatgttgccagcttcacggggaccaaccaatgggcaggggaaggaaggagggccacgccagtgtgtctcttgtcctggctaggcatagggtcccaagccagagttggggacaagctgaccaagcaaacctcttggggtggctgctcctttcccagggaatccatgcgagagggtggccagggtctgcaggcaatgccaccgggccactgtggatgggagccagtggacttccaggaagggaagctaaagataccctcttcccggcatagcccagaaaggaccgggatctagttccctgtcctgttgtctctgggggcaggggtggtgaccctgagggccctggagcagctatgtggggctgggcacttctgggggctggagtctgggaccgggcatctattggccgagactctggaccggtgggcgagggcagggcagggtgggtgaattactggaagccccactggctctgtctctctgccaagctgcccactgcattctttggcctcctatttccaggcagtgtctgggatgggtcccaggcctggcctgccctgcaccggggagtccgtgtttggagtcaactgagctactgcttagggcggcagctgaggtgggtgggtgcagcttggacatgatgctatcagggacgctgggtacctggaacaaggaccgcctctccctagtgccatcctgggagctcaggtgacctgggagggaagggacatgtgtgagtgcctgtgtgtgcgcaagcgttcattgtggggggtgtgcacgtgcgtgtgcacacgctagcataggtggctgcgttgagacgaggggtcacaggcccgcatgtgcccgagtgtcctaggatgtgtgggtgagtgcaaaccttgggcaggccctgtcttctctagacatccccgtctggtggggtggccagaggggtggcatgggcagtttgggtctggatccctaacccacaacctgccccagggcagctgcccagagtgcttatgccagaacatctccaaggccgccagacgttgggatcgcatgtgccactgcattggctgtccccacccccatccccacgcctctgcccagggactgtagggtcggcgagaagcaaaggcgtgcccccatgcactctggtggctgcaccatggacactgaggttgatgcctggggttttcttagttttttttttaatttttaaaatttaattttttatttacttatatttttattctattatatttttatttaattatttgtttttatttaattatttttactgtgctcaaatatacataacataaaatctaccattttatcacatttatttatttatttatttgagacagagttttgctcttgttgcccaggctggagtgtagtggcatgatcttggctcctgggttcaagagattctcctgcctcagcctcccaagtagctgagattacaggcgcttgccaccatgcccagctaatttttgaatttttagtaaagacagggtttcaccatgttggccaggctggtcttgaacccctgagctcaagtgatccacctgcctcggcctcccaaagtgctgggattacaggcatgacccactgcgcctggccgtttgtttttgaggtggagtcttgctctgttgcccaggctggagtgaagtggcatgatctcagctcactgcaacctctgcctcccaggctcaagcgattctcctgcctcagcctcccaagcagctgggattacaggcacccaccaccacacctggttaatttttgtagttttagtagagatggggtttcaccatgttggccaggctggtctcgaacttctgacctcaagtgatcctcctgtctcggcctcccaaagtgctgggattacaggtgagagccaccacacctggccccatttttaccacttttaaacgtacagttctgtgacattaagcacattcccattgttgtgcaaccatcactatgacccatctccagagtgctttcatcttcccaagtgaacgtctgttcccattaaacaccaatgccccattccccctgcccccagcccctgcccccaccaatctgctttctgtccccacgaatctgactgcgctagggacctcctgtcagcagagtcacacggcatttgtgcacggcatttgtccttttctgctgggcttatggcaatcagcacagcgtccccagggctcacccatgctgcagcctgtgcctgggtttctctcccttccagggccggctgctcctccgtgtgagtttctccgtgtcgtttccccactgatccgcaggtggacacctgggctgcaccttctggctgcagtgaggagcctagatgttaagcctggcactggacagtggtgggcacctgggcacgtgatgggaccccctgagtctcactttcttcaactatggggcaggatctgtaacggttctggtggttttatttatttatttatttattttgagacagcgtctcgctctatcgcccaggctggagtgcagtggcgtgaactgggctctctgcaacctctgcctcctgggttcacaccattctcctgcctcagcctcctgagtagctgggaccataggcgcgcaccacgcccggctaatttttttgtatttttagtagagacagggtttcactgtgttagccaggatggtctcgatctcctgacctcgtgatctgcctgcctcggcctcccaaagtgctgggattacaggcgtgagccaccgtgcccagccacggttctggtgtttaagtgaggtcaggcatcctctgggaggtcagccgtcgtattgggttccaggcccgtgactactcacgggaggagtgagctgggccactgactccgtctctcacaagcctggaactggggagcaggagaatccctcacctcgtggggctgtggtggggacacttgtgtgggatgcagccagctcaggataggggcagcgaggaccaggcacgagtgggaggagcggggccctcagggctctgtagggttcttgactttttctcgcttctgtggcctcctcctatctccttccctagggccccacctggccttccgaatcctctcacggggcatatcagatctaccccagctgcctgaccgggagagcatcctgttcttcccctctggaattccgggtccacagctgtcttcctactcacatctggcctcggcattcccgccaagccctccccttgaagcacaaggatgttttgtccaggatcctgagcccagggccttccaggtggcagagagagatccggatgtccagccagctctgggggttcccccatcctgccagtgtggggacctccttgctgtagccaggtcaggccagccctagggagacagcaggatggttccaggaagcctgggccgctccccagatcaatgcagggacggacagcagccagcaggctgggccacggcatcagagctggggtcaagaggtttctagccctcttgtggctctcagccccgggtcctggctgcttcctgctgggcagtgacctccccagtccatttccctccctccttcctcccctggcctgagctcagctcatggaaggaggccctgtgtgcaggaaccttgatctgcacctctgaaggatgtcagggcagctttttctctgggcctgtatgactcagcgcaggatttagggcaggtggctccaccgtggagcctcagtttcctcatctggatgatgtgggtggacaatacccagtgcaggatccgtccaggcttacatgagacagcaatatagaagcctagctgatcacggcccccaacacaccttaaccccttcccactccccagctccccatctctagaccgagggagccaattaggctctcccgcagcaacaggtggtgagatagaagcttcgaggtggaggtaaagagtgaggactgtgcagcaatgaggagtggcccagatgggtctccctcccttcctgtgccacttctgcaggccccagtgcctgaggggtccagggccctatttggagagctccatggtggaggaggctgctcctccttcctgtggaccactccctgtcccaggggctgctgaccctgcttcactgcctggtggtggatgacgaggtcattatgagattagcacacactccaacgctgggtggagaaactagggtgggagccgagatcttctccagctagttcatgccctgaacaacatgagaaggaagctggggatggtctcacactttgagcttctcccacctgtcaaggttccctgtcttccttccagagccctcttccagcccctgcagcctctgtccccactgccatcccttgtgtggtgaccagtctccaagatggccccccagatccttgtctctggtattcatgcccttgggtagcccctcccacaccgaatcaggcagattcacatgacttcaggtctagggcataaagcatcgcctcttccatctggtctttcagctcagatactctgggggaagccagtcactattccacgaggaagttcaactaccccacggagaagctcatgtaaagaggaactgaggccaccagccaacagctgcatgaatgagccaccttagaagcgatcctccagccccagtcaagccttcagatgactgcagctctgaccaccatctcactgcagcctcatgagagacctcaggccagaaccacccagccaaaccactc

SEQ ID NO: 42 - DNA, 155515 bp, Homo sapiens
agggaggagcaccccaggcgggagctgtaggaggctgtgctggtccttctaggggaagggaaggggagggaagggaaggggaggggaggggaggggagggaaggggaggggagggacgggacaaggggtccccggagaagaggaaggagctccaccccagccccgcgaagccattacctttttcctgagaacatcggcccgagaatcacctaggagagaaggtgaggtcatttgagggcccgccctgcgcggatgcctggacacaggctatcaccacgaccacctcatccccagccacgcgcagggctggcccccgcacctggatctgcccccgggtcttgctgggggagccaggcagcacagtgggcaggttaatgcagctcattgcgcctccgggaagttcacgaacccgagtactctccaaggccgtcccgcagtaagcccctggttcccgcgccgaccgctttaaaccacggcgtgctggccaatcacgagccggccccgccgccatggggccaatcagcgcccggccgctgacctggcgggagatttggccgcagcccgccccctcgtgggaggaatccgggacgtgcgcccagggactgggagggcctggaaatcagggcgatggacgtggctgatcggggtggggcctggtctgagccccgcctcggtccgcccaccaagtttaaaggggcggagcgaggcggggctctggccatataaacagagggacgcacgcccatgcggctgtagacgccatgatggatgtgtctggtgtgggtttcccaagcaaggttccttggaagaagatgtctgcagaggtaggtggattgcagggagggactaaggggctggggcggagttagctcatttattagattggaattccaagaaggaagcttagaagccgtctagagcactcctgtgggcatgcagagcgcctagtgcgtgccaggtccccagtgcttgagcaccatggtgtattttaccttctcctaaggatttttgttaacctggttttcaggataaagaaaattgaagtcctgactatgctaataatatccgtagaccctgccaggcgtggcggctcacacctgtaatcctagcacttttggcggatcacgaggtcaggagttcgagaccagcctggccaacatggtgaaaccccgtttctactaaaaatacaaaaattagccgggcgtggtgatgtacctctgtaatcccagctactggggaggctgagacaggagaatcgcttgaacccaggaggtggaggttgcagtgagccgagatcatgccatttgtactccagcctggaaggctgggcgatagaccaagacttagtctcaaaaaaaaaaaaaaaaaaaaaaaaaaaaatccatagacccgcaggaggttaggggacaaagttctggaccttgatctgaggttacacaatgtttttgggtctgtgcttatgtggcacaggctgaaggattcagaacagctggtatttacattggggttgtgaaggttagaaacatacaggccgggtgcggtggctcaaaaaaaaaaagaaagaaagaaaagaaacccattgtataatcatgatcataaataatagcaacaaagatggtggtagtgatcacagagtgtgccaggtgtggctgtaaggatcctacaggtaataacctttccaggtacagattggacagatccaaggacctctgacaaagagctccttcactgggaggaagaagcaacccacactgactggcttgctttattttactcgcatgctttatctcttttaaccttgtgatttggatacatgccttctttttttgagacacagtctcgctcagtcacccaggctggagtgcagtggcatgatctcggctcactgcaacctctacctcccgggttcaagtgattctcctgcctcagcctcccgagtggctgggattacaggcacactgtagctggtactacatgcctggctaattttttttttttttcttttgagacagagtctcgctctatcgcccaggctggagtgcagtggcgcgatctgggctcactgcaacctcttcttccagggttcacgccattctccggcctcagcctcctgagtagctgggactacatgcgcccgcaaccatgcccggctaatttttttgtatttttagtagagatggggtttcactgtgttagccaggatggtctccaactcctgacctcatgatccgccccccttggcctcccaaagtgctgggtttacaggcatgagccactgcgcctggccaatttttgtatttttaatagagatggggtttcgccatgttggacagactggtcttgaactcctggcctcaagtgatccacccgcctcggcctcccaaagtgctgagattacaggtgtgagccactgtgccgggcctggatagataccttctaccagtcaggaaactgaatctcagagactaagtaacttgttgaggataaaacagtaagtaagtgagggaggtcagatggcatttgacctcaggccttgccatgaggctgccctgacttcccatttctcatgatggttttgagccctttcttcaaaatctggttccttgttacttttttttttttttttttttgagatggagtctcgctgttgtcacccaggctagagtgcaatggtgggatctcagctcgctgcaacctccacctcccgagttccagcgattctcctgcctcagcctcccgagtagctgagattacgggcgcccgccaccatgcccagctaatttttgtatttttagtagagacggagtttcaccatgttggccaggatggtctcgaactcctgacctcaggtgattcacccgcctcagcctcccaaagtgctgggattacaggtgtgagccaccacgcccagtgttttgtttttttttttttgaaacagggttttgctctctcaggctggagtgcaatggcgcaatcttggctcactacaatctctgcttcctgggctcaagcgattctcctgccttagcctcccgaatagctaggactacaggtgtccaccaccatgcccggttgatttttcatatttttcgtagagatagtgtttcgccatattgcccagactggtctggaactcctggactcaagtgatctgcctatcttggcctcccaaagtgctgggattacaggcgagagccaccgtgtccagcattttctgttggtttttttttttttttttttgagatggggtctcactctgtcgcccaggctggagtgcagtagcatgatcccggctcactgcaacctctgcctccctggttcaagctattctcctgcttcagcctcctgagtagctgggattacaggcgcgcgtcaccatgcctggttaatttttgtatttttagtagaaatggggtttcatcatgttggtcaggctgatcttgaactcctgacctcgtgatcccgcctccgcctcccaaagtgctgggattacaggcgtgagccaccgcgcccagcctctgtttttttttttctttttttaattctccaaactgcctcagaatggttccttgttactttctgcataaagtgtgaaggtgttagcccgacattcaccgcccctcctcctccagcccagcctcccagcctcacctctgtgtgtcagccatagggcctgccagcatttgcaaactgacctttcattccttcctcctcacctctgtgcctttgactgtgcagtgacctcctgtggtcagaatcgcaccctctcagcgcagatcagctcctccttttttaatttttttgaggtagagtcttgctctgtcgctaggctggagtgcagtggtgcgatctcggctcactgcaacctccacctcccaggcttaagcaattctcctgcctcagcctcccaagtagctgggattacaggtgcacaccaccacgctcggctagtttttgttttcagtagagatggggttttgccatgttggccaggctggtctcaaacttctgacttcaagtgatccacctgcctcaggctcccaaagtgctaggattacaggcgtgagccaccgggccacctggcctcccctggtcgtaactgctgtgggagtggtgcccatgatggcattaactgaattcgtttgggggacctcatctccccttaaggctgccagctggctaaaggcacagcggtcgctggtatacctctagaccatggatctgagggcatcttggagaccctgggatactggggcgagggcttctaaggcagagaggagcagccgggcatgggcgagggggaggggcacactctgttgagaaggaaagtcttacggagcctcatgtttgtgccctgcaggagctggagaatcagtactgtcccagccgatgggttgtccgactgggagcagaggaagccttgaggacctactcacagataggaattgaaggtactagtgtgacctctccgtggccgcattgggtgtccttaagcatgtggcagtgattcagaatgctgggggttgggggggctgtgctgcaccacctgggcctcgaggggcatttcccaaacaccaggcactttataaacctccctgctcaggggcaggtgcccaggaccccttgctgcagggactactggaggcaggagaggtccgggggaggtccacggctcagtcgaccatgcctggcctttcttgctcagccatccatacccaggcccgtaaggctgcgggctgtggttggcatagggaggtgaagtgaacagaggaacgttccccatccgctgctgaatgtggaatgcggtcactattcctaaaaagcaatactttgggaggccgaggcaggtatatcacttgaggccaggagttcaagaccagcctggccaacatggcaaaaccctatctctacaaaaaaatacaaaaattagctggacacctgtaattccagctactcgggaacctgaggcatgagaattgcttcaacctgggaggcagaggttgcagtgagctgagattacatcattgcatgccagcctgggtaacagtgagaccctgtctcaaaaaaaaaaaaaagcaatgaagcctcttttttttttgagactgagtcttgctctgttgcccaggctggagtgcagtggcgcgatctcagctcactgcaacctctgcttcccgggttcaagcgattctcctgactcagcttcctgagtagctgggactataggcgcacctctccacacccagctgatttttgtatttttagtagagatggggccaccatgttggccaggatggtctccatctcttgacctcgtgatctggctgcctcggcctcccaaagtgctgggattacaggcatgagccatcgtgcctggccgccttttctttctttcttttttttgtttttgagacagagtttcgctcttgttgcccaggctggagtgcaatggcatgatctcgactcaccgctaacttcgcctcctgagttcaagtgcttctcctgcctcagcttcctgagtagctgggattacaggcatgcgccaccacgccctgctaagtgttttgtatttttttttttttttagtagagatatggtttctccatgttggtcaggctggtcttgaactcctgacctcaggtgattcgccctcctcggcctcccaaagtgctaggattacaggtgtgagccaccatggctggactttttttttttttttttttttgagacggagttttgctcttgctgcccaggctggagtgcaaaggtgcaatctcggctcactgcaacctccacctcccaggttcaagcgattcttctgcctcagcctcctgagtagctgggattacaggcctgtgccaccaagcccagctaattttgtatttttagtagagatggggtttctccatgttggttaggctggtctcaaactcccgacctcaggtcatccacctgcctcggcctcccaaagtgctgggattacaggtatgagccaccgtgcctggactttcaccttttctttctttaaagaaatctggacttgggaacctgtaaactagtgaagtcttaaggtccatttccatctctaccctgtatctgcaaagtgctgtaccacgatctgaacacctggtaatgcatccgtgctgggatggggagcaggccccgaggaggaagtgtaggtgaggacgcagccaaccatgcttggcaaattagctctgttgcagcaggctcaacacagcctttcagaggcagatgcctgggctcctgggcttggtggttttctaagcggagagaacccaggaggaggaacagacttgttagaagtgtattccagcaattccaccatcctcctgtctcaatagattgggggggagctgtttcctgggctcttcatgttccttgctgtgctcagctctgatccaaattcatctctatttgctcgataaatacatgagtgtggtgaaacatacaagagctgtaagcagccaggcgtggtggctcatgcctgtaatcccagcactttgggaggccgaggcgggcggatcatgaggtcaggagatcgagaccatcctggctaacacggtgaaaccccatctctactaaaaatataaaaaattagccaggcatggtggcgggcgcctctagtcccagctactcaggaggctgaggcaggagaatggtgtgaacctgggaggtggagcttgcagtgagccgggatcgcgccactgcactccagcctgggcgacagagcgagactctgtctcaaaaaaaaaaaaaaaaaaaaaaaaaaaagctgtaagcaaacctatttgcctgtcttaattgtcttgagtgataaaaagagctgaccctattgagaaagaatgtcagatgtaaaaagcacgcactattgaaacttcaagtcatatgaatgaaagaaaattaaaaggaaaggattaaaaaggaaaaaaaaaaaagaggccaggaactgtcacacacgcctgtaatcccagtactgtgggaggtcaaagcacgaggatcctttgaggccaggagtttgagaccagcctgggcaacatagcaataacctgcctctacaaaaaatttaaaggccaggcgtggcagctcacgcatgtaatcccagcactttgcggggctgaggtgggcagatcacaaggtcaggagattgagaccatcctggctaacacggtgaaaccctgtctctactaaaaatacaaaaaattagctgggcgtggtgcgggcacctgtagtcccatctactctggagactgaggcaggagaatggcttgaacccagaaggtggagcttgcagtgagctgagatcatgccactgcactccagcctgggcgacagagcgagactccatctcaaaaaaaaaaaaaaaaatttaaaaattagcagggtgccgtagtgtgcacctgcagttccacctacttgagaggctgaagtgggaggattactgctgccttggagttcaaggctgcatatttctttatgtattgggttttttttttttttctttgagacaaggcctcgctttgtcacccaggctggagtgcagtggcgtgattttggctcattgcaacctctgcctcctgggttcaagccattcttgtgtctcacattcttgtgtttcagcctcccgagtagctggaatttacaggcgcgtgccaccacgccagctaattttgtatttttagtagaggcggggtttcaccatgttcgccaggttggtctgggactcctggcctcgagtgatctgctcgcctcccaaagtgctgggattataggcgtgagccacactttgccttctttgcaccagggagaattatattttttctcattttttatttgtattcgtccttacaatgccagcctgttaacttgcaatgagggatgttcgcttttaatgagtagacagcctcatccccatcaaggcctggccgccctcatctgggctcagggagaacaaagtctaactgctgtgtgagtatggtcagggcgcaggaggctggcagagagggggtttaagaaccatttcctttaccactagcttttaaattagttttactgtgaccttcagtaaaaatacttttttttttttaagacggagttttgctcttgttgtccaggcttggagtgcaatggcgcaatctcggctcaccgcaacctccgcctcccaggttcaagcgattctcctgcctcagcctcctgagtatctgggattacaggcatgtgccaccacgcctggctgattttttatttttagtagagacggggtttctccatgttggtcaggctggtctcaaactcccgacctcaggtgatccacctgcctcagcctaccaaagtgctgggattacaggcgtgagccaccgtacccggcccaaaaaaatacattttacagtcagcaaaatgctgtatatattttttatccagatacaaaagttcaaattctgtatgatttcatttaaatgaggtccctagagaagtcaaattaataaagacaagaaatggaatggtggttggtaggggcaaggggagggaggaatggggagtgagtgtttaaaggggacagtttctttctttttttttttcttttgagacagggagagtctcactctgttgcccaggctggagggcagtggtgctatgtcatctcactgcaacctccacctcctgggttcaagcagttcttgtgcctcagctgcccgaatagctgggattgcagatgtgcaccaccacgcccggctaatttttgtgtttttagtagagacagggtttcgccatgttggccaggctggtctcaaactcctggcctcaggtgatccgcctgcctcgacctcccaaagtgctgggactacaggcatgagttgccgcgtgcagccctgcagtcctgttttttttttttttggggcggagtttcactcttgttacccaggctggagtgcaatggcgcgatctcagctcaccgcaacctctgcctcctgggttcaagcagttctcctgccttggcctcccaagtagctgggattacaggcgtgcgccaccacgtccagctaattttgtatttttagtagagatggggtttctccatgttggtcaggctggtctggaactcccgacctcaggtcatctgcccgcctcccaaagtgctgggattacaggcaagagccaccacgcccggccttgcagtcctgtttttaataccatgcacagcattataaattattattattattattatttttgtttttgagacggagtcttgctctgtcacccaggctggagtgcagtggcaagatcttggctcactgcaagctccgcctcccaggttcacgccattctcctgcctcagccacccaagtagctggtactacaggcgcccaccaccatgcccagctaattttttgaatagagacggggtttcaccgtgttagccaggatggtagcattagaaattatttctaacccaggctgggctccatggctcatccctgtaatcccagcactttgggaggccaaggcggtgggaatcacttgaggtcaagagttcacggccagcctggccaacatagtgaaaccccatctctactaaaaacacaaaaagtagccaggcatggtggcgtgcgcctataatctcagctacttgagaggccaaggcaagagaattgcttgaactcaggaggcagaggttgcaatgagcaaagattgcaccactgcactctagcctgggtgacaaagcgagaccttgtctcagaaaaaaaagaaaagaaattatttctacccagccaggcacagaggctcacgcctgtaatcccagcactttgggaggccagaggggggcagatcacttgaggtcaggagttggagaccagcctggccaacacgacaaaacaccttctctactgaaaatacaaaaatgagccaggcatagtggcacatgcctgtaatcccagccaccggggaggctgaagtgggagaatagcttgaacccaggttggggaggttgcagtgagtcgagaccacgccattgcactccagcctgggcaacaaagaatgaaactccatctgaaaaaaaaaacccagaaattatttctaacccaaaacaattgaaaacaggtactcaaacaagcatttttacacgcgtgttcgtagcaccatttccacatagcctgagttgtaaataatagcaatgaagcttttgctttaatgagaaaggaagtttgccataaggtttgttctggggtgtcttgctgaagccctcctgtgttcttgccctggggttcagggactggagggccctctgtggggggcatgagtcacttcattctctgtctctgcaccccagctgtcctctcctagagagaggcaatttctctttcccgaggttagtagagttttttaatatctgagagaggcttatgcatgataatgaacacctatagctgcttggttttaatggccattccacttagaacataaattccatgatgtttttcttaatcgtagcacaactttaatctagtccatttataggcttgagaactcctgtgtgaattaaatcacgaccttctgatgaagccactccgatgagcctgtgaggcacattgtcttcacactgtgctggggcagggttgttggcaaacccccatggatggcagccggcaatggcctcacagtgacaaatgcgtctgccttttgacccagaattctacccctgagagtgcgtcctacagatgcttgcaagtggtatggtaatggatgtacaaagctattcacagcaggggtgtttgtggtagcatggcctgggagacagcccagatggctttcagcaaaggattggtggcaggtctgcagccctggggcttatcagacaccaaccctgctggcaccttgatcttggacttccagtttgcagaactgtgagaaaataaaatttccattaagtttccccagtctggtattttgttatagccgcccaggctgactcagacaggagcccaggatggatgtgagcgtgttataaccagctcacgcttgtggctgtagggagtccgggtagaagctggaagagcctagaggggtggctgctgccttccagggaacaggtcaaagggtatccaaccagagtggtctcagtgcagatggggaggagactctagacccaggacaagcagtggagggggcatccaaggatttcctgatgatcagatgtggtttgagaaagagagggggccggtggcgcatgcctgtaatcccagactttgggaaaccaaagcaggaggacgcttgagcccaggagttcgaaaccagctggcaacatgcaagacctggtctctacaaaaaaattaaaaattagctgggtgtggtggtgcttgggaggctaaggtgggaggatcacttgagccctggagttcgagaacagcctgggcaacatggcgaaaccctgtccctacaaaaaatacaaaagttagccaggcgtggtggcacacgcctatagtcttagctactctggtggcagaggtgggaagcttgtttgaacctaggaggttaaggctgcagtaagccgagattgcaccactacactccagcctgtgtgacagagtgaaaccgtgtctcaaaaataaaaagtgaattcaggagttccagaccagcctggccaacaccgtgaaaacccatctttactaaaaatacaaaaattcgcctgggccagatgcactggctcgcacctgtaatcccagcactttgggaggccaaggcggggatatcactcaaggtcaggagttcgagaccaacctggccaatatggtgaaaccccatctctactacaaatacaaaaaaaaaaaaaattagccatgcatggtggtgcgtgcctgtaatcccagttacttgggaggctgcggcaggagaatcgcttgaacccaggaagcagaggttgcagatcacttgaacccaggaaacagaggttggagtgagcggagattgcgccgttgcactccagcctgggtgacaagagcaaagctctgtctcaaaaaaaaaaaaaaaaaaaattagacaggtgtggtggcgcacacctgtaatcccagctgctcagaaggaggagacaggagaatcacttgaaccccagaggcggaggttgcagtgagccaagattgcaccagtgggctccagcttgggcgacagagcgagcctctgtctcaaaaaaacaaaacaaaacaaaacaaaaccaaaaccacacaaggcttttcagtgaaatgctcactcctcttccctttcgtgtgcccagttcccctggcccccgtcaaggtggccactgttcttcatatggatatagactccccctccctttcatccaaatggccccgtagtacacacagttccaccctgccagtttcacttagtatttcttggagatgtttcctcatctgtacgtagatagcttctcgtcagtacgtcagtacgcagggagccctgcaggggcaagtggttggtaacgtgggtgctggcaaaacaggttttgcaacctcactggcgttctgcaaaggcagcttcctgcctggattggcccatgggcaacttccctttgatttccctcagctttaatccatccagctgaagtggagacagcccggtttatggttctgcattctggcatagacgcaattcgtacaagctctcagccccatgctttttcttcctctgccgtgtttacccttctggagttgcagaatgaatcacccacccgagggaagcacggttgtttttttttttcttttctttttttttgagacagtcttgctctattgcccaggctggagtgcagtggtgcaatctcggctcgctgcaacctctgcttcctggttcaagcaattctccttcctcagcctcctgagtagctgggagtacaggtgtgcgccaccacgcctggctaatttttgtatttttagtagagatggggtttcaccatattggccagggtggtctcgaatgcctgaccttgtggtccacccgcctcggcctcccaaagtgctgggattgcaggtgtgcgccgccgcgcccggccaggcttttttttctctaggcctgctgtggccaccaaggctggggaccagggggcctccagggacagggatcccaagttgcacgttaatacacggagccctttctgagatgcaggttctacagggaactggattccacctcttttggggagatcaacccagcagcccaaggatcccctgatggtgcctgagcacagctgtgagaagggggtatctggatccttggggtgacaggatgggagaggtggagcatgggcctgcaggctggcccccagaggccttaggtctctgctgactagctagaattctgaaaactgtgttatgtaagacgtttagcatctgcagtgccaaataaaggtgacccccacaacgacataaaaaaaaaaaaagatatgtccaaatcctaaccctgggaacctatgaaaatcctaaccctgggaacctatgaaggtatttccttatttggtgtgttttgttttggtttggtttggtttggtttgtttgatacagagtcttgctctgtcgcccaggctggagtgcagtggtgtgatctcagctcactgcaacctctgcctccgggttcaagcgattgtcctgcctcagcctcccaagtagctgggattacaggcacgcgccaccacgcccagataatttttgtatttttagtagagacagggttttaccatgttggccgggatggtctcaactcctgacctcaagtgatctgcccgcctcagcctccctgtaaccagctgggattgcaggttcccggttggtatttccttatttggaaagaccatctttgtaggtgttattagctaaagtcaagtcattctgggttagggtgggccctaaatgccattgactgctatcctgctaagagacagaagagggagggacacacagggaggggaccacgtgaagacggaggcagagacgggaagaggcagaggtgactggagtgacgtagccccaggccttggaacgcctggagccaccaggagctgcaggaggcaaaagaggcattggcagagtgtggcagtgtccacaccttaatttcagacttctggcctttagaactgtgagagaatcacgttctactgctgtgagacactcaatttgcagtactttgttacagctgccctggtaaacaaatgcaatatttattttcagcaaagcagggagttcctgcaaagatgactagaccaggttccttctcccaagagcgcagtgtcctagctgtgaatactaggagtgcgttgctgcggtgggaggggaggcagggtttactgactgatcattcccagtggtctggatgctctctttctttctttcctttctttcgagacagaatctcgctctgtcacccaagctggagtgcagtggtgcaatctcagctcactgcagcttctgcctcccaggttcaagtaatcctcccacttcagcctcccgagtagccggaattataggtgtccaccaccacgtccagataactttttttttaatttttagaaaatataggctaaggcacgagaattgctggaacccaggaggcagaagttgcagtgagccaagatggcaccactgcactccagcctgggtgacagagcaagactccgtcgcaaaaaaaaaaaaacgatgaatgctaggataaaaaataaagcaagaggccaggcacagtggctcatgcctgtaatcccagcactttgggaggccgaggtggatggatcatctgaggttgagctcgagaccagcctcgccaatacagtgaaaccccgtctctactaaaaatacaaaaattagccaggtgtggtggcacgggcccataatcccagctactcaggaggctgaggctggaggattgcttggcgccgggagtttgagactgtagtatgctttgattgcacctgtgaatagccactgtactccagcctgggcaatatagtgagaccctgtcctttaaaacaaaaaagtatagcgcacataataagtgtgtagtaaagtcgtgctgaaaagggtcctcgcagaaccacagttcacttgttgacagacgtcaggactggcagtcttttttttttgagttggcgtctcgctctgtcccccaggctagagtgcagtggcgtgatctcagctcactgcaagctccacctcccggattcacgccattctcctgcctcagcctcctgagtagctgggactacaggcacctgccaccacgcctggctaattttttgtatttttagtagagacagggtttcaccatgttagccagggtggtctcgatctcctgacctcgtgatccacccgcctcggcctcccagagtgctgggattataggcgtgagccactgcacccagcctggcagtcctctttcgatgggaggtgctcagagctgaagctcaacacgccaacttaagggagctttcagctggaatgtttctacctgagctgaaatagaaattgccgccacctggctgggcacagtggctcatgcctgtaatcccagcactttgggaggccaaggtgggtggatcacgaggtcaggagttcaagaccagcctggccaacaaccctgtctctactaaaaaatatatatatatatataaaaattagctgggcatagtggcgtgcacctgtagtcccagctacttgggaggctgaggcaggagaatcgcttgaaccggggaggtggagattgcagtgagccgagatcgcgccactgcactccagcttgggcaacagagtgagacttcgtctcaaaaaaaagaaaagaaaaatttctaccacctgagcttgtgctgacagcgacttgtccatttctgagacagccaccacaagggcccgggccaccaggaagagcctgctgcatgtcccctatggagacggcgaaggggagaaagtggacatttacttccccgacgagtcgtctgaaggttgtcggtgaaggggctgggggtcccggggcttgggggtccagtggcagagctcagcagggcgggccttgctcacacgccctgtgcttggttttgcagccttgcctttcttcctgttctttcacggaggatactggcagagcggaaggtgagtcgggggatgtggatggtggactgcaagagagattccactttccctgggggactcctcctccagggctgccgcaaccaaactgccacaagctgggcactccttgcagggctgtgtctcacagcgctggagaacggaagtctcaagtcaaatgtgggcagggttcctagggagggtccttcctgccttctccagcttctggtggccttagacagcccttagcttgtgtctgcatagctccagcctctgcctccattcacatgtgatcctggtgttcctgggtctcaaatcttcctctctctttttttttttttttttttttttttgagacagagtctcactctaacccagactggaacgcagtggtgcgacctcagctcactgcaacttctgcctcccgggctcaagcaattcttctgcctcagcctcccaagtagctgggattacaggtgcacgccaccacacccagctaatttttgtatttttagtagagacagggttttaccatgttggccaggctggtcttgaactcctgagctcaagtgatcctcctgccttgacctctcaaagttctgggattacaggcgtgagccaccacaccagcctccttttttttttttttttttttataaggtcatagtcacaggttctggggttaggatttggacatatcttttggggggacacagttcaacccactacacccagtgagaagcatgttcagcctcctcttgaatcaagggaaaagccagagtgaccaaccactgtcccagtttgcttgggactgaggaggggtttcccaggacatggggttttcagtactttaggaaaaaaaaatgagagtcccaggtaaaatgggacagttggtcactgtaagctaagcagtgggtatttgggaatttgggatcttggcagacactgctgttccctagggtcttcctacagagttgccttcaagcatgttcatgttaatagcttacatttaatggccaggtacggtggctcacgcctgtaatcccaacactttggaagggcaaggcggacggatcacttgaggtcaggagttcgagaccagcctggccaacgtggtgaaaccctgtctctactaaaaatacaaaaattagctggacgtggtggtgtgtgcctgtaatcccagctactcgggaggctaatgcaggagaatcacttgaacccaggaggcggaggttgcagtgagctaagatcatgccactgcactccacccagggtgacagagcgagactctgtctcaaaaaaaaaaaaaaaaaaagcttacatttattgcacacaaaactctctacactgctagtctttaattctcaaaaacagttccctgagagagggaacataattgcctctattttacagatgacaaaaccaggcttagaagttacacaaattgccttgcacagtggctcacacctataatcccacacattgggaggctgaggcaggaggattgagttagaaaccagcctggtcaacatagcaagacccccatctctacaaaagaaaagataaatttgctgggcatagtggtgcacacctatactcctgcttgggaggctgaggcaggaggatcgcttgagcccaggaggtcgaggctacagtgatccatgatcgcaccattgcactccagcctgggcgacagagcgaggccctatcgcttagaaaacaaaaagttacatgaagttcccccaaggtcccgtagctagcatgtgatgtggcagggagagagcctgtccgcttcactctctcacatgggaccagaaaggggtgatgctgtgcgtggacaggacatctggcaagtggtgtgtccaggacacaggaagcagcgtagtggccaagctgcctccagctgtcacatctgtgtgtctctgcagtaaggatgagtctgccttcatggtccacccgctgacggcacagggagtggccgtggtaatagtggcttacggcatcgcccccaaaggtaataggagtggttgctgcaggtccgagggccggtgggctttaggaggaagtgcatccctgacccagctcatgctctctgtgcaggcaccctggaccacatggtagaccaggtgacccgcagcgttgcgtttgtccagaagcggtatccaagcaacaagtgggtgttgccagtagattttcttcctgttggacctcagtgggtgggaggacagtgcaatcagtacctaggatacagccaagctgcccctctggcctgtggagcagaaagcaaattgggactcttcgaagggggcctgatgttgtggggaaactgcgtgcaaatccagctctctgctctgacccctcccaggggaatttacctgtgtggacactcagccggggcccacctggctgccatgatgctcctggccgactggaccaagcatggggtcacgcccaacctcagaggtttccatgggagctacagcctggctgggcaaccttcatctccccatgagccttggggtttgggccaactgcttgaaatcctcccggccatgagtggcttgaccgcagggcttcgagccctctgagcaaggccttctctgcctcctctgtgccccttcccctggtcctgcccctctggcggtgggggtgggctggccctgccttgctccgcctggagcctggccctgtgacaattctgtaccttcacaggctttttcctggtgagtggggtctttgacctggagcccatcgtgtatacttcacagaacgttgctctccagctgaccctgtgagttacttggccaccacctcccctggctcaccaggagcctggctcctctctgtcctgacccctgtccactccccaccccagggaggacgctcagaggaatagcccccagctgaaggtggcccaggcacagccggtggaccccacctgccgtgtgctggtggtcgtgggccagttcgactcccccgaattccaccgacagtcctgggagttttaccaggtactcccagtgcaggtttgtggccagaggtcgagggtcatgtgggctcattattttcctctttcttttacccaagtggacaagaccctccatcatttatttaacacgtactgagtgaaccctgacctgtgccaggcatggccccatgtcctgccccacctcccctcccactgctcaggcccctcttcccatgtctcccctgcccagaccctgtgtcaaggagagtggaaagcctcatttgaagagctccacgatgtggaccactttgaaattgttgagaatctgacccagaaggacaacgtgctcacccaggtggggcctcatccctggcagccctttcatggtagacagcacaggtcctgtcgcagccccttagatgtgcaaaccaggagttcaagaccagcctggccaacatggagaaactccgtgtctactaaaaatacaaaacaaattagccagatgtgatggtacgtgcctgtaatcccagctactcaggaggctgaggcatgagaattgctttaacccaggaggcagagattgcagtgagccaagattgcaccactgcactccggcctgagcgacagagtaagactctgtctcaaaaaaaaaaaaaaaaaaaaaagacctgagaacctaggaaagaaagaacctaagaaagaccatcttgtttctttctttttttttttctttagagacagggtctcctctcttgcacccaggctggagtatagtggcaaaatcttagctctctgctgcctcctgggctcaagtggttatcctgccccagcctctcgagtagctgggactacaaaggcgtgccactgtgccctgctaattattcaatgttttgtagagatggggtctctctatgttccccaggctggtcgtcgtcgtcttccttcttcttcttcctccttcctccttcatcttctttcttctcctcctccccctacccccccttcttcttcttcttccttcatctcagcatattatacctctaaccagactgtcttcaactcctgagttcaagtgatcttcccacctcagcctcccgaagggttggggttgcagacgtgagccactgcatccagccctgtctcatttccttaatcaaattcctgcaaagagctgctctgattctggggcttttgtgtcttctcttcctgttccagattatcttgaaaacaatcttccagtagttctgacgatacttggagcctggtccacgtgcatcccaccttgggaagcctctccaaagagctttcggagctgacactgacagcttcagtttcccccagcacccaggagagccttgctgtgtctgtctgcccggcaagagtccattctcactgctgggacactcatgaaaatctccacgtcctccctcttcccagcctggatggagctccagggctggggaacgtccgcaagtcaatgctcagagatgcccggagctgcctcttagactcgtctggcccatctacctgctgacagagcatgacaaagatgacgctcaaaagtaatgccattacttcttttttttttttttttttttttttttttgagatggagtcttactctgtcacccaggctggagtgcagtggcgtgatcttggctcactgcaacctccacctcccgggttcaagcaattctcctgcctcagcctcctgagcagctgggactacaggcgcctgccatcatgcctggctaatttttgtatttttagtagagacggggtttcaacatattggccaggctggtctcaaactcctaaccttgtgattcgcccgccttggcctcccaaagtgctgggattccaggcgtgagccactgcgcccggccagaatggcattatatttaaatagttcataaagaagcacaaaagaatattatttcataacatgtaaaaattatataaaacgtaaatttccatgttgataaataaagttgtattggaacacggccctgctcgttcatttacgtattgtctagggcagctttcaagctgcagggtggagctgagtggtggtgacagtgacctcctggcccgtagtgcctgaagcatttcctatctggcccttttcaggaaaagtttgcggacccctgggtaagggcttccccaagccagctaccctctgccttctgcttcagtctcctgtctgctctgtcctccatctccctgacatttgggtctgtccctgaatgccccggggtctcagcgttggggccaacaccttgaccttgacaggacaatgctacccacatgtaggacaagcttcctctgcacccgagagtggtgtgcatgtcccaagaagccagctatatccatccaccacccaccccaccacaccgcctctttctctcacaccgaatagcattcaagaatttccactgtgggctgggcgcaggggctagtgcctgtaatcccagcactttaggaggccgaggtgggcgaatcacctgaggtcaggagttcaagaccagcctggccaacatggcaaaaccctgtctctactaaaaatacaaaaattagccaggcgtggtggctggcgcctgtaatcctagatacgtgggaggctgagttaggagaatctcttgaatccgggaggcagaggttgcagtgagctgagattgtgcccctgcactccagcctgggtgacaaagccagactccatctcaaagaaaaaaaaaaaaattccactgtatgtgtgcagcaaaccatcatgacacacatttacctgtgtaacaaacctgcacatcctacacatataccctggaacttaaagtaaaagttgggggggggggtaaaaaagaatttccaccgtgacattattgagtatagcaaaaaaaaaaaaaacaagaaacagcctagtgttcattagggaataaacgcattcaagcagcatcaaaccctgcagccattacaaagagatctatgttgaccatgtggaatatctccaagagccacagtagcctcccttatctgtaggattcactccaagaccctctgaaaccatggataatactgaaccctatatacactatgttttttcttgtatatacatacctacgataaagtttaatttataaattggcaaagggtatataaatattccttctaagagattaacaataactaataaagtagaacgattaaaacaatatactgtgatcaaagttatgtgaagccaggtgctgtggctcatgcctgtaatcccagcactttgggaggctgagacaggtggatcacctgaggtcaggagttggagaccagcctggccaacatgacaaaaccccgtctctactaaagataaaaaaaattagccgggcatggtgacacatgcctgtaatcccagctacttgggaggctgaggcaggagaatcgcttgaacctgggaggcggaggttgcagtgagctaagatcacaccattgcactccagcctgggcaacaagagtgaaactctgtctcaaaacaaaacaaaacaaaacaaacttatggggttgctctctttctctcaaaatatcctttttttggcagggcacggtggctcatgcctgtaatcccagcactttgagaggctgaggtgggtgaatcacctgaggtcaggagttcaagaccagcctggccaacatggtgaaaccccgtctctattaaaaatacaaaaaattagctgggcgtggtggtgcaggcctgtaatcccagctacttgggaggctgaggcaggagaatcactcgaacccaggagctggagtttgcagtgagccgagatcatgccattgcactccagcctgggccacagagcaagactccatctcaaaaaaaaaaaaaagaaaaaaagaaagtcttttttttttttgagactgtatctcactctttctcccaggctggagtgcagtggcccaatcatggctcactgcagcctcgacctcccaggatcaagtgatccttccacctcagcctcccgagtagctggaagtataggtgcacgcccgactgatttttttttttttttttagacggagtctcactcttgttgctctggctggagtgcaatggcaggatctcggctcactgcaacctctgcctcttagattcaagcgattctcgtgcctcagcctcccgagtagctgggattacaggtgcccaccaccatgcccggataattttttgtatttttaatagagacagggtttcaccatattggtcaggctggtctcaaactcctgacctcaggtgatccacctgcctcagcctcccaaactgctgggattacaggcgtgagccaccgggcatggcctttcctggctaattttttaaatttttgatagagatggggtctcagtgttgcccaggctgatcttgaactcctagattcaagtgatcctccctccttggtctcccaaagtgctgagattacaggcgtgagccaccgccccgggctggaaaatacttttttaaacgagggcaatgtgaatctgaaatgccatttgaggaaagatctgttcgcctgacatcctgtttgagcctgggtggacaggacagcacctgccagcatcgggaagcactgcagatgggaagaggcttggtcactctccaaaggtggcaggagttggagggggtgagctgaaggtaaggagaaaggaggtggggacccaggagacaggggctgcgcagcgggctcggggctgacacccccacggatacagttcactggggctcaaacataaaaggaacccaactattgtgggaggaaaagactcttctgcctttctgccttttctttttttctttttctttctttctttttttttttttttttttgagacagagtcttgctctatcgcccaggctggagtgcagtggcgtgatctcggctcactgcaagctctgcctcccgggatcacgccattctcctgcctcaacctcccgagcagctgggactacaggcgcctgccaccacacccggctatttttttgtattttttagtagagatggggtttcaccgtgttagccaggacggtctcgatctcctgaccttgtgatccgcccgcctcggcctcccaaagtgctgggattacaggcgtgagccaccgcgcctggctcttttttctttcttttttttttttccgagacagagtttcactcttgttgcccaggctggagtgcagtggcgcaatcttggctcactgcaacctccacctccagggttcaagcgattctcctgcctcagcctcctgagtagctgggactgcaggcgcgcaccaccacgcctggctaatttttgtatttttagtagagacagggtttcaccatattggccaggctggtctcgaactcctgaccttgtgatctgcccacctcagcctcccaaagtcctgggattacaggcgtgagccaccgtgcccagcctgacccctctgccctttcaaaaactatgttcgttctctcacagccttctcttgtcatattaagtccacaccgcaggcctaatttgtccagtgaatgctatgcaaatatttcatgcacctgctgatcgcaggaatgatatgtacttggtacgcactgatcgtacctcggggtgggagaagagagggcaaggaagcaaagaatagccccctcctttcctggtgcaccttcagatgtgccgatggggcccaggctcgctgcagatggcccccttcccagagacaggggaggatcctccacccactccccagcctccaggaccatcctgactcctgccttcaggcactcaagttatgcgtctagacatgcggatatattcaagctgggcacagcacagcagccccaccccaggcagcttgaaatcagagctggggtccaaagggaccacaccccgagggactgtgtgggggtcggggcacacaggccactgcttccccccgtctttctcagccattcctgaagtcagcctcactctgcttctcagggatttcaaatgtgcagagactctggcacttttgtagaagccccttctggtcctaacttacacctggatgctgtggggctgcagctgctgctcgggctcgggaggatgctgggggcccggtgcccatgagcttttgaagctcctggaactcggttttgagggtgttcaggtccaggtggacacctgggctgtccttgtccatgcatttgatgacattgtgtgcagaagtgaaaaggagttaggccgggcatgctggcttatgcctgtaatcccagcactttgggaggctgaggcgggtggatcacgaggtcaggagttcaataccagcctggccaagatggtgaaaccccgtctctactaaaaatacaaaaaaattagccgggcatggtggcgggcgcatgtaatcccagctactgggggggctgaggcagagaattgctggaacccaggagatggaggttgcagtgagccaagattgtgccactgcactgcactccagcctggcgacagagcaagactctgtctcaaaaaaaaaaaaaaaaagtgaaaaggagttgttcctttcctccctcctgagggcaggcaactgctgcggttgccagtggaggtggtgcgtccttggtctgtgcctgggggccaccccagcagaggccatggtggtgccagggcccggttagcgagccaatcagcaggacccaggggcgacctgccaaagtcaactggatttgataactgcagcgaagttaagtttcctgattttgatgattgtgttgtggttgtgtaagagaatgaagtatttcggggtagtatggtaatgccttcaacttacaaacggttcaggtaaaccacccatatacatacatatacatgcatgtgatatatacacatacagggatgtgtgtgtgttcacatatatgaggggagagagactaggggagagaaagtaggttggggagagggagagagaaaggaaaacaggagacagagagagagcggggagtagagagagggaaggggtaagagagggagaggaggagagaaagggaggaagaagcagagagtgaatgttaaaggaaacaggcaaaacataaacagaaaatctgggtgaagggtatatgagtattctttgtactattcttgcaattatcttttatttaaattgacatcgggccgggcgcagtggctcacatctgtaatcccagcactttgggaggccgaggcaggcagatcacttgaggtcaggagtttgagaccagcctggcaaacatggtgaaaccccatctctactaaaaatacaaaaattagcctggtgtggtggtgcatgcctttaatctcagctactcgggaggctgaggcaggagaatcgcttgaacccgtggcggggaggaggttgcagtgagctgagatcatgccactgcactccagcctgggcgatagagcgagactcagtttcaaataaataaataaacatcaaaataaaaagttactgtattaaagaatgggggcggggtgggaggggtggggagaggttgcaaaaataaataaataaataaataaaccccaaaatgaaaaagacagtggaggcaccaggcctgcgtggggctggagggctaataaggccaggcctcttatctctggccatagaaccagagaagtgagtggatgtgatgcccagctccagaagtgactccagaacaccctgttccaaagcagaggacacactgattttttttttaataggctgcaggacttactgttggtgggacgccctgctttgcgaagggaaaggaggagtttgccctgagcacaggcccccaccctccactgggctttccccagctcccttgtcttcttatcacggtagtggcccagtccctggcccctgactccagaaggtggccctcctggaaacccaggtcgtgcagtcaacgatgtactcgccgggacagcgatgtctgctgcactccatccctcccctgttcatttgtccttcatgcccgtctggagtagatgctttttgcagaggtggcaccctgtaaagctctcctgtctgactttttttttttttttagactgagttttgctcttgttgcctaggctggagtgcaatggcacaatctcagctcactgcaccctctgcctcccgggttcaagcgattctcctgcctcagcctcccgagtagttgggattacaggcatgcaccaccacgcccagctaatttttgtatttttagtagagacaaggtttcaccgtgatggccaggctggtcttgaactccaggactcaagtgatgctcctgcctaggcctctcaaagtgttgggattacaggcgtgagccactgcacccggcctgcacgcgttctttgaaagcagtcgagggggcgctaggtgtgggcagggacgagctggcgcggcgtcgctgggtgcaccgcgaccacgggcagagccacgcggcgggaggactacaactcccggcacaccccgcgccgccccgcctctactcccagaaggccgcggggggtggaccgcctaagagggcgtgcgctcccgacatgccccgcggcgcgccattaaccgccagatttgaatcgcgggacccgttggcagaggtggcggcggcggcatgggtgccccgacgttgccccctgcctggcagccctttctcaaggaccaccgcatctctacattcaagaactggcccttcttggagggctgcgcctgcaccccggagcgggtgagactgcccggcctcctggggtcccccacgcccgccttgccctgtccctagcgaggccactgtgactgggcctcgggggtacaagccgccctcccctccccgtcctgtccccagcgaggccactgtggctgggccccttgggtccaggccggcctcccctccctgctttgtccccatcgaggcctttgtggctgggcctcggggttccgggctgccacgtccactcacgagctgtgctgtcccttgcagatggccgaggctggcttcatccactgccccactgagaacgagccagacttggcccagtgtttcttctgcttcaaggagctggaaggctgggagccagatgacgaccccatgtaagtcttctctggccagcctcgatgggctttgttttgaactgagttgtcaaaagatttgagttgcaaagacacttagtatgggagggttgctttccaccctcattgcttcttaaacagctgttgtgaacggatacctctctatatgctggtgccttggtgatgcttacaacctaattaaatctcatttgaccaaaatgccttggggtggacgtaagatgcctgatgcctttcatgttcaacagaatacatcagcagaccctgttgttgtgaactcccaggaacgtccaagtgctttttttgagattttttaaaaaacagtttaattgaaatataacctacacagcacaaaaattaccctttgaaagtgtgcacttcacactttcggaggctgaggcgggcggatcacctgaggtcaggagttcaagacctgcctggccaacttggcgaaaccccgtctctactaaaaatacaaaaattagccgggcatggtagcgcacgcccgtaatcccagctactcgggaggctaaggcaggagaatcgcttgaacctgggaggcggaggttgcagtgagccgagattgtgccaatgcactccagcctcggcgacagagcgagactccgtcataaaaataaaaaattgaaaaaaaaaaaagaaagaaagcatatacttcagtgttgttctggatttttttcttcaagatgcctagttaatgacaatgaaattctgtactcggatggtatctgtctttccacactgtaatgccatattcttttctcacctttttttctgtcggattcagttgcttccacagctttaatttttttcccctggagaatcaccccagttgtttttctttttggccagaagagagtagctgttttttttcttagtatgtttgctatggtggttatactgcatccccgtaatcactgggaaaagatcagtggtattcttcttgaaaatgaataagtgttatgatattttcagattagagttacaactggctgtctttttggactttgtgtggccatgttttcattgtaatgcagttctggtaacggtgatagtcagttatacagggagactcccctagcagaaaatgagagtgtgagctagggggtcccttggggaacccggggcaataatgcccttctctgcccttaatccttacagtgggccgggcacggtggcttacgcctgtaataccagcactttgggaggccgaggcgggcggatcacgaggtcaggagatcgagaccatcttggctaatacggtgaaaccccgtctccactaaaaatacaaaaaattagccgggcgtggtggtgggcgcctgtagtcccagctactcgggaggctgaggcaggagaatggcgtgaacccaggaggcggagcttgcagtgagccgagattgcaccactgcactccagcctgggcgacagaatgagactccgtctcaaaaaaaaaaaaaaaagaaaaaaatctttacagtggattacataacaattccagtgaaatgaaattacttcaaacagttccttgagaatgttggagggatttgacatgtaattcctttggacatataccatgtaacacttttccaactaattgctaaggaagtccagataaaatagatacattagccacacagatgtggggggagatgtccacagggagagagaaggtgctaagaggtgccatatgggaatgtggcttgggcaaagcactgatgccatcaacttcagacttgacgtcttactcctgaggcagagcagggtgtgcctgtggagggcgtggggaggtggcccgtggggagtggactgccgctttaatcccttcagctgcctttccgctgttgttttgatttttctagagaggaacataaaaagcattcgtccggttgcgctttcctttctgtcaagaagcagtttgaagaattaacccttggtgaatttttgaaactggacagagaaagagccaagaacaaaattgtatgtattgggaataagaactgctcaaaccctgttcaatgtctttagcactaaactacctagtccctcaaagggactctgtgttttcctcaggaagcattttttttttttttctgagatagagtttcactcttgttgcccaggctggagtgcaatggtgcaatcttggctcactgcaacctctgcctctcgggttcaagtgattctcctgcctcagcctcccaagtaactgggattacagggaagtgccaccacacccagctaatttttgtatttttagtagagatggggtttcaccacattgcccaggctggtcttgaactcctgacctcgtgattcgcccaccttggcctcccaaagtgctgggattacaggcgtgaaccaccacgcctggcttttttttttttgttctgagacacagtttcactctgttacccaggctggagtggggtggcctgatctcggatcactgcaacctccgcctcctgggctcaagtgatttgcctgcttcagcctcccaagtagccgagattacaggcatgtgccaccacacccaggtaatttttgtatttttggtagagacgaggtttcaccatgttggccaggctggtcttgaactcctgacctcaggtgatccacccgcctcagcctcccaaagtgctgagattataggtgtgagccaccacacctggcctcaggaagtatttttatttttaaatttatttatttatttgagatggagtcttgctctgtcgcccaggctagagtgcagcgacgggatctcggctcactgcaagctccgccccccaggttcaagccattctcctgcctcagcctcccgagtagctgggactacaggcgcccgccaccacacccggctaatttttttgtatttttagtagagacgggttttcaccgtgttagccaggagggtctcgatctcctgacctcgtgatctgcctgcctcggcctcccaaagtgctgggattacaggtgtgagccaccacacccggctatttttatttttttgagacagggactcactctgtcacctgggctgcagtgcagtggtacaccatagctcactgcagcctcgaactcctgagctcaagtgatcctcccacctcatcctcccaagtaattgggactacaggcgcaccccaccatgcccaccttatttatttatttatttatttatttatttattttcatagagatgagggttccctgtgttgtccaggctggtcttgaactcctgagctcaagggatccttttgcctgggcctcccaaagtgctgagattacaggcatgagccaccgtgcccagctaggaatcatttttaaagcccctaggatgtctgtgtgattttaaagctcctggagtgtggccggtataagtatataccggtataagtaaatcccacattttgtgtcagtatttactagaaacttagtcatttatctgaagttgaaatgtaactgggctttatttatttatttatttatttatttatttttaatttttttttttgagacgagtctcactttgtcacccaggctggagtgcagtggcacgatctcggctcactgcaacctctgcctcccggggtcaagcgattctcctgccttagcctcccgagtagctgggactacaggcacgcaccaccatgcctggctaatttttgtatttttagtagacggggtttcaccatgctggccaagctggtctcaaactcctgaccttgtgatctgcccgctttagcctcccagagtgctgggattacaggcatgagccaccatgcgtggtctttttaaaattttttgattttttttttttttgagacagagccttgctctgtcgcccaggctggagtgcagtggcacgatctcagctcactacaagctccgcctcccgggttcacgccattcttctgcctcagcctcctgagtagctgggactacaggtgcccaccaccacgcctggctaattttttttggtatttttattagagacaaggtttcatcatgttggccaggctggtctcaaactcctgacctcaagtgatctgcctgcctcggcctcccaaagcgctgagattacaggtgtgatctactgcaccaggcctgggcgtcatatattcttatttgctaagtctggcagccccacacagaataagtactgggggattccatatccttgtagcaaagccctgggtggagagtcaggagatgttgtagttctgtctctgccacttgcagactttgagtttaagccagtcgtgctcatgctttccttgctaaatagaggttagaccccctatcccatggtttctcaggttgcttttcagcttgaaaattgtattcctttgtagagatcagcgtaaaataattctgtccttatatgtggctttattttaatttgagacagagtgtcactcagtcgcccaggctggagtgtggtggtgcgatcttggctcactgcgacctccacctcccaggttcaagcgattctcgtgcctcaggctcccaagtagctgagattataggtgtgtgccaccaggcccagctaacttttgtatttttagtagagacagggttttgccatgttggctaagctggtctcgaactcctggcctcaagtgatctgcccgccttggcatcccaaagtgctgggattacaggtgtgaaccaccacacctggcctcaatatagtggcttttaagtgctaaggactgagattgtgttttgtcaggaagaggccagttgtgggtgaagcatgctgtgagagagcttgtcacctggttgaggttgtgggagctgcagcgtgggaactggaaagtgggctggggatcatctttttccaggtcaggggtcagccagcttttctgcagcgtgccatagaccatctcttagccctcgtgggtcagagtctctgttgcatattgtcttttgttgtttttcacaaccttttagaaacataaaaagcattcttagcccgtgggctggacaaaaaaaggccatgacgggctgtatggatttggcccagcaggcccttgcttgccaagccctgttttagacaaggagcagcttgtgtgcctggaaccatcatgggcacaggggaggagcagagtggatgtggaggtgtgagctggaaaccaggtcccagagcgctgagaaagacagagggtttttgcccttgcaaatagagcaactgaaatctgacaccatccagttccagaaagccctgaagtgctggtggacgctgcggggtgctccgctctagggttacagggatgaagatgcagtctggtagggggagtccactcacctgttggaagatgtgattaagaaaagtagactttcagggccgggcatggtggctcacgcctgtaatcccagcactttgggaggccgaggcgggtggatcacgaggtcaggagatcgagaccatcctggctaacatggtgaaaccccgtctttactaaaaatacaaaaaattagctgggcgtggtggcgggcgcctgtagtcccagctactcgggaggctgaggcaggagaatggcgtgaacctgggaggtggagcttgcagtgagccgagatcgcgccactgcactccagcctgggcgacagagcgagactccgtctcaaaaaaaaaaaaaaaaagtaggctttcatgatgtgtgagctgaaggcgcagtaggcagaagtagaggcctcagtccctgcaggagacctctcggtctctatctcctgatagtcagacccagccacactggaaagaggggagacattacagcctgcaagaaaagtagggagatttaaaaactgcttggcttttattttgaactgttttttttgtttgtttgttttccccaattcagaatacagaatacttttatggatttgtttttattactttaattttgaaacaatataatcttttttttgttgtttttttgagacggggtcttactctgtcacccaggctgagtgcagtggtgtgatcttggctcacctcagcctcgaccccctgggctcaaatgattctcccacctcagcttcccaagtagctgggaccacaggtgcgtgtgttgcgctatacaaatcctgaagacaaggatgctgttgctggtgatgctggggattcccaagatcccagatttgatggcaggatgcccctgtctgctgccttgccagggtgccaggagggcgctgctgtggaagctgaggcccggccatccagggcgatgcattgggcgctgattcttgttcctgctgctgcctcggtgcttagcttttgaaacaatgaaataaattagaaccagtgtgaaaatcgatcaggaaataaatttaatgtggaaataaactgaacaacttagttcttcataagagtttacttggtaaatacttgtgatgaggacaaaacgaagcactagaaggagaggcgagttgtagacctgggtggcaggagtgttttgtttgttttctttggcagggtcttgctctgttgctcaggctggagtacagtggcgcaatcacagctcactatagcctcgacctcctggactcaagcaatcctcctgcctcagcctcccagtagctgggactacaggcgcatgccaccatgcctggctaattttaaatttttttttttctcttttttgagatggaatctcactctgtcgcccaggctggagtgcagtggcgtgatctcggctgacggcaagctccgcctcccaggttcactccattcgcctgcctcagcctcccaagtagctgggactacaggcgctgggattacaaacccaaacccaaagtgctgggattacaggcgtgagccaccgcacccggcctgttttgtctttcaatagcaagagttgtgtttgcttcgcccctacctttagtggaaaaatgtataaaatggagatattgacctccacattggggtggttaaattatagcatgtatgcaaaggagcttcgctaatttaaggcttttttgaaagagaagaaactgaataatccatgtgtgtatatatattttaaaagccatggtcatctttccatatcagtaaagctgaggctccctgggactgcagagttgtccatcacagtccattataagtgcgctgctgggccaggtgcagtggcttgtgcctgaatcccagcactttgggaggccaaggcaggaggattcattgagcccaggagttttgaggcgagcctgggcaatgtggccagacctcatctcttcaaaaaatacacaaaaaattagccaggcatggtggcacgtgcctgtagtctcagctactcaggaggctgaggtgggaggatcactttgagccttgcaggtcaaagctgcagtaagccatgatcttgccactgcattccagcctggatgacagagcgagaccctgtctctaaaaaaaaaaaaaccaaacggtgcactgttttcttttttcttatcaatttattatttttaaattaaattttcttttaataatttataaattataaatttatattaaaaaatgacaaatttttattacttatacatgaggtaaaacttaggatatataaagtacatattgaaaagtaattttttggctggcacagtggctcacacctgtaatcccagcactttgggaggccgtggcgggcagatcacatgagatcatgagttcgagaccaacctgaccaacatggagagaccccatctctactaaaaatacaaaattagccggggtggtggcgcatgcctgtaatcccagctactcgggaggctgaggcaggagaatctcttgaacccgggaggcagaggttgcggtgagccaagatcgtgcctttgcacaccagccaaggcaacaagagcgaaagtccgtctcaaaaaaaaagtaattttttttaagttaacctctgtcagcaaacaaatttaacccaataaaggtctttgttttttaatgtagtagaggagttagggtttataaaaaatatggtagggaagggggtccctggatttgctaatgtgattgtcatttgccccttaggagagagctctgttagcagaatgaaaaaattggaagccagattcagggagggactggaagcaaaagaatttctgttcgaggaagagcctgatgtttgccagggtctgtttaactggacatgaagaggaaggctctggactttcctccaggagtttcaggagaaaggtagggcagtggttaagagcagagctctgcctagactagctggggtgcctagactagctggggtgcccagactagctggggtgcctagactagctgggtactttgagtggctccttcagcctggacctcggtttcctcacctgtatagtagagatatgggagcacccagcgcaggatcactgtgaacataaatcagttaatggaggaagcaggtagagtggtgctgggtgcataccaagcactccgtcagtgtttcctgttattcgatgattaggaggcagcttaaactagagggagttgagctgaatcaggatgtttgtcccaggtagctgggaatctgcctagcccagtgcccagtttatttaggtgctctctcagtgttccctgattgttttttcctttgtcatcttatctacaggatgtgactgggaagctctggtttcagtgtcatgtgtctattctttatttccaggcaaaggaaaccaacaataagaagaaagaatttgaggaaactgcggagaaagtgcgccgtgccatcgagcagctggctgccatggattgaggcctctggccggagctgcctggtcccagagtggctgcaccacttccagggtttattccctggtgccaccagccttcctgtgggccccttagcaatgtcttaggaaaggagatcaacattttcaaattagatgtttcaactgtgctcttgttttgtcttgaaagtggcaccagaggtgcttctgcctgtgcagcgggtgctgctggtaacagtggctgcttctctctctctctctcttttttgggggctcatttttgctgttttgattcccgggcttaccaggtgagaagtgagggaggaagaaggcagtgtcccttttgctagagctgacagctttgttcgcgtgggcagagccttccacagtgaatgtgtctggacctcatgttgttgaggctgtcacagtcctgagtgtggacttggcaggtgcctgttgaatctgagctgcaggttccttatctgtcacacctgtgcctcctcagaggacagtttttttgttgttgtgtttttttgtttttttttttttggtagatgcatgacttgtgtgtgatgagagaatggagacagagtccctggctcctctactgtttaacaacatggctttcttattttgtttgaattgttaattcacagaatagcacaaactacaattaaaactaagcacaaagccattctaagtcattggggaaacggggtgaacttcaggtggatgaggagacagaatagagtgataggaagcgtctggcagatactccttttgccactgctgtgtgattagacaggcccagtgagccgcggggcacatgctggccgctcctccctcagaaaaaggcagtggcctaaatcctttttaaatgacttggctcgatgctgtgggggactggctgggctgctgcaggccgtgtgtctgtcagcccaaccttcacatctgtcacgttctccacacgggggagagacgcagtccgcccaggtccccgctttctttggaggcagcagctcccgcagggctgaagtctggcgtaagatgatggatttgattcgccctcctccctgtcatagagctgcagggtggattgttacagcttcgctggaaacctctggaggtcatctcggctgttcctgagaaataaaaagcctgtcatttcaaacactgctgtggaccctactgggtttttaaaatattgtcagtttttcatcgtcgtccctagcctgccaacagccatctgcccagacagccgcagtgaggatgagcgtcctggcagagacgcagttgtctctgggcgcttgccagagccacgaaccccagacctgtttgtatcatccgggctccttccgggcagaaacaactgaaaatgcacttcagacccacttatttctgccacatctgagtcggcctgagatagacttttccctctaaactgggagaatatcacagtggtttttgttagcagaaaatgcactccagcctctgtactcatctaagctgcttatttttgatatttgtgtcagtctgtaaatggatacttcactttaataactgttgcttagtaattggctttgtagagaagctggaaaaaaatggttttgtcttcaactcctttgcatgccaggcggtgatgtggatctcggcttctgtgagcctgtgctgtgggcagggctgagctggagccgcccctctcagcccgcctgccacggcctttccttaaaggccatccttaaaaccagaccctcatggctaccagcacctgaaagcttcctcgacatctgttaataaagccgtaggcccttgtctaagtgcaaccgcctagactttctttcagatacatgtccacatgtccatttttcaggttctctaagttggagtggagtctgggaagggttgtgaatgaggcttctgggctatgggtgaggttccaatggcaggttagagcccctcgggccaactgccatcctggaaagtagagacagcagtgcccgctgcccagaagagaccagcaagccaaactggagcccccattgcaggctgtcgccatgtggaaagagtaactcacaattgccaataaagtctcatgtggttttatctactttttttttctttttctttttttttgagacaaggccttgccctcccaggctggagtgcagtggaatgaccacagctcaccgcaacctcaaattcttgcgttcaagtgaacctcccactttagcctcccaagtagctgggactacaggcgcacgccatcacacccggctaattgaaaaatttttttttttgtttagatggaatctcactttgttgcccaggctggtctcaaactcctgggctcaagtgatcatcctgcttcagcgtccgacttgttggtattataggcgtgagccactgggcctgacctagctaccattttttaatgcagaaatgaagacttgtagaaatgaaataacttgtccaggatagtcgaataagtaacttttagagctgggatttgaacccaggcaatctggctccagagctgggccctcactgctgaaggacactgtcagcttgggagggtggctatggtcggctgtctgattctagggagtgagggctgtctttaaagcaccccattccattttcagacagctttgtcagaaaggctgtcatatggagctgacacctgcctccccaaggctttcatagatcctctctgtacattgtaaccttttattttgaaatgaaaattcacaggaagttgtaaggctagtacaggggatcccgcataccgttctcctccttttccccgttgtgaggacagtgcactgtattcactttcaacatccaaggtctgtgttgagagggtgagttgtgcggcccagcttgccccaagcccgtcttgccatcacgaaggatttcctgactcagctgaatctagctcaacaaagcaaaggactaactaagctgcagattttctctccgctgggcttagcctacattatttacacctgttttcagctggatgggaccaaactggggccttgacttctggggtttccacgtgatccccaaagaggagacatccattcattcactcaggtatttgcttgtgcacctactgtgcgccaggtgccagatccaggaattgaagcccaggaacaactcttgcagtgagctccccgggtttttgttttctgaacggtgggaagacaggtcagcaaatagccatgcacgtctgcacatgtgtggctggtgtctgcaggagtaccgagaagacggtgagctctgccctggatggcaacaggaaagggcatccctgtgcagctgtttgtcctggcacaggtggcaggctgccagcgggaccaggaagggaaggggaggatgcacaggtcggagggaacggaacgggcactgcaggtgcgctctgcgatgtgaggaaggaagcaaaggctggttccgggatgatgtcggagaagccttgcagcctagggcactgcccattccacgttacccagtgagtcaaagcctcccagaaagacatttagtcactcaaagccagtgcaggtctcagctttgtccggggaggaactttcactctagaaaacacgaactcatttccctttgaggaagttgtttctccaggatatcatttccagccaccatccaggatgctgggcaggtgctgcagtgcccaaggcacggctgccgaagaagcttgtcccttagaaaccccttgtggcctcggaggcgcctgcctgcctccctgagaatggaaccctgttgggccgccaggctcgctgggcaggtgctggggaaggctgggtcaccgtgctgagcccctcacaggcctgggagttgtgcttggggaggagagctcccagctctttggctgcctcccaatcatggccacatctcacaaacaataccactgtccacgaaaaatgaaaaggtgcctggttctaacccatggccccaaccatgaaagagcccttagaatgtgggggtttgactcgaacagtggctttgagtctcccaggggggattagtgtcctaatgccctgagttaatgaattgacttgttggacagggaaactcagtgaggttcattttctgtggggggacgtttgtcaaatgctgtgaaatcagttgtagcatacgcgacgctcagctgctccgacagtgactcagccacggctccagctgcttccccagccctgtagtggaggtggcagatggtgtcatcagcctggcgcagagggctgtgcccactggcatcacaagggccaggcctgctggtcctccagccactggatccaggtagttacatatgggtttaaaagaagagaggcagggccagttgcggtggctcatgcctgtaatcccagcactttgggaagccgaggtgggtgatcatttgaggttaggagttcaagatcagcctgaccaacatggcgaaacccagcctccactaaaaatacaaaaaaattagctgggcatagtgctgggtgcctgtagtcccagctactcaggaggctgaggcaggagaattgcttgaacccggaaggcagaggttgcaatgagtcaggatcatgccactgcactccagcctgggcaacagaacgagactctaaaaaaaaaagatcaataaataaaataaaaataagagaggcagggtgggaatattacttgaggccaggagtttgagaccagcctgggtaacaaagcaagaccctgtctctaccaaaataataatttaaaaaattacccgggaatggtgtgacatgcctgtggtcccagctactctggaggctgaggtgggaggaacactcgcacataggaagttgaggctgcagtgagccgtgatcacaccactgcaccactctagcctgggtgacagagcaagacctcatctctggggaaaaaaaaaaaaagaagaggcttggaagccacattgttttttgtcacttataactagagtttcgtccatcaaaagcccattctgcactgatttcagtgataggggtctgatgctggcttggaagagggcctgacagcttagagacaggcttggagttccaagttgatgaaagaacgatgaataatgaaaaataatgtgttgttctaaagtagtgccttttcatactgagctagggtataatttgggtccatttcaagggaaatatactagcagaattcatcaaagtagcccctcgaagactggtgcctgctgcctacgggacaatttaatcagtggttccagctgcacatctagagttgggaacactgaacccaggctttctcatgcagatggggtgtggattgctaaggtggctgtctcctagcgctgcagcatgagtgaaacacgtgtccattctacagagacgcggctccgtgatgctgaaacctccttctttttttttttttttgagacggagtcttgctctgtcgcccaggctggagtgcagtggcgatatcttggctcactgcaacctccgcctcctgggttcatgcaattctcctccctcagcctcctgagtagctgggactacaggcgcgtgccaccatgcctggctaatttttgtatttttagtagagacagggtttcaccgtgttagccaggatggtctcgatctcctgacctcgtgatctgcctgcctcggcctcccaaagtgccgggattacaggcgtgagccactgcaccccgctgaaacctccttctagataacagcggcgttaagcatttttttttttttttgagatagagtgttgctctgttgcccaggctggagtgcagtgatgcgatctcggctcactgcaacctccacctcccaggttcaagcaattcttctgcctcagcctcccgagtagctgggactacaggcacacgccaccaggcccagctaatttttgtatttttagtagagacggggtttcagtatattggccaggctggtctcgaactcctgacctcatgatccacccgtctcagcctcccaaagtgctgggattacaggcgtgagccactgcacctggccaaaacctcctcctagataacagtggcgttaagcattttttttttttttgagatggagtcttgctctgttgcccaggctggagtgcagtggtgtgatctcagttcactgcaacctctgcctcccgggttcaagtgattcttctgcctcaggctcctgagtagctgggataacaggcatgagccaccactcccagctaatttttgtatttttagtagagacagggttttgccatgttggccaggctggtctggaactcctgacctcaagtgatcctcccacctcggcctcccaaagtgctgagattacaggcgtgagccactgcacctggcctttttttgttttttaagacagggtctcactctgttgatcacagccacagctcactgcagcctcaacctcctgcctgggttcaagcaatcctcccaccttggcctcccaggtagctgagaccacaggcacaagccaccatatctggccctacgtaagctttatgtgggtgcaataacagatctcaaaccagctctcagctcaagagaaggggaagctgggcacagtggctcacgcctataatcccagcactttgggaagccgaggcaggaggatcacttgaacccaggagttcgagaccagcctgggcaacatagggagacccctgccctccctgtctctgaaaaaaaaaaaaaaaaaaaaagaaaggagaggctgggcttggtggctcacacctgtaatcccagcactttgggaagcccaggcaggaggatcacttgaaccctggagtttgagtccagcctgggcaacatagggagaccttgtctctaaaaaaataaatagagtgagagagagaaggggaagtcaccgggaggacacacatggagcacgcagcccaaatggggctcctctgttctccctgcagagtcagttcgtacctttcacatgcacaaaggtgttgatccaaccgaagcaatattgattcttgttatattgctttattgtggggtcagtgtcagagtaccacgagttttcatcacgcaccgttctttccccagctgcagtgtgtttagggggggaacgaggccccaccccctatccctatcgcctctgcctttataacggctgctactctctgagcacctgttgagttctttcaccttccagatctaatgtgctatccccacccctagagaacagggctgctggatgccacatggctcccagagaggggctgtggtcagggaagccccagctccaagggggctggaaaaccccagagctgcccacgtgcggcaacacagtctggtgctgcaggtgtgaggacggctacaaaatacctgagccattctgtcactctgtctgaactctgtttgaaatattgtttcaataactgctaggctggtttttccttcctgactatattcctcaaaccaacaagagcctagcagaggaaagcatggccaaaacgccccaagaagagagccttggcttcacctccaagggccaccatccgggaggatgtcctcagacctctgatcccctctctgcaggctctgcccagccctgtgtggcaacccagaggaagcctccccttcgtttgagatttaaccccagaccttaggcgatggctgcccagcctgtcccttccgcctgtgtggctgcccacgcgggcgttgctcatggggctagtcctgggtggatgggtgggggcctctcgccggctcctctgcctcccacccccactggcaccccacgcctgtcctagaaggttctttctgcctgttttctccgtgagtgactggacaggcagaggccggccttgctggagggggcatttgtaattatgagtgaatccaaaacaaggttttttccttccgcagccccccgcccggctgtggggcccagccactgcacttcaccggatgccgtctggttggtcctcaggactgatacagaccaggaccccagggccagcccgtgccaggctcctatgcttccaggagcacgggtgggtggtcctgctgcctggccggccatcctcctggggtcggtctctggccgatcctccctcctcctctcaagccctgcacagcccggccaggcaggtgcatcttgtttggctgctgaggagccgggggttcagggaaattaaggaacgtgcccagggacccggggccagcccgtggggacgctgggattggagcccaagccccaggttcgccgcgcggctctcgacttcctctcctttcccccaggggcgagctcagcgaccgcagagaggtggggtcgatctccctgcgaccccagggggcccgcgaggccagtgcgcgggcaggagcggggacgtgctcagaagagccgggcgccgccgcgcccgcccgccccccgtcccccggctcccggctccgcgcgccccccgccgcccccggggccctgctacccccgacccgtcccctcccgccggccgcccccatggcccggctgggcgcgctgctcctggccgccgccctgggtgcactgctcagcttcgcgctcctggccgccgcggtcgccagcgactactggtacatcctggaggtggcggacgccggcaatggcagcgcctggcccgggcgcgcagagctgctctcctcgcactcggggctctggcgcatctgcgaaggtaaccggccaccgcgccggccctcctccctccgcgacctcgtccctccgacacccccttaaccccgccctgctcgtgttgccccgccagacccccttccaggacccctctcttgcatcccgctctgccccagggtgtctctccgctccctccccatcaccctccgtcttcccccaaaactgacagcccaagggctacaggagggagggagcccagttcggggcccctcacagccggaggagggggctgtggggcgacagtgggggagggaagcctagaggtgtgtagttggggggcctcatccaagtcaccaggggttgtttcttgatcacgctccccggggtttgggcctggcagccccttgtccccgtccctgtcaggcactgtcagagctgttcaccccacacctcctgatgccgcgggggcaggggttccaaatgtgtacagaggcttcagagtccggggagagagaaggggatcccagcaggctggagggtccacagggccccctccgttccccccagctccctcctccggagctggggccagcctggggagcttccccttcacagcgcgagggctggcagggcaggggtgtgtgtgtgagtgagcatgtgtgtgcatctgaatatgtgtgcatgtgctgaacatgaacatgtgtgagcacctggctgtgtatgtaaatatgaatatgtgagtgtgagtgtatgtagttgtgtgtgcatgtgaatatgagtgtgtgagcatgtcagtgtgcatgtgtgtgcatgtgagagtgtgtgggcatgtatatgagtgagtgcatgtgtgggtggtgcacatgtgctggtggcttcctcagtgcaactggggaggagttaggagccttgtgttcatccaacagactgcctaactgtgctccaaagacctcctgacatgcacctgtgtgcacgtgtgcacacgcctgtgcctatgcaggtggctctgcacgcgtgtgagaaccagagagtatgtatgcccacatgacacgagtcaggaagattccagagcgaggcttcccaggagcccgttttgtacaccctttttcctttcaggcaaagcctgagttccacacacaaacgcattacaaggacccctgcctgagggactctgagggggcctccatggagcgtttgaaagtttaaacatgcacctgtgcaggcataacttgcacgtgaaaataaacaaggtgaaggctgggcccggtggcccacgcctgtaatcccagcactttgggaggccgaggcgggtggatcacgaggtcaggagatcgagaccacagtgaaaccccgtctctactaaaaatacaaaaaattagccgggcacggtggcgggtgcctgtagtcccagctacttgggaggctgaggcaggagaatggcgcgaaaccgggaggcggagcttgcagtgaaccgagatcgcgccactgcactccagcctggggtgacagagcgagactccatctcaaaaaaaaaaaaaagaaaaagaaaataaacaaggctaaaggtcttgggccttttcatcccacttggagtcccagccctgagtttcagcagaagagaagctggcagggccctgtggtgccagggggtcccctgggctcgggtaggctgctgggtgcaccacagcgtccaggccccaggcttcgaggcctatgtttcccagggcagaacggctgcatcccgctggtcgacccttttgccagtgagagcctggacgtctccacctcggtgcagcacctcatctgtgagtcctgggtggggccacctccccatcctttccaaatattcaggcaaggcagatcccagccatccccatccccatcccgcagcactgcttccactgcccctgcgtttccaagaggacgtttccacgcagacctgtcccagtgctgtgctgctgtccctaaccacaggtgcccagctcccagcctatcctgttttcccctgtctcagtttccctctcagtggtgatggctcatccctttgttattggggaagccaggcagctcccagcttggctggatcctgcgggccttgcagactcctggctccccatttaggactcgattcttccagatggcctgctgtctacctggctggcaccttccacctggcgggttgggggacatgtgaggcctggggatgggggctgggagtgttctggggacgcctcccctcctggccttaggaagcccctgccagagtcagagggggccactgggagggtccagtggtgtccacagagatgggcgtcagccgcttttcctgagaagacgaagcaccacgtcactgtcctccggcagacaagtgctgaagggcccacctggaccagaattctcacctgagccccctttcctgcagtgctgcaccgtgcagtcattgtggtcctgcccctgagcctggtccttctcgtgtgtggctggatctgcggcctgctcagctccctggcccagagcgtgtctctgctgcttttcaccggctgctacttcctgctggggagtgagtctggggccctgggggaatggctccaaagatgggagctgggccacaggtcccgggagtggggtgctgcctctcctgttgccctcgtcccctgctcccttctgggcgggtgctgagtctggcgatggagccgtggcaggcagctccctgtggttccagaaggtacccatgtatatttgttctcacgttgctataaagaaatgcctgagactgcgtaatttataaagaaaagaggtttaggccgggagcagtggctcatgcctgtgatcccagcactttgggaggctgaggtgggtggatcatctgaggtcaggagttcaagaccagcctgaccaacatggtaaaaccccatctttactaaaaacacaaaaattagctgggcttataaagaaaagaggtttaattggctcatggttctgcatgctgtagaggaagcatgatgcttggcttctggggaggcctcaggaaaatgacaatcacaggcggaaggccaaggcagggagccagcatttcacatggctgggacaggaggaagagagtagggaggtgttacacacttttttttttttttgagatggagtttcgctcttgttgcccaggctggagtgcaatcgcatgatctcgactcactgcaacctccgcatcctgggttcgagcaattctcctgcctcagcctcctgagtagctgggattacaggcatgcgccaccacacccagctaattttgtatttttggtagagacggggtctctccatgctggtgaggctggtcttgaactcctgacctcaggtaatccacctgcctcagcctccctaagtgctgggattataggtgtgaggcaccgttcccagctgggtgctacatagtttttttttttttttttttgagacggagtctcgctctgtctcctaggctggagtgcagtggcgcaatcttcgctcactgcaagctctgcctcccaggttcatgccattctcttgcctcagcctcctgagcagctgggactacaggcacctgccaccacgcccggctaatttttttgtatttttagtagagatggggtttcaccatgttagccaggatggtctcaatcttctgaccttgtgatcctcctgcctcggcctcccaaagtgctgtgattacaggcatgagccaccatgcccagccctgggtgctacatacttttaaacaaccagatctcagaactcactcactatccagagaacagcaccaagggaaatggtgctaacccattcatgggaagccactgccatgatccagtcatctcccaccaggcgccccctccaacactggggattatcattccacatgcgattcgggccgggacaccaaaccctagcaccgtgataggagcagggcttctggttgtgggtcagagcctgggacagggaggagcaccggggtccaagcttcttggtgcggggggcatgagggcctccagggcaaccccaggacctgctctactgggtcagatcatgcgggggggcctggggccagcccctcaccacacccttctccttcctgtactgtcctggtgggaggagcaagggttccggggtttggcacagatgaggcagggccaggcatgaaggcaggtgagacagggcaccagaggcctcagctctgaccccagcacaggctgagactgtaaccggtaaccacccatccactgacgcggctccagctctgactacatgccgagtgctggccaagtgctcctccgaaggctcctccgagggccccccagtcccagctgcaggtgagaaatctgaggcctggagagggccgagggcctgggctccccttcacccccactggtgctgtctcctcagtttccaccgactgcccagcactggctgttgcggaaggtggactaggggctcctgacagtctgtcctcagccgcccctgtcaatcaaggctaggcccgagccaggccctgatgtctcaggccagctccactgtcaaggctgtggccacaaggagcagaccatccagggctgggggcaccctccctgtttctctgggaggcctctgtcactgaggaggcccgactgggtgcagagattggggaaaccagcagccttggtattggtcacaggccacatgagaacaacagtgaagtcaaggtctcctctagacaatgaaatcaggaagaatccaaatgacctgaccctgcggcccatctgtgagtgttcaaaatccaattaagaggaccttcgggagccagcgactagagtgtaattgggttgggattgtaaccagaagaacttacagggacacggaccctctgcattgtgcctgggagcgaaggcaccggctagggggtggaggggccggaggtagctggtggatgggtgggggttccactgcgactccagcctccccaggcagagggggcctccatcctagtatgagggtcagctgtgggccgaagcacagagggctctcaggatgtcacaccaaaggcacctgcccagggtcagctcggccctcacccctcactagcactgcaaggagggggagggagatagagggccccagatcgattgggtgcccttccctgagacaggatcttggggggcctgggggaccgacagggcccacggtgacagagtcctttagagtttcccagcttgaggttgcaggtgccagccgcagaggcctcctttaggaggtctgccaggagctgagcctgggccccatcaccagggatttgggaggtacttcaggtcccagtttgggagcttactcttcaccttcattttgggagaaaggccgtgtcctcggccaggctacaggaggcagctggtgtttggagagggctcagctggtggggcggcctgccaggaagtggggccttgggctgcagctgcagccagtgctacaggcagagacaggcagagacaggcacctcctgccgcacggtcagcccccgctgctgggggctgacccccacccctgcttctcccagggaccgcttcattcaatttggcttcacattcttccccaaaataaatccataatttctgttgctacgctgcccagccgggcaggcatccgtgtgtcctccctccctcagcctccccatgccttcttctccccactctctgtcccactcttcttcccaagtttggttcccaggaggaatcacagaagaccaggctgtgttgtgccccttcactgggcaccagtgagatccagacctggccctgaatgtcagcttgggtcagttgccttcttttggctgggcagtgcccagaggggaccctgtgcacccaggaagtgcctgtggggaaatcagggccacctgcccccctggctaacattccctacagtcggcgccaaggacaggctttctcatcagcctgaagctgtgggaagggggtggcactccgggctggttcctccaagctcagtggacaggaaaatgccctggaggcatgggccgagtcccctacctagctcgttgctggaccctgaactgccggatgaagcctggtgcccgccaccctgtgcaaagcccagcttcattcctttgacaacagctttgaccatgtggagagcgggagggaggagagaggagggcccagggcaggcatcctcccctggggaagggcctgaaactcagagctgggaggacaggggggctctggaaggggagtcagagggagggggatgttagccccggaggtagggagggcaaaggtgtgaggaagaggaggcgggggtgcagggcagggactcactctgatcagagcactgggcaacgctgctgccagcagaggccatggctctgtgtgtgtgtgtgtgtgtgtgtgtgtgtgtgtgtgaatgtgtgcaaatgtgttcgtgtaggtgtgcatgtgcatgtgtgtgctgggggccatggagggtacagagtgtgtggggggcagttatgtgagtgggaaccatgttgaggggcaggtggcactgtttgcaggaggctttatgggatgaggtctctgaggtttgaggactgaattggagcctcttaaagctccactccgccaaatgcagttgactacctttagccctgtccaaccccaagcaggaggtggtgtctgggagaggcggccaggttgacagccaggcagggctaaccatgacaggaagggcggtgtgctgcctgcagctctgcctgaatgctagcggggccggggatgctgaggccatgtctgcaggaccacctgggcctgggcccgctagagcagacaccgagcagctgccctccccatctctcccccaggtgtcctgacactggcgggggtcagcatctacatcagctactcgcacctggcctttgcggagacggtgcagcagtatggcccgcagcacatgcagggcgtccgcgtcagcttcggctggtccatggccctggcctggggctcctgtgccttggaggcattcagcggaaccctcctgctctcagctgcctggaccctcagcctgagccccccaatctgtggtcatctgagtccccagcaggtgggagggaggtaagagggggctgggtttccctttgcacctcccgggattgggcggtcagggccagggccccttgagagtctgggaatcccttctctgggcctcgctggggtcctggccaggaaggggctgggggtgacaaggggtggagggcagagccaagaatccagctcctcatgtttctctgtagatatttggggaggctcccctgccccggcaggcttgttagggactaattggttcaaccgcctcttagagatgagaagagccagtccagaaagaggaagtaagtggcccaggtgacacaggctgagtggcagagttgggtgggggcacctctcaagggtgtggcctgaactcgcccctcccccagcaggctagtgagtcactgctgcccccattcctaaggacctgggagaaaagtaggtgcctgttaaatgccgcaggactgggctccatgctcctctccagccccgcaatggccctactcaatgactaccctttatccattttacagagggggagactgaggcccagagcggcagagggacccacccagatcgcctggcgccagagagatgccgtctcaggccaaggcctccctggcctctgttctgtccactctccccgaagggcaggcttggtggagaagaggctgatgagagggcccgagagcccctccgatttgcaggggtggggggcaaggagctgagcgatccagatgtacccctctgccccctcccttgttctcaagcctgctaggtacttttcactgagcacttccgggaagagcaggcacccagatctctgtccttgtcctggcacaggctgctgctgcttccggcccccgacccttcctctctgcagcaacccgggggaggtatgccactgtgagtgccctggtgggcacactgagctggcagagatggaagtcccagaagggtggggtgggggtgtcatgccatggtggaggagtttggggccactccttgcctgcctcaaagggggcctggctgagggtgcttcttgaccacaggggccagggctgcctagggtggcgcagggctgggcctggagtttgggatgcaggcttgttaaacacagggcagaaccccaggttgggaggggctcagtttgcaggcccaggcccgcaggcccactgctggtcccagggtgagacaggtgagaagagggatggccagcacacacttgagtccccttgggccacaaaggctggggcacgcccaccgttatgcagatggacagttgaggtggctgcaggagaagggttcccagggcctgtacaacacgtggaagcactaaacggccccgtttggggtttgggggcccttcccgagtcttgagaggtcttgagaggtgtgctggggaaggtggcagcctcttgtagcttgatcttcctccaccctgccccacccctaggtctctttattgattcaaaggttaaggaagctcctgggggcttgagggggtggcacagttttggtggggcccagtgaggacaaatctggggggtgagcagggcctcctcttcctcctggtgtttgaacgtttaccattccatgtgggaccattgtgccaatttgtccttaagtaaatcacttgtgctgtgtgcagtataagccttttatttttcttagaacttttcaaaataggtaacacatgcctgtctgtcataaacagtacaaacgtgagcaaacactgtcaccagctgtgcgcgtgtctgtctgtccatccagaggtgttctgagagcgtgtgtgcacgtgtgtgtgtgtccactgtgaagtcatctgtagacatacaagcctacttcttattcccagatcagcacagggagtggggaggggggcctgggtctccgttttggaaacgggggctggcttcgtgggcatgtcctctcagcttgggaggaaaggtgtggcggactcttcctctcctcctcctggcccccaacttctgctgatgaggcttctcctgggggtttgctgggaagccagggatgtgagcctaacttcaggcctctcacggcagatgtgcttgggctctggggataggacactggggaagacacaccggggaggggctgctgggaccaccagcgttcccggagagtgtgtgtggtggggagggtgtgctgcttgacccttcccttccagaacagagctgcccaccttgcctccacgtgttctggggcgtgtggaacttagccaggccaggtaacttcttcactctctcattggccagccacatccctcaccctctggttggttagtggactccctcacgctctgattggctagtcaactccttcactctgactggccagccacatccctcaccctctgattggctagttgactccactctggccagttgatgccccacactctctgattggccagtcagtgttccttaccctctgaatggccagttaactccctcactctctggctagtctccacagtgattggcccaagggttctgtctgtgttcatggttctctgagtgtcaggctttgcagctgtgattaagaggcggatgagtgcctcccagggaagagacagtgcatggttcaaggtcacccagaatagacaacatgacatcaggctcaaatggtgctgcgtcgtttacagcaagaggagagagcctgtgcaccaaaaccgcttgcaatggtggttcccacggtgggatccactggcccacgtgggcctctttcttcaattttttcttagaatttttcaaaataggtaacacgtgcccttgtgccacaaatagcacaaaggcgagtaaacactgtcaccagctgtgcgcacgtctgtccatccagaggtgttctgtgtgtgtgtgagcaagcgtgtgcacgtgccagaaacaagccctgactcagaggcccttcccccagcatcgaaggcgcttgctcctctcgccacagcaaagccccttctccagggatggcccagctccgccaggtcctgggcccactggcatcccactcgggcatgtttatctgcaccacctggtaggtgcccctgccaggggcctgacctctgtgaggacaggggcctctcatcagctcaggccctatgcccaaccagcatttataaatgcagtaggcagcccgcaagagagcccccatctgtcctcatctcctggtgctcacgcctctgtaggccttaccacactgagtcagcgctgacttgggtgtcaagtaggaagtaccagcgtgtgagggggtcataaaaaggcagcttctgcctcggtctcagactgctcaccctaggggaagcaagtcatcagactgtgaagacactcaggaagccctgaggagatgctcacatggacaggactgaggcctccgccaacagcagcagcagcgtgtcagctgtgtgaggacaccacctgcgagaggattattcagataatgcagttctcactgatgtcttgacggcaacctcgtgagaaactccaaaccagaactttccagctgtaagccactcccaaattccgcctctcccccgctttttttttgagacagggtctcactctgtcacctaggctggagagcagtggctccatctcggctcactgaggcatggcccttctgggctcaagtgatcctcccacctcagcctctcgagtagctgggaccacaggtgtgagtcaccaggcctggttactttttttgtttgtttggttttggttttttttgagacagagtttttgctctgtcgcccagtctggagtgcagtggtgcgatcttggctcactgcaacctctgcctcccgagttcaagcgattctcctgcctcagcctcccaagtagctgggattacagatgcgtgctaccgtgcctggctgatttttgtatttttagtagagatggggttttaccatgttggccaggctgatctccaacttctgacctcaggcgataccccatgcctcggcctcctaaagtgctgggattacagacgtgagccaccacatccagccacctggctactttttgtgtttgtagagacggagttgcaccatgttggccaggctggtctcaaacttctgggctcaagcagtccacctgccccggcgttccaaagtgctgggattgactacaggtgtgcgtgagccaccacacccggctcactctccaattcctaacccacagtgctatgggaaataatgattgttgctttaaggcagtatgttttggggtcatttgttatgcagcaatggataaccaatataatgcacttttgctggtgcttgccccagacagggcagtaagggagacacggaattacaggggcttagagttactggcttccttctttttttttttttttttgagacggagtcttgctcttgtcacccaggctggagtgcaatggcgtgatatcggctcaccgcaacctccgcttcccgggttcaagcgattctcctgcctcagcctcctgagtagctgggattacaggcacctgccaccatgccctgctgatttttgtgcttttagtacagatgggggtttctccatgttggccaggctggtcttgaactcctgacctcaggtgatccacctgcctcggcctcccaaaatgctgggattacaggcatgcgagttgctggctttcttttgattctctgagttaccaccttctccagcacaggacagcagttctggggccctgggaactcctgtatacggatcttccacagtatggatctggattcttctaagagatggagggacagagggaaactcccctttgcctgccacgtggactcttctccccttacactcactgcagtccaagatttccaccgtcccctccctccctcccttccttccttttctttctttcatttctttcttgagacggagtttcactcttctctggtgcccaggctggagtgcaatggtgtgatctcaggtcactgcaacctctgcctcccaggttcaagtgattctcctgcctcagcctcccgagtagctgggattacaggtatgtgccaccacgcccggctaattttgtatttttagtagagatggggtttctccatgttggtcaggctggtcttgaattcctgatctcaggtgatccacccacctcagcctccctaagtgctgggattataggcatgacccaccacacccagcccatgctgtggtttctcatagctcttcctctagtccaggccccctcctgagctctgtgcttacattcctggcagcttcttaaccacctcttcttggggtctcaaagttaacaatcttaagctaaagtctctactttaccattctaaacaatcctccttctgggattcctattaagggctttctaaagcactgatctgactgtatacctcccctctttaatacacacacacacacacacacacacacacacacacacacacacacgcagagatttatatacatatatacatatccagaatgaaatagacaaaaatattaatagttattcttagatgataaaaatacaggtaatttttattttcttcttcttcttctttttttttttttttttttgagatggagtctcactctcttgcccaggctgaagtgcagtggcgggatctcggctcactgcaacctctgcctcctgggttcaagcacttcttctgcttcagccccctgagtagctgggattacaggcacgcaccaccaggcctggatacttttttgtatttttagtagagatggggtttgctatattggccaggctggtctcaaactcctgacctcaggtgatccacctgcctaagcctgccaaagtgctgggattacaggcatgagccaccatgcccagcctctttattctttttaatattatcacaagttatttatttatttatttatttatttatttattttttgagatggagttttgcccttgttgcccaggctggagtgcaatggcacgatctcagctcactgcaacctccacctcccgggttcaagtgattctcctgcctcagcctcctgagtagctgggattacaggcacatgccatcatgcctggctaattttgcatttttagtagagacagagtttctccatgttggtcaggctggtcttgaactcctgacctcaggtgatctgccctcctcggcctcccaaagtgctgggattataggcatgagccaccgtgcccagccattatcacaagttatttatacttcctttctcttgttcttgatcagtctcattagaggtttatcaattttattactcttttcaaagaactatcttttgtttatctggatattttctcttgatttatctccctcttcactaattctctctccagctgtgtctcatctactattcaacctatctactgagttcttaagttatcatatttttcagttctagaatttccatgtggccttcttatagttccaagattcctgccaaattttttttatcttgacttataattccttgaatattttattttttatttttttgagatgggggtctctctgtgtcacccaggctggaatgcagtggcacaatcttagctcactgcaacctccacctcctgggaggctcaagcaatcctcccacctcagtcccccatgtagctgggtctacaggtgccacatctggctaatttttgtacttttaagtagaaacagggttttaccatgttgcccaggctggtttcaaactcctgggttcaagcaatctgcctgcctcggactcccaaaatgctgggattacaagcatgagccaccacacccagcctagaatatttaatttaattaattaatttatttatttattttgagacggagtctcaccgtcacccaggctggagtgcagtggcgcaatcttggctaactgcaacctctgcctcccgggttcaagcgattctcctgcctcagcctccagagtagctgggattacaggtgtgtgccaccatgcccagctaatttttgtatttttagtagagatggagtttcaccatgtttgctaggctggtctcgaactcctgatctcaagtgatccacccacctcggcctcccaaagtgctgggattgtaggcatgagccaccacactcaagctatttatttttttagagatgggtctcgctctgtcacccaggttggagtgcagtggcatgatcacggttcactgcagccttgaactcctgggctcaagtgatcctcccacctcagcctcctgggtagctgggactacaggcacaagccactttgttatctgggtcacctaagggtctgtttctttttttttttttttggagacagagtcttgctgtgtcacacaggctggagtacaacagtgtgatcttggctcactgcaacctccacctcctgggttcaaatgattcgcttgcctcagcctcccgaatagctgggattacaggcccacaccactatgaccagctaaatttttttttggatttttagtagagatggggtttcaccatgttggccaggctggtctcaaactcctgacctcaagtgatctgcccgcctctgcctcccaaagtgctgggattagaggcatgagccactgcgcctggcctcttttgtccatttttttctcattttcaatcacatcttgtcccattctatacctggttatttctgattgagtgggggcatcccacatgaataactgtagaggaaattggaggctctgggagacgtcaccttcctccagagaagacggatctttacttctggcaggcagctaggccagaggcacccaccaccccagattgccgtaatcagggatcacagtgcttcacagctggcttcacttctcacgatggtcagtctacttccaattgcccttactcctagtgggtggcccctcagggactcaacccaaagcttgagggtttttttgtttgtttgtttgttttttgagacagagtcttgcttgagggactcttaccagggtctttcagcaggccttgaacttcagcttctgccctcagccctgtgtgcctgtgaaaagttctgctcagttcctcagctcccgagcagacgcgtcgaggaaaagtgtcccaaatgccaggctcacctctctaggttccctcttctcccagatcttgacctcacaattcatgactgccttgcaggctcttcagtactatcagattgtttgtttgtttatttgttgagacagggtctccctctgtcgcccaggctggaatgcagtggtgtgatctcggctcactgcagactccacctcctggacttaaatgatcctcctaccccaggctcccacgtagctgggaccacagatgcacaccccaccacgcctggcttcatttttttttttttgactgagtctgcctgaactaccctaagagttgctaaaagtaagatttactcccacatcatctacaatacagacatattattttgttaagcagagtaatttcttttccttttttttttttttgagacggagtctggctctgttacccaggccggagtgcagtggcgtaatctcggctcactgcaacccccacctccccagttcaagcgattctctcacctctgcctcccgagtagctgggactacgggtacgcaccaccacacctggctaatttttgtatttttagtagagatggggtttcaccatgttggccaggctggtctcgaactcctgacctcaagtgatccacccacctcggcctcccaaagtgctgggattacaggcgtgagccaccatgcccggccctgagtaatttattttctaaaaaggaaaatacgtattagaggaccacaagataaaatggaaatccctcaccacggcagttaaagccctgaccatcaagttcccatgtccctttctgcttccttctgacgtttcccttcctgaactcaggaagctgtaactggccacgtggccctgaagaaagggctcctctctgacctagagcgaaggcctgccccgctgcctcccgagctctggtgacgggagctggaagggtgtccttcctgtccctacaccctgtcccagacactggaggaattcagtgtgtgctgacaagcatgggggaggtcctaaccctgagtgttgtgggggtgaaggggaccaaagagccccaggagcaggtaacacctcctctgctgcctgcttgctgggaacacctccactccctgcttccaccccagcccgggcacagggtcccggtcactccgtcctcaggactccaacggcctcagcacaaactcccacttcctcagcaccagttcagtgtcctacaccgagacgtcgcggtgccacacggaagcacggactgctctgtccataggaacagtggcacgcacgccacgtggccagtgtgggccagctcatcagcactcacggcccgcaacccagccatgctcaccaccaccatgttcgtctccacgaaggtgggatcaactgagcagacggacaacaccagctcctggagtcctgggccaggtcctgaggtgagcagaggtgaccccaggccctgaccctgaccccattgccagcaaggtcacccgggaggcagggggcagttcggtcacggtaggagaaggaagggccctgtgtcctgacttggcctttgcagtcacacagactgggctctgctgcgtttagctatgtgatctcagacaaacctattgacctctctgggcctctgtttcctcattgtgaagtagggacatcatgggattgttggaggactcagtgagcagatggaagacccaggttagaggctctgccagactctgcagagcatcacaatcctggccgtccaccgagggcttccccaggctggactctgcgctgagtagggtctgctgaagcagctggtgccctgggtcccgccctagtgactcaatggccaccctgagtcccaggatccagaagcctgcaggcctgctgggggacccccgacggcacagctcaggccaagtcagaggaagcacagggaagcgagggtggggcgtcctgtccaggcaccttgggtgaatctctgggcgttcccatggtcttgccacagtgcctgctttgtgtcaaccagtcccaccagggccaccgcagccagcatccccacctggtgcatgcttccacccagggctttttggaggcgccaggcttcttcaatgaagtccttgggcctcccagccagggaccccactggggcgcccaggccctgggaggtggagaggagagactcctgccagctcacatccctgtccttgggccagggtggggacagatgcgtagccccatctgcagaggtgttaaaggggaacctggggccagctgccagggatggagctcaggaatccaaccctgcctcctgctggggcgccccaccccacctgtctgtgggaggccagcccagggctttcccaccttggagaggcagaaagacacagagtcacagtgctccacaatgtaggtgggcgggacatgcagggccagcaccacgttcatcagctgggccctgtccaggtggacccaggccccataggtctgggccaggaggtgcacctgggggtgaggtgcaggcagagtcagaggggccaggcctgagggaggcatagagggaggagggtcctgggcttagctgcctgaggaatcaggagggatcaggagacctggctggtgactggctctggtgatctgggacccaagcagtcaggctgtgctgcctaagcctccatgctgggctctgggaggatctgggggtgcacatttaacccagctttgtcgcacactgagcatgggccaaacgaccgtgggccaagggtaaatgtgtgtcacctcatttaggctgcacaacaactcgagggagacgccgctgctcccatttcacaggcaaggaacgcaaggcttggagagttaggctgctgcctaactagtgtctggtaaacagcagagctcagacactgcggcctcctcacctcgcacgtgggtggcaaggaccaggtggagggcactcacacgagcttgttcctgcagcctcatggggcacacgtttctgcgccagggcagcaggtcctggtgctgctctgggactcagctctggggacttgggggtgggggcatctctgctgttgggctggtgcagggactaggggccctgacctggggtaataattccctttgtgtctcagcctaggaccacacatgtgtccttcctgtgacaggtctggccgctgatgggtgcccatggcataaatcagaggggactgaaccccaggatgggccaggggcacaggaagccaggatcaggctggtggggggcacacagtggtggggctgggcctacctggcgtaggtagttgatggggaggatccggacccccgagatgctgtgtgagttctccaggcaaatgagctcgcagacctggtggtagggactctggaggccccgcgtgatcatcctctccagctcagccagtccagagtgcagtggggcagctctgggagggagtgggagtgcactccagccctctgtgggtcaggaagaggatgagggctgaggggtccaggggcacctcttggcggagtggggggctcctctggagtaaggagccagaccctgagtcctgtgtctgctcccccgaggcctgggccttggagcctttcctctgttctgtgcatctagacagacgtcccagctggggggcactgggcccctcccctattaactcttcagatgctgctgtctggctcccgtcgggagcgcgggagtgctccgagtgtccactagagggcaccaggcaccaagcaccgcccaggtgtctgcccggcaagcctggggccagccccagccgctgccgcccccacgtggcaaatctggggctctgctctccttccttcctcccctggagaggctgccatcccagccagcttctccatggctgtccctttctcccctccgcaggtcccagcctggtgcctgggaagggggtttgcccctgagcagcctgtgctggctggaggatgcccagggccccaggtgagcaatgcctgctccttacctgagccaccccaccctgctcatagacgtggaggtggcactcctgcccaaggaggagctgggagccccggcgccagcagtgacacatcactgagacagaaggagggcaggtcttggcattgagtctggaggcatgtggccctgctcagcgtggctaggctgagccctaaggctacagtcaactcacaaatgcctgaggccggcaaggaaacagcaccttcaagacacctcagtgctacgtgccagaagaccatcccattaaacacacaagtctaggatagctgtgctgcgctgggaatcgctgggccacacccagcctgcacacctgcgcctggaggcccctccacagagcatcgcctgctggagaagctgctgcaatgctgcttcttggtggacacgcagccgaggcacctgcagtcgtcagaccctggcaggaaacagacggcacacacacactgggaaactggcagtgtttaatcatgggacggtttatagaggggaggcaggagcagggaagcccggagaacaggcctgaggggtgagaggaaggtgtggctgcaggaacccggagccagggctatgtggagaggtccctgacgctggcccagaggccctggggaccctcggaagaggagctagggaggagcagacctgcagcccccactgtcctcctcccccatctccttccagggctccccaccaacccaacagaaatggaggaatgtggtccatgagtgtcagagcccccccatatgcactgaggacctgctaggcagacagaagtcgccctgcgctcaccagagatgaggttggccatagtgttggagggcacaaagagggtgcgccccagccctagcagctccacagccatttcttgcagctctgcggagggacagggaagccgctgtgcttgcacactcgggtgtcagcaccgtccatgctgctttccctgtgtcacttgggccagagcacgccctgagcccaggtgaggcccctagcccgaggctccggtgagcagctgagtgggtttggagccccatccaccagctgcacactctgtgggcttagcaaccacacatccagccccacagggccctcagtcaactctgcaccccacctaccctgggccatggcctctccccgctccccccaagaacctctcttgtggtttgaacctgtccccggcagacctcacacctgtctcacttcctttcccctcagccctttgcaggtggggcctgtggtttctctgctgacttcctttcctcgtcaggagggatgagtggggggctggacggggtgtgagggtgcagctggagggtgaggaaggctcccgctcttgctgtaaagcccactgtggtccccccaactgtggcatcaagtccttagcatgacactcagggctggagtgacctggcctctgccccccctcctcagagcctcctgcactctccacacctgccacatccccacctgcgccctgaagacctttctcaccagtctgcttctgctcctgaagacccctgccctgtgagccggcgctcccttccctgcctgggatgcttccactcagcctgcaggagggctcctctgtgaagcccccttccccgtgagccacagcctcgccccatcctctgcttcccagggcaccctctctagactcccatcaactcaagcgcctccccagcctctccttgagcggcagtgacttgttgacatgtgaggctgcctgggagcatggagatcagcatctccagcaacgctgggcagcagctggatacatgcttagccccagccatcccttaaccccttagcagacgggccctcgggattcaactggtgaccccatggcttgtcctggcctagctgaggggtgtgcacaccccaacagtcaaagtggttcactatggcaactcacaacccagggctggggctgggggtcgctgtaccctggagacactccctaggttattagaacccactccttgcgaggtgcagcctgtagaacctgcccctttctacatctattttccatttgccttctgtgggggaaggcagtgcaggagaacagttgtgggtttcagagtcagaagacccgggttcaaaccttggttctgccatttactaagtatggggcctggagcgcctccctccacatctcagaaccctcctctgcaagactggacatcacccatctcagggggcagctgggtgacaatgcaggacacacacaaccacctggtgagcctatagaaatgcaggttcttctcggcaggccatgtgaatctgcatttcttttatttatttatttttatttttatttttttttttttgagatggagtctcgctcttgtcgcccaggctggaatgcagtgggacgatctcagctcactgcaacctctgcctcccgggttcaagtgattctcctgcctcagcctcctgagaagctgggattacgggtgcccaccaccacgcccagataatttttgtatttttagtagagatggggtttcatcatgttggccaggctggtctcgaactcctgacctcgtgatccgcctgccttggcctctcaaaatgctaggattacaggcttgagccactgcgcccggccggaatctgcatttctaactttcaggtaacagcagcacgcacgcagacggcaagcctatcctgtggcaggtgttcattacacccatttatgtcggaggttgcaattttttgaatttttgccatcagaccttggcgatgaccttgagcagtaggacataaatacctcccagatgcttagcgttccaataatggaacactaggcataaatgggttttaagcgccaagggagccacttcccctgcgtcccagaccatcacggacagcgctccgctgccgcctccacgacccccggcctgcacgccggtcttcgccgtagtcgtcgtcccccacgaccgcctcggccatgacgcacctcatggccggcccgggcctggtcaccttgtcgctgcgcaggcccaccacgtaggctgcgacccccgcgctcccacaccccgcccggagcgccccatgtaccggggccgccgctcgggccagtctgcggagcatggcgcgggcagcgcccgactccccaccccggcgggagctgctgactcctctactccccagcgaaggcggcgagagcgacgtggtcggtgcggccagaattcctagagctgggaagcagccgccctgggccgggggtccagggagcgagccccgtggcacgctgggagttgtagttcgcgctccctcgcggcgggcgtgcgcgagcgtctgcgaacgggccccgtggcacgctgggagttgtagtacgggctgcgtcgcggcggagaaccagcgagcccgtgatgctgaagcagaaggttctgctcattgaaggagaaaccgaggccgagcgagtgtgtgtgtgtgtgtgtgtgtgtgtgtgtgtgtgtgtgtgtgtgacagagtctcgctttgtcgcccaggctggagtgcagtgacgcgatcttgactcactgcaacctccgcctcacaggtacaagcaattctcctgtctcagcctcccgagtagctgggattacaggcgcgcgccaccacgcccagctaatttttttttttttttgtatttttagtagagaggagttttcaccatgttggcctggctggtctcgaactcttgacctcaggtgatccacccgacttgacctcccaaattgctgggattacaggcgtgagccactgcacccagccctgggcgagcttttataacacagacgctcatgtggcacttgccatgtgccaggctctgccccaggccctttgcaaatgttagctcagttaaacctcccaacgactctaggagacaagcactattgctatccctgtcttgcagatggggaacaggagacgcggagctaacggacagctggaggccacttgggtaggaattggtccgggcggggtaccgctgtctccagagggcagccctaaatcactgtttcatgctgcccctaaaacacagcttccctcgtttaccatcttcagtattgatttgttgagcaagttcggtgcgccaggcagtgtccaggtgtccaggtgccaggctgggggacagggctatgtctccagccgggttccagtctaaggggagaccgctaaaagaatgcgtggggagcccctcctccataggcccctgcccctgggtggactgcctccatgggggcagggtggtgctgaagttcaagccagctgtgtggccttggacaagccatgtagcttctttgtgcctcggtttcctcaactgcagattgggctgttgtgagcattcagtgactggatatgtgtttggtgctgaccccaatgcctggcttgctgtaagctcagggtggtcaccccactgtggctgttttttaattttttaagacagggtctcactctatcccccaagctggagtgcagtggtgtgattacagctcagtgcattcttgacttcctgggcttgggtgaacctcccacctcagcctcccaagtagttgggactacaggcaagtgctactatgcctggctaatctttctgtgtttttcgtagagacaaggtcttgctgtgttgctcaggctggtctcaagctcctgagcccaagtgattctccctcagccccacaaagtgctgggattacaggcgtgagccatcacgacctgcccagctgtggctgttattatcattgtcgttactgatcccagcttggaactctgagggcccgggggctttggggtgaactctgacacagtctagactgtggggtgcccttcccccacacagggagcacaggcacccattgccactcagcggctcctcttcctctttctgtcccccataggagaaagatccaggaggggccacagctgctgggccaagcgtctggtgagggtggcccttggtgaggaggacacccatcctagatcagtcatggccaggcctttaccacaggccagctccaggtcaggcctggggacttagggcgagcagaggtggcctgccctccagagctcaggtcccaggggtgggggacaagatgctggccgtgagaggatggcagcgaggaagcagctctaacagtcccagtccaggcagcagggcaggctttttggaggaagcagtgattaggctgagcttcgaagatggagccgactttggacagagggatagcaggggtgaagcctctgggtagagaggagctgctgcgtttgtggccctgagggccagcgtggctggggaagtgagcaggggtggggatggagcccaaaagctacatccggggcctgatgacctctcaggggctctccatctctcttccttcagcttggtgggaattgtaagtacccgcagggtcagtggtcccaaggacacccatgtgatggacaggcttgctgccttcccctccccagagcccttctgggcctgacccacaatctgcaccaaattcctgcccttagaaaacaagccccttatctcattgtctggctccagaccttctgctgggaagtagggggcggggaacggaggcctctgtgggaaggaaaggaggtggtctggcggggcagggactgggggcagggatagcagcgctcaggggagaagggggacaaacaaatggacccccggcccctcgagctatggcagaatcacagaatggcctcctgtttgccaagcttcgcagtctgcaaagcctgccctctgcagcttccctgccaatggtcccagcggctttgcagtggaaggatgggcagggaggctggggtcacagaggcccgaggaccctgcccgagaggcacagctggtcacccaacagggcctttctccctttctcccaaatcagagctgtctccccagataggtggcctctccctgggggaacctggggcagaacagtttccttcttctgggtcctcctatctagtccccgggtcacctgggccagccctgccttgtcccagtggggtctgacagtgtggaggagcaagaagggtgggctctcacacggaaaggtgcagtgaggcctgtggcaggtggaccccatgaccccagcttggcctctggggggttgtctgggctcctacatgtgtgtgtgtgcatgcgtgtgtacatgggtgtgtgtgtgtgtgtgcatgtgtgtgtgcgcacgtgtgtgtgtgtgaccctggctgcaactgagatctgagttgtcttgctggtaagctggggacgggccgcagttcccaggctgggatgagaagcccaaagccctctgtggagccaactctacttgcccccacccctgtcccagcactgaccctcttccctcccctctctgcagttcttcttgacattctcactagaagggtcaccatcactggaggtcctggggtcatctcctgccccaacgcaggctggccccacccccacatgccagctgctcccttctctcctgagcccctgccccccaggactgacccctgcagcccagcccttcccaaacttctgagctcctctgtccgtgggtgcagtggggcccctcggcggggcttcctccctggcctctgtgggatccagcccttctgcctcccagacgcctccccgccccacactctggcttgcaacacttctgttcccgaatgcgctggcctctctttcaccccgagacctctgcacctgcattctgtctggaaaacccccaaccgtcggcacgcatccctggtcaccaccttctaagtcttcagatcttagctgagacgcctcattctccatgaagccctcctggcccagcccagtgggggatggaggtagccctcctcctgtgctgcctatagcaccttttcttcccactgcgcacgggtcacagctgcctgtttactcctctgacttctccgtgtggctgatgccctgtgcctgcagggcccagacgccctcctcctttggtgtgtcctgcatgcctagcccagtgccaggaccacaggactcagtaaacaccagccaggtgactgacaatggagggacatgtggttcgccatcccctgcccctgggaccccccaggcagaagtgtgcacaccccccagggtgtgagacccctgtgcagaaggacatggcgaggattccagaggaacaggggctggcctggcctcagcctctcagagtcaggtctgggggtcctgaagacagccccctccctggccttcttgagagatttgcggctcccctgagcagtgggaggccactgggctggctggagggggccttgcgacataagccccaggtgggctgcctttcacggcgcccccggctccctggcacccgcccaggcgcaggcgctggggtgtgggcacacactcacatgctgagttcagtgtgcggattcctgtaacgctgggctgctggcaggaagtgcgcgccggggaggctgctgctgggaacccagggctggccccgctgagataaagggaggcagcagatcgcagctggagatagcggccctgggtcctggtaaacaggtggggggggtggggggggggaaatgtcctttccatcccatcctcttggccctgagcctgcaggatctatagcgccctagcctaagcccagccccgatagcttgggatccagaggggagttgtcggcactgccatcatcattcccagcctgggggactgggtggcaaaggacagggcgctgggcctgggggcctggctgggcccatggtgggcatgcacttggcccacgtgggggccactgggtgtcaaggtcatgtgtgctgttgggagggtgggaaggggaagggagggagctcctccaagcccctgcacttccccaactgggaccccctagtgggaaagatgtccctctccaggttcgccttcagcaccatctccggaaatccagagtgaggtgccatgagggtgcgagaccgggagagaatggggggtggagtgaggggggcgtgagggctgttccccagccaggtgcagagcaggggggctacagagctggggagaccctgtgcatgacttcaacaggaagccacaggatgttcacctgcactccatcagctcaccgtgggctagcgggagctcggcatggcccatccccagtgcccaacacaatgggcgctcaaatacacttgcttgtttaaaaaattaagaaatttaccacgcatacagaaatgctcatgaagcatatttgtacagtgttatgaataaatacatataaaataaactcccgtgccatagccactcagaccaataaatagtccatggtggggcgtggtggctcacgcctgtaaccccagggctttgggaggccaaggcgggtggatcacctgaagtcaggagttcgagaccagcctggccaacatggagaaaccccgtctctaccaaaaatacaaaaaattacccaggcatggtggtgggcgcttggaatcccagctactcgggaggctgaggcaggagaatcacttgaactcgggaggcagaggttgcagtgagccgagatcgtgccattgcactccagcctgggcgacagagcaagactgtgtctcacacacacacatacacacaaacacaaacacacacacacacaaaagaaatagaccatggccaggattccagaagcttccttcctatttacaacccttccctctgcagaagttactgctgccctgacattcttcttcatatatatatacacatatacatatacatacacatatatgtatacatatatatacacatatatatacacacacacatagatagatagatagatagatgatagatagacagatttgagatggagtctaactatgttacccaggctggtttcgaactcctggactcaagcggtcctcccacctctgcctcccaaatctctgggatcacagatgtgagccaccaggcctggcctggcctgacttttatgaccaggacttgcttttctttatgattttgccaccgtagatgtatcccttaatagcagttgagtgttgagtgtggcctgtgtgtgaactttacagaagtcgaatcagggtgtctccttttatgtctggcttcattaggctgtttgcaagagtcacccgtgctgtggctgtcatttattctctgctgccaggtacttttccactgggtccctagagcatagtttatttctccattctacctgtttagggacatttgggattttgtttccagactggccatgtacggtggtgctggtgggcattcttattcctgtctgctggggcacaggtgcctgcttcgggagggcggacgcctggcggtggggctgctgattctggggtctctcatctgcagctttactaggtgtgccaaatcctttcccaaagtgctggaaatgccctcctcccccactttcccacacttctccatctcggtaacactagtgttatcagacttcttcatcttagctgtccttgtgatatgtggtgatatctcctggcaattttaatctgatcttttttttttttttttctttgatggaatctcactctgtcacccaggctggagtgcagtgacgcaatctcggctcactgcaacctctgtctcccgggttcaagcgattctcctgcctcagcctcccgagtagctgggattacaggtgcccaccaccacgcctggttaatttttgtatttttagtagatgggggtttcaccatgttagccaggctggtcttgaactcttgacctcaggtgatctgcctgcctcggccttccaaagtggtgggattacaggcatgagccaccgtgcctggcctcttttttttttttttttttttttttgaagaaactgagtcttgctctgtcacccaggctgcagtgcagtggtgcaatcatagctcattgcagcctgaactcctgggcttaagcaatccacccccatcagcctcccaaggtgctgggattataggcatgagccaccacactgggccctgctctttctgttaactgctaaaggagagtaccttttattatttatttatttatttatttattttttgagacggagtctcgctctatcgcccaggctggagtgcagtggcgcgatctcggctcactgcaagctccgcctcccaagttcacaccattctcctgcctcagcctcccgagtagctgggaccacaggcgcccgccaccatgcccggctaatttttcttgtatttttagtagagacggggtttcaccgtgttagccaggatggtctcgatctcctgacctcgtgatacacccgtcttggcctcccaaagtgctgggattacaggcgtgagccaccgcgcccagccccttttcttatgttttagccgtttgaattcctctttgtgaagagcatgttctggtcttttctcattgactggtcaggctggttggtatgtgcaagcatactgatccttgcgggttctgtgcgttgcaaagatttcaccccagggctgggtgcagtggctcatgccttcaatcccagcactttgagagtccaaggcgggcggatcacaaggtcagcagttcgagaccagtctggtcaacatagtgaaaccccatatctaccaaaaatacaaaagattatctgggtatggtggtatgtgcctgtaatcccagctacttgggagactgaggcaggagaatcacatgaacccaagagtcagaggttgcagtgagcagagatcgagccattgcgctccagcccgggcaacagtgcgagactccatctcaaaaaaaaaaaaaaaaaaatttccccacagtacagctgcggtggctctcgcctataatcccagcactttgggaggccaagggacggggatcactggaggtcaggagttcgataccagcctggccaacgtggtgaaaccctgtctctactcaaaatacagaaattagccaggcgtggtggcacatgcctgtaatcccagctactggggaggctgaggcaggagaattgcttgaacccaggaggtggaggctgcagtgagctgacatcgagctactgcactccagcctgggtgacagagtgagactctgtcaaaaaaaaaaaaaaaaaaaaaaatttcccccgtgctgtggtttgtctttttttgttgttattgtttgagacaaggtctgactcttttgctcaggttggagtgcagtggtatgatcatagctcactgtagcctcaacctcctgggctcaagcagtcctccggcctcagcctccagagtagcagggacataccaccatgcctggctattttattttatttgcagacatgaggtcttgctatgttgtccaggctggtctcaaactcttgtcctcaagcagtcctcccaacttggcctcccaaagtgctgggattacaggcatgagccactgcagctggctggcttttctttttcttttctttctttttcttcttctttttttttttttttttttttgagatggagtcatgctctgttgcccaggctggagtacagtggtgcgatctcagctcactgcaacctccacctcccaggttcaagcgattctctgcctcagcctccccagtagctgagattacaggcaccgaccaccacacgcagctaatttttgtgtttaatagagaggggatttcaccatgttggccaggctggtcttgaactcctgctctcaagtaatccacccgccttggcctttcaaagtgctgggatgacaggtgtgagccgctgcacccggccccgcttctgtctttagatacggttgcaagctgtggtgtgtgtggacaggggaatggggacttagggattgggctggggggaccctcaggaacccctctactgccttccaggtgtccccagcttgggctgagaccagggcacccccttgtgccttctgcccccacctgctccctcctgggcctaccagcctgcggccgcactggctgctgacagctgggacgctggggtctggcgttatttactgcggcagcttcctcctccttccaggaacttgtcctctaacttggggcggcagcgaggcctctaatctttcggatctcgtttaccggcattggcctctcacttcctgttgctaggcctggaccgaggcacggggtcagctccgtgcactgcgccttgcctgttgccggggcctctgttctggcccctcggcagggaggacagagggtcagatgccgggcctcaggcacagtggccatctggggtagggccagctccacagaggcaggggacccaaggctgagccggctgtgggctctgcttcctggagtccagggtccagcacggggaccaggttattccttcgctcctcctggcttggcagagcgtcatggaaggtggccttccccagactcccccacatcccctcctcccacttctgcagccaccagagccagggcccttgtgggaaaggacagggaagtctcaggagtttgggcacagacaagatccctggagaccgtggggtctgctgccctggagatgtggaatcccaggccttgcccacctcctccaccctgggtgggttccccaaccacccagaggagtgctggcatctcggggccaccagggcatgggcaagagtggctgcccagcccctgccaagggcctgaagccagcgccaggcagaccctgccttgttgagcagtatcttcagtaagggctctgtgtgccgaacacctgctgtgcgccctgcacacttatcccagagatgggattcaaacccaggttgcccagcgcagagaaacagcattctccttctgcatccgtgaaggaagctttgtcttctaaaagccctagcccttctgttaccttgtcctcagccggcctgcttctgtccctgtgccataagccagatgaatttctctcccaggctggccctgcagaggatgagagatggcccttgttagaggcaccctgggcaccccaggcatggctccccagctgatgatagaacaactgagacagacccggcatggtggctcacacctgtaattccagcactttgggaggccgaggcaggcggatcacttgaggtcaggagttcgagaccaccctggctaacatggtgaaaccctgtctctactaaaaatacaaaaaattagccgggcgtggtggcaggcgcctgtagtcccagctactcagaaggctgaggcaggagaatggcgtgaacccgggaggcagagcttgcagtgagccgagatctcaccactgcactccagcctgggtgacagagcgagactctgtctcaaaaaaaaaaaaaaaaaaaaacatctgggatcaggaaacgaggaaaagtatggtcttcatagtggcagagtttgcaggggtctttgggaagaaggaaggttggaacttgaggctgggggatggatcataggggaggggctccatcctagctggggaagggagggctgtcctgctgacattggcctctagaatgggatatgcaggatgacccccctggggcagggaggagaatgttatacttagcatttaaatctcgctctttttaaatgcctatctttcgtgaatgttttataatgcaagtaatgtattcatgcggtcatggaaacttgtaatctaaaaataactatgcatatatcatttttgttggtaagggtgcacgatcaaaatagtgtgaaggtttgaaggtcactttctcctaggtcttattgtttctttaattactttttatttatttatttatttttttggagatggagtcttgctttgtaacccaagctaaagctcactgcatcctcgaactcctgggctcaagagatcctcctgcctcagcctctagggtagctgggacggtaggcgtgtgccaccgcatctggctctaggtcttataatttctgtccttggccacccacctgctgattccaaggtctaggatggcaggatgaaggaaggtcccacatttggggacctgcaggacaggctgcaacagaaaggcctagtttaatgagtagcatgggcgggcctggagaccgagaggtgatgtaggcacgcatggggttcaggcctctctgtggtgagcgcttgcccccgctggaagcagagacaagaccctggctgggtcttctgttttgttttgttttgttttgttttctgagacagagttttgctcttgttgcccaggctggagtgcgatagcgcaatgttggctcactgcagcctctgcctcctgggtggaagtgattctcctgcctcagcgtctcgagtagctggaattacagccacacaccaccacgcctggctaattttgtattttcagtagagatggggtttctctatgttggacaggttcctctcgaactcctgacctcaggtgatccgcccgcctcggcctcccaaagtgctgggattacaggcgtgagccactgctcccggccatgtgccgtctgattaggaacccaagagccccttcctgggaacagaaggacaactggcacctgctgaggcacgcccacttgccgagctgccctgggatccctgggcagagcgtcatcgcttaagaacctaattccacaacaaatatttgtcacgctcctgccagggccctggcaggagcagaggcggtgtgtactgccatgcattcctggtctgttgggtgattgacacatacaagacgccagcggtcctgagagtcaggtgccttcctggaccccttggtgagcggaggtgagttgccatcaaggagggaagattcaggaagataactccaaggtcctcaatccgtccaccagtcagtggatggcaaacataatccatgggcactgattaggtttgccagcccatgctgagtgctgggttcagtgtccttcgtctcctgccaaggggagaggacctcgaatggacgcctgggaccatgatcccattttgctggggaggaaacagattagggaggaagggaaccttggtggtgagcagtaaagccaggattggaacccgcgccgctaaggtctctgcctccctgtaggacccaccctggctgtggggaggcactagcttggggaggagcccctggctggtcctcccaggtgtgtgtggagtcagccaggggcagtgctggcagggcctccaggcactgtccagcctcctcctcttctgcacttggaagaattccagctgtttttcagcctctctcttcctccaggaagccttgcatgatagccctacccctctgccaagacacacaccctcttctccctttttccttggcacctggcttatctcacagttgcctttgtcgtcggccagcgtccctcactgggtttcaggctcatggagggcaagacctgagtctttcattctcaggatccctagcagggggcttagggcataatgagcattcaggaaataactggagaaacgtggatgaggaaacggatagcagagggtggagaggggcttgcttctaaaggcgagacgtgaacctagtgggatgaccaggcagggtgggggtggtggggagttgtggggaggccagtacagaacagctccagggagggcatggagcatggtgtgagcaggaggcctgtctgacctccggggatggccccgtgggacagaggaccttgaaagccaggcagagggatgggatcagatactaacgcccatagggagccctggcaggtccttgagcaggggcatggcagggcaagccttcctttagcccagggtgagcttgcgccaacccgtgctgcagaggagaagggcatggaggatagctactccctctgggtgttcttccggcccggctaccctcagccagagctcaggaatcacactcccctggaacctggagttttggattcaatctttattcaataaatggcttattgggaaccgacagggtggctagagcctgcctggtgttggggttgggggaccctgcctggtggtttgggctctgtgggtgtgtgaggaccactccacggtggtgctggcgttccccattccactctgggctcagcgcccctgacacactccccctgcccactctggaggccaggccccctggtgctgggggaggcactggcttggagaggagcccctggctggtcctcctagaagagagagtctgtggggtgggcctccacagccctgccgggccccacacgggcagctgttcccggaatgggggtttgaaacttttcttttgttggcgaatatgcatgtggtcttaattattaatatgcagcacttatctcccccaaatgttttatcgggattcggcagatccgagtgtgcaggcagtgggtgcgggggcagggcagggatattatgggagcacagggaggccccagaagttggagtgtcctccaaatcagctggatgacccagaggaaggaaagaccctggttaacgatggtcaagttaactctttcaggccctgcccaatgctgcaaaatcgcacctgggtgtttggcctgggtaggcctaccgcgcctttctgggttctggcctatgccgatgtctcccctgccccgcaggaccctggtggactggagggaaggtagggagccgcatctctcagcagcaacccaggacttaaggagggccattgcccttttctggtgggggtgaaggaggaggaagcagcgtgaccttggaatccgtcacctattaacttcccgcgtatcacctgatctcattcggcgtccaccaccccctggaagtgggcttatcgggcccatttttagacgaggaaaccagagtgagacgagtcacagatctgaggacctccagcagagcagggaggtgcccaggtggggggcgggcgggtggtctttcttttggggcagcatcccaaaagaaaggaaaaacagcagggggcgtggctcccctcactgccccgcaaccatccctgcctggccagggccttttgggcagtgccactggagattcctggaagtgccttcgggccacacacacacacatcctccgggaccctcccagccccccactctgcgcttcccgggtttgcaggagggccccaaggccagccgggagccctgcaggacctgggaggaacctgagcctgaagggtctaggagcccgccgtgtctgctctcaagtgccccgcgttcccttggcctgatccccgatcccgtgcaccctgcacccagtaggccctccggggccggggctgaatcagcttcggaggcttcagcaaggcattgcagggggtccctacgggaggtttagtccagggcactcgcagtgttgtgggacgctgggcagggctgatcccagccactgagtcttcccgggcagagagcagacaggggggcattgggatttggaggggcacccgggaacctcctgtcccttccgggccgcctccccttaccctgatttcccttgcagggagggctgtgcaggtttgtggtggggtggggaggacttcctagaatttgttgctttgattggaatcttccctattggggcagggttggggtgagctcttgcccaccctgcccaccccctgccgccagaatcctgggctccctccgttgagttgtgttggggtcggggagcttcgtttatggcatccctgaattcaccccaggctttgaagtcaggctcgctccacaggaaaagctcttccaagagggagattccctggacctcctgggcctccgcctggtaattggcgcttcgattaacagctcgggtgcgaggggcacttcagtggggggcagggcagctgagtcaggggcccagcccaggggagatgttacaggagggaggacgggaagggaggcggggaggttggtaattccagattgaggagggtctccgtagctctccgagtgggtgaggacccctcggaggcaagtgtggggtcccccagggcctgctgggcccccttgggcccctggaacaatgggttcccactagccaacctgttcccacagccagaagttgccatggtgaccccctcccaccttcagctacagcttttccagtaaaaccactgcagaaatccatacttcccgacaggcacgcccggccccccaccccccactctgcgcggtcttggagcctcggggagttaaccctgcgcatgctggtgtctgttgtttgggggagacgggagtgagagccggcaatgcgggccccaggctggagaggagagggtggacgggggcaagacaagctgccctgtccttgaaggccccagcgagtgacttgagcaactccaggaagctggagcggagcagtgaagctagctctgacctaggggcccccttggcacagaggaggcctagctggggcccacagcgcagctcaccccttctagagtgaccccctgcccgcagtcgctgggacacgagacccttcccggcctggctgcagctgctaccctgttagccgatcccctcttcctcctctcccctcccggcacaaacctttttcctggaggcagagagggctcagtcccaggtccccgtggccctgctgccagcacctggcggcccccaagggcactgcgtacctggagcccggctttgcatccacaggtctgccctagggggctgttgaactccagaagtcgctgcctgctcagggtctccgtgtcctccccctgagaagtggggataatgatctgggctgcttccaagcttggggaagaggatccccctagaaggttctgtcctgctgcctctgccaggtggaggggcccctggggacaccccaggctgcaggggctcagggggctccgtggcccaggcccagcctcacttctgcagccagagtgagcaaggagatgctgtaattgttctctctgtagcccaggatgaataattgagaggtctttgaagagaattaattagccagcttattgactggaaacgctttgctgcagatgatggaggatggaagcctgcgtggggcccgtttgccggctggggccgcaccagacattcaattcacacccatggctgctcagcgggaccaggggctcggcctttgcctagtacctgctctctcctgctcaggaggaagtgggggagctgagccccaacttggcaccctgctgtggttctgtcctgatttctggtatggggagggggggcagcaccccttagactcaactctgctctgtcttctaagaggcaagatgggggcctctccaggagtgggggtgggtgtggctcagtcttgggagcagttcccttgcaggatagactctggtcctgggctccttcagtccagcccaccccaccgcctgagccccagccccttttcgggaactagggagtgacaggaaaagacgaaagcgttcttgcctgcaggctgcagggggtcagacatgtcgatgtccctggtgaggctgaggagggccggttctcatggaatggacaaggcgctaggcaggaaatgctggatcactagccccgggtaccagtcattaatagtagtagtaaacattcctccagcaggccctgtcctaagcacactgcatgcactaactcctgtagaccctgtgaagacagggggtgggcttgttccccagctgggtctgcagagcctcagggcagaacctggcacagataaagctttgttgattgaatgaatgagtgaatgaaggaaatgaatgtgaggaagctgagtggcaaagttagactcacacatcgggtttgtttgtttgtttttttgagatagaatctctctcagttgcccaggctggagtgcaatggcgcaatcttggctcactgcaacctctgcctcccaggttcaagcgattctcctgccttagcctcccgagtagctgggattacaggcatgtgccaccacacctggctaatttttgtatttttagtagagatgggatttcaccatgttggccaggctggtcttaagctcctgacctcaggtgatccactcacctcggcctcccaaagtgctgggattacaggcgtgagccaccgtgcccggcctcacacaccgtttttaagctggctcaaggatccgtgctctgatgcatcctccagtcccaggcgacgtcaacatggaagatgtgggcaagaggcaaacagtcatgaagggcttgggccatgtggaggatgagcaggaggtgggggccctgagagcgggcccagggttcagccctgcctctgcagctgctggagcaccagtgaagagagggcaggtgccagcaggcatggtgcaactgtgggggacatgggcggggcagggggtacctgggtggagctggttggggaccattgctcttggtccagataaggcatgacaaggcctgggccaagacccctgaaatggggcatggagagtctgtgacagctctgagatatgtggaggggaaggggaatggaacctggtgacttgtggacctgcggaatgggggacaggagttgagatgactccaggtatctcccgacatgagcacatgtatctgcaaatgaggcgggggtcaggaagcacagggagcttgctcttgccccgggggcctaggatgccctgggctgtcatcattccacactcacccctgacctgctcctgctcgctcagggaggctgccttacagggaggtatcagtggctccctcatcctctgcctctgtggagcccacagtgggaggcacctgcagaacatgggggtgggggacagtgcagttgggggcgtgggtgttccttcctctatctgcctccctcacagagttgtgatcaagcgagttgtagagaaacgccactctctgagacgaattcaggctagtgctcaaaattctctccaccccaaagaaggggctagattttcttttatactttgttttagaaaggggcggtggggggagtctagttaaaacaatcttacagaagcaaagcagacaaaaaagttaaaaggataaatggttacgggaaagcaaacagttccaggtgcaggggctttaaatgtattacaaggtgatagacgcggggctttgagtgttatcaaccggatacaaacgcggggactctgggtgctatcaaccgggcgaattcctaggaactgcggatataacttgccacagtatcttatcagttaattgcatccttggatgtgctggcagtctgcttgcacaagttaagtccttgaggaagggggtgggtaaggggctgtaagtgaaggagccaagatggagtctgtctggctctctcagctaagggagagtcaattcaggttaaaacaaggttgggtatcacaatagccctctccatgcctctctgtccagggctgggattggttggcatactctgcatgcctttccccagccctccagctgtcctagagttgggctgggataaccctccagccgccctgtgagttgcactgggatcagtcaggtgtactctgcatgcctcaccccagcccccgagccgtcccgtgggttggagttgtttgcgtcactggctttctgttctcagctgacttagctgggacgtcaacaactccctatgtcagaggcaagtctccgcctgcatctgccagagctccacacagctgcagacacctgtggcttcatctgagtcctcatctcggcctctgggaaccactccttcctaccctttgcctggagacagtggaagccgagggacatttctccgaatggcgttcacttggctccagaaatgagaactggaatgaggaagaggaatcagtctccctccaggtggctgaagctaggcacgtggaacctgggagcagcgggcagccacactggtgcccttcagacagcaggagggggctcttgtccgaagctctgagttcaaaacagaggggacatgggggaacagcaggaggtaggatcaggccccccaactcctgccgagagctcacacctgtcttcagcccctcctgcattcctgccagtggtagccatttgcccttttggttgcctggtgtccaaataccctttctacgttggaggtagggtcctgggggtccctgctccctttcccaggctctgaaaactgactcctgggaatgtgaccaaaatgattacattaaatgcttccacctgaatgtttaatcgtgaagatgagatgccaagttcaagagtaatttaggggccaggtgtggtggcttgcgcctgtaaccccagcattttgggaggccgaggcaggtggatcactggagaccaggagtttgagacaagcctggccaatatggtgaaaccctgtgtctactaaaaatgcaaaaattagtcaggtgtggtggtgcacacctataatcccagctactcgggaggctgagacaggagaatcgcttgaacctgggaggtggaggttgcagtgagccaagatcaggtcactgcactccagcctgggcgacacagcaagactctgtctcaaaaaaaaataaaaaataaaaaaagagtaatttaggattgttcccaagggttgtggtagagccagacagcactgtgtcacagcatgcagtgagtatccagcctcgataccctatgcagcccattctatgctaacggttacccccactgaattccttttctgcataggttaaccagagtgccactgtcagtcacaatactgactagtggcttctcttgggtttcctgagaaactccctatatcagttagtgagtgccataatcaggctgtgtaacaagcagccccgcaatcctggtggcattctacaataagcatttgttttgctcacatctctgtgggtctgtgggggttcaccagatccaggcttggattagctggctggcgtctgggctgtgagttgggtccaggtttgcttcacatgtttcttatcaacctcggcccagcaagctacctgaggcgtgttccttccagggtgacttcagcagtgaaagagagcaagttcattgtgcaagcacagttcaagtctactcactccatatcccctgacatcccactgatcaaagcaagtcccatagctatgccccaagtcaaggatgtgaatgcataattctactacaagggagtgaagaagcaggactgatcattccatcctccccttatttgtttttagtttttattatgaaaaaaaaaatttttttttgagaccgagtcttgttctgtcgcccaggctggctgaagtgcagtggtgtgatctcagctcactgcaacctccacctctcgggtttaagcaattctcttgcttcagcccccccgagtagctgggactacaggcttctgccaccacgcccagctaatttttgtatttttagtagatacggggttttgccatgttggctaggctggtctcaaactcctggactcaggtgatctgcccacctcggcctcctaaagtgctgggattatgggcgtaagccactgcaccaggaccatgaaaatatttttttaaaaataggcagaaggggccgggcacggtggctcacgcctgtaatcccagcactttgggaggcagaggcaggtagatcacgaggtcaggagatcgagaccatcctggctaacatggtgaaaccccatctctactaaaaatacaaaaaaaattagccgggtttggtggcgggcgcctgtagtcccagctactcgagaggctgaggcaggagaatggcgtgaacccaggaggcagagcttgcagtgagccgagatagcgccactgcactccagcctgggcgacagagcgagactccatctcaaaaaaataaataagtaaaaataaataaaaataggcagaagggtgtaatgaatccccatagaacatcacccagattccacaattattattattttcccatatttgtctaacctgttttttttcccttggtaaagtgtattttttaaacttttttttcccatatgtaaaacaaataatttatgtaaagatatatgtatatatacacacataacaaaatttaccattttaaccattttcaagtgtacagttcagtggcattaagtaattaccactgttgcacagttgctctccagctcctgaacattctaatcttcccaaactgaaactgtccccattaattaacactagctccccattcccctggaccccaacccctggcaaccaccatgctattttctgtctctataaatctaacaatctcacatgagtggaatcacacggtatgtgtctttgtgtgactggctgatttcatttagtgtgatgtcttcaaggtgcatccacgtgatagcataggtcagaatttccttcctttttaaggctgaataatattccaccgtatggatagaccatagtttgtttatccattcatgcatccatggatactagggttgcttctatcttctggctattgcaaatgaataatgctgctatgaacgtgggtgaacatatctctgagtctctgcttttaattcttttggggatagatacaggagtggaagtgctgggttatacgctaattctatgtttaatttttggagcatctcaccacactgttttccacagcaattgtaccattttccattcccaccaaaattgagtgcacagggccaagcgctgtggctcacacctgtaatcccagcactttgggaggccatggcgggtggatcacttgaggtcaggagtttgagaccggcctggccaacatggtgaaaccccgtctctactaaaaatataaaaattagtcgggccatggtgaagcatgcctgtaatcccagctactcaggaggctgaggcacgagaatcgcttgaatccaggaggtggaggttgtggtgggccgagatagtgccactgcactccagcctggatgacagtgagactccacctcaaaaaaaaaaattgagtgcacaggattccaatttctccacatcttcaccaacacttgttattttctgttgttttttttttaaaaaaaatagtagccgtcctaataggtattgagtggcgtcgtcttgtggttttagtttgcatttcaggctccatttgacttcggctggtttgaggtgagtttctgtttcttgtaactggcgctagttcaggtaggctcagcagctgcagaactcaaagagatatgttcacccgcgttcatagcagcattattcatttgcaatagccaaaagatagaagcaaccctagtgtccatggatacatgaatggataaacaaactatggtctatccatactgtggaatattattcagccttaacaaaggaaggaaattctgacctatgctatcatgtggatgaaccttggagacatcacactaagtgaaatcagccagtcacacaaagacacataccagctcagcagctgcagcacggtagccaacaatagcagctgtggcttgtggagaagtttatttctccttctgtaacagcccagggcgggtgcacccggtctatgcagccctactcccttaggggacccaggcggatgctgctttgctaccttgacgtggagtttctgagctcgctctgccggttgccacctgggtccccaggtgggagggtggagcacctgccaggattgatgggctaagggcggaactttccccttgcattccatcaggggtatttatctttttttttttttttttttttttgagatggagtcttgctctgtcacccaggctggagtgcagtggtgcgatctcggctcactgcaacctccgcctcccaggttcaagcaattctcctgcctcagcctcctgagtagctgggattacaggtgccaccatgcccagctaattttgttatttttagtagagacggggttttgccatgttggccaggctggtctcaaactcctgacctcaggtgatccgcccacctcggcctcccaaagtgctgggattacaggaatgagccaccgcacccggtctcagttgatatttctaagaatctgcatagaatagaccagccgaccctggatcctatcagagggtggaggctgggaggaggaagaggatcaggaaaaataactaatgcgtactagacttagtacctgcgtgctgaaataatctgtacaacaaaccccaatgtcacgggcttacctatataacaaacctgcacgtggacccctgaacttaaaaggtttttttaaaaaaagagggtcgggtacagtggctcacacctgtaatcccagcactttgggaggccaaggtgggtggatcatctgaggtcaggagttccagaccagtctggccaacatggtggaaccctgtcgtctctactaaaaatacaaaaattagccgggcatggtggtgggcgtaatcccatctactcgggagactgaggcaggagaattgcttgaacctgggaggcggaggttgcagtcagccgagatcacaccactgcactccagcctgggcgacagggcaagactctgtctccaaaaaaaaaaaaaaaggggaagcctgttgcccaaaagggctgctgtggtacctaaaaatgtgggctttctccttctgggagggggtaggaagaagtcgcccccactctccaggcccacggctgccccgcccctgctcaccagccggctggctgtggcaaaactaaagcctgccccgtgccctgagcccggcatgttgttcagcctctctgaaatggtctccttggatcatgggcagagatggtacgatgggatcccacccgaggggtcccggccggtgctcacggggctgggaccagctgctcttactctgtttttctacctttctcagccacttggaggaagagagaattttgttaccttttacaggtaaggacgctgaggttcacaggataagtcacttccagccaggtgtgtgtgacctcagatccatactcagagggaggtgggctgggcagagcctcccacctgctcccctggaggcccatgagtctgggcactggggccccaattcctataaaccggggttgattacggaggactcccctcacctgcaaccccgcctcccaccacagagcccaggcagcagggaagcctggagacaggcgcagagcctctgggcctgggtgcctacccctgcccacccccagggcctcaggccacaggagaccacctaaagcaggagccgggagtagggcccaggctgggctggcacagctgggcctgtgaggggtggaggggccgctggggaagggacttaccagcagcagctctgctgggacctgggaggctctcctcatttccagtaacaagcgggggtgggggcagtgggagggaggaggcggctttccccaggtgccagctgtgcttgaagacagcctgtcccctctgctgtctcctgttctcagctccttaatcccctccccgacctcgtagttgactcctgggctgactcctcccctggaagggaaagaagagccgggctcacccacacccaacaggtgcagcagctgcttgaggtcacagttgctgagaagggaagctgaggccagtggcagctccagccagggttggtgcagcctgctgaggggtcgaggtcacccaatcacccacccagctccacctgcccccacccctcccacccagcctggccaccagcccagacaccttcctcacatggcctgaagacccctgctgacctgtggcaccatgtggcccagcagggtggccaggctggccggggtcatggggtgggggacgctgctccccacctgccctggggtggtcggtgctgttggggaggccactctctaggggcatctgccaggtaggcagaccagaaacttaccccgagttctgtgacccgctccggggagcggggcatctcatgtcctctcagccacgtctgaaagctgggacatggcagagtgggcagggctgccctctgagctgacccccttcccctcctccccatcttgtctctcctcagatctagggctcactctgaggcgtgggtgacacttgccccccaaccccagcctcttcagtgcagggaggcagggcctgaacttcggagggccttggggcaggttcctggggcttgcagtgaggcctcccctttcccagggagaggaagggagaagccgcgtctggcgagggaagcctgtaccctcaccctcactgtgtccagatctgcacccctaacctggcctggggagactggcaccaggtggagctggtccccaaggagccccaaaccccagaacatctgctgcaggggtcagctctcagggggccccagggccagtcctctctgcaccccaccttccctgctcaatgtggcttgtaggaggttatgcaaagcattatgcaaagcacatgcaaatgagacccaaccacaactggtcactctctccaggcaagaccactgaagccctctggtcatcagcaggaatgcaggggcgcctatggcaggccggactccaggtcaggccttggggcagtgaggaagaaggtgcatgccaggtaagctatagtcaaaagggagggacacacaccaccaggcgaatgaatgaagcaaatcaatggcactcctccctgccccagaattcaaaatgacagaccggtgcagacagatgcatgtgtgttctgagaggtggttgtgtacaagcaagctcactccttcagtctcccattcattcacttattctgcaaactcggtgtctattatgagcctgggctgttccaggggctggggatatcccagcagatgaaaatgcctgctttgcagggctccagtagggagagaaagatacaggtgacaagtcaggatgagcaaggaggacacaccggtgtatgttccagaaaccataaggaggctggagccaggcacagggagccctgggccttgggaagagtatggtctgtgcaggggccatgtagtgggagggggccctgcaacatcaacccaggtgccctggggaggttgtggtggaaacaggcagagcacggagggaaccaagttccccgggcaggagatgccaggggctgcggccaggggtggcagtggaagggctgagaagtggtcggattctgggttaggaagagaaagctgccctttgccctctgaagcttcgccgaaaaatcagcggacaaaaggcagattcataggagaaaaggctcacaaaatttactgtaactgcatagcacaggactccccggacgtgattacccagtaatccagaggggtccagaacctgccatgcccttcctcatgggagaagaggtggtgggaaaccacctctttgaggcaaagtcaatgatttttggggggaaatgaaatgaatgggccccttgctcagacaatggttagtgaataattctctttgggaatcaaataggaccaaagaacagacaatggtttgggaggaagttggtctgggctctaggtgtggtggttcattgcagcctcttcctttgtgatgtgagttttaatcttctccggttaataacatttcagggaaggcaattgtgttcctcttggccagtctggtttctaggtagttaaggaaagtccgagaacagcctcatcctgtgctttgggaagacatggggctggaggtaggtcagagagaccttggggccccttcttgtcaaggcgccatattttctgagccccaacagtgtattttgggaatgctgttatatttccatctaatttgcattaaggaaaagctatatgtgttttggtgcctgggtacctgtgttggggaggctgggagtggggacagagtgggggagggcatcttctgggtgctctgcagacccaggggtctgtggtgttctccttcagggcaaccccccaaaacccaccacccaaactcagcgaaactacaaggtggggctgtgatggggcctagaggtttatgtaacaatcatgggaacggaggtcctcacccgtggaggccccgctaggggttgagcctattccaggggttccctggagttcacctctcctcactgcctcctgttcttattggttttctggtgggggaggaaggggcaaagccgctcttctgtgaaggtggatgttttttttttggcagcagctgaaatccatttgctactaggcctaggagtaagtgggcgatcaaaactgaatcgtgcagtttttactccaaaacaagccctggctctttaagacttggggctgattttcactctcgggtacctggggcgaaggtcgggaagccaggccttctgtaaagcttttaaggacagaaggtgtagcctcccaagttagcacactctggagccccgaatgcagttgccctctacagacctggtcagggcctcaccctgcagcccaggggaagggactgggggctttaaagctctcgcaggtctctgtttggctgtgtggcccaggaccagctccttctactctcctgctgtgaatcagcagcaccacccccgacttagtagcatagtgtgaggctgacgtgcacgtgggtgtgaatcccggtcagcgccactcgttgtgcctttgcgcttcaatggtccctgccaaggctgtggcagcagctcctgagctccccaccatacctcgcctaaagccttagggacaagttcagccacctgagaccaaaagcgccctgcctggctagctctaagcctccaaataacccctgggatcccagcagttcttcactgtaagagtttacttgtggctgggcatggtggtgaacacctgtagtcccagctgcttgggaggctgaggtgggaggatcacttgagcccaggaggttgagatggtagtgaaccatgactgcaccactgtactgtatgtaacctgggtgacagagtgagtgagaccctgtctcaaaaaaaaaaaaaaaaaaaagtgggccgggagcagtggctcactcctgtaatcccagcactttgggaggccaaggcggacggatcatgaggtcaaggtatcgagatcaggccgggcacggtggttcacacctgtaatcccagcacttcgggaggccaaggcaggcggatcacgaggtcaggagatcgagaccatcctgcctaacatggtgaaaccccgtctctactaaaaaaaaaaaaaaaatacaaaaaattagccgggcatggtgatggatgcctgtagtcccagctactcgggaggctgaggcaggagaatggtgtgaacccgggaggtggagcttgcagtgagccgagattgcgacactgcactccagcctgggcgacacagcgagactccgtttcaaaaaaaaaaaaaagatatcgagatcatcctggccaacatgatgaaaccccatctccactaaaaatacaaaaattagctgggtgtggtggctactccggaggctgaggcagaaaaatcgcttgaacccaggaggcagaggttgcagtgagctgagactgcgccactgcactccagcctggtgacagagcgagcctccgtctcaaaaaaaaaaaaaaacagaacaaaacaaaaaaagtgttcacagatgggcttggaggtccatggtccatccttgttcttcaggccagccaaaggtggccaaatttagtaaaaaagcaaacaaaaaaccaagacacctagttaaatttgaatttcagagaaataacaaatacatttttagtgtaagtatatcccatgcaatatgagagagatacttactctaaaaaatgtatttggccaggcgtgtgggctcacacctgtaatcccagcactttgggaggctgaggtgggtggatcacttgaggtcaggagttcgagaccagcctggccaacatggcaaaaacccatctctactaatacaaaaattagccgggcctggtggcgagcacctgtaatcccagctaccagagggctgaggcatgagaattgcttgaacccaggaggtggaggttgcagtgagccaagatcatgtcactgcactccagcttgagtgacagagtgagactgtgcctcaaaaataaaaaaaaatgtatttgttgtttctctgaaattcaaatttaactgagcatcctgtgttttatctggcaatcctagtcccaccctcttccaaattcacatctttttttttttgagacagagtttcactcttaatgcccaggctggattgcagtggcatgatcccaggtcacagcaacctctgtctcttgggttcaagcaattctcctgcctcagcctcccgcgtagctgccgtgcaccaccacgcctggctaatttttgtatttttagtacaacggggtttcaccatgttggctgggctagtctcgaactcctgacctcaggtgatccacctgcctcggcctcccaaagtgctgggattacaggcgtgagccaccacgcccggccctccaaattcacgtctataagaacgattttcctgccccaaccatacatttctcacagataaaggtgcatttttatcatttcgtctttcctggggctgaaatggcttcttctttttgcattttatggttttacaattgtagcagtaaaacattcttgccggcaagatgattgaaaatttaactacaaaaggcatcattcattttatttttgtcttcattggagacataaaatggattcgcaatcatcccaccacagtggttgagtattgtgggttttagagttgctcacatagcacatttatactcaccagtgtgagggctctttgcagccgccaatggagtgatcgtttgtgttttggaagcagcagtaacatttattcctaataatcctgctgcagtgggttcttggtattttatagttgttattgcagtaaaatttatatcctacagaattatgacaatattcagctactaatatgattattatttgtgtgtgtgtgttaaaaccacggaaataaaatttactcccaacaatacagtggcaattttatgtccctaaacctgaccgtaaataataaacataactacagaatgcctgtaaacacataaaacatccttctcggaaaaagtgaactctccattgctatcctgatgagaccagcagctggggagcctggtctagcagttagggctcctgggcagacttcaaaaggatgaagcaacttcttcacaggactcctggagagcaagttgcttaacatttcagagtccaagtcagcccgtctcagagaacgtgggctggtccatcgcctgatgagtgcacggatacaatgtgtggtaaccacactgtagaacactgcttggccgtaaagagaatgcagttctcatacacactgcaactcggatgagccttcgagacattatgctccacgaaagaagccagatacagccaggtgcggtggctcactcctgtaatcccagcactttgggaggccgaggcgggcagatcacaaggtcaggagttcaagaccagcctggccaacatggtgaaaccctgtctctactaaaaatacaaaattagctgggcatggtggcgcatgcctgtaatcccagctactggggaggccgagacaggagaatcgtttgaagccaggaggcagaggttttggtgagtcaatatcgtgccactgcactccagcctgggcaacagagcgagactccatctcaaaaaataaaagtaaaaaaagccagacacaaacgatgtatacttttgatccacatactgtatgatcccattgaaattaaatagccagaaaaaggctaggtgtggtggttcacacctgttatcccagtactttgggaggctgaggtgggagggtcgcttgagctcaggagtttgaggccagcctgggtaacatagcaagacccccatctctacaaataacttaaaaattaggcaggcatggtggtgtgcacctgtagtcctggctacttgggaggctgaggcaggaggatcccttgaacccaagaggttgaggctgcagtgagccatgatcatgctgttgcactccagcctagacaacagagtgagaccctgtccgaaaaaacaaaaacaaaaacaaaaattaaaaatatctagaaaaagtaaatttccatagacagaaagtagacgagtggttgtcaggggctgggggagggaaggggaaatgggaagtgaccgctcatggatcctttttttttttttttttttttttttgagacagagtcttgctctgtcacccaggctggagtgcagtggtgcaatctcggctcactgcaacttccgcctcctgggttcaagcgattctcctgcctcagcctcctgagtagctgggattacaggcatgcggcaccatgcccagctaattttgtatttttttagtagagacggggtttcaccatgttggtcaggctggtctcgaactcctgacctcaggtgatctgcctgccttggcctcccaaagtgctgggattagaggtgtgagccactgcgcccggcctcatggacacttttgagatgatgaaaatgttctggtagggctgggcagggtggctcatgcctgcaatcccagcactttaggaggccaaggttggcggatcacctgaggtcaggagttcgagaccagcctcaacatgaagaaaccccgtctctactaaaaatacaaaattagccgggtgtggtggtgcatgcctgtaatcccagctactcgggaggctgaggcaggagaatcacttgaacctgggaggcggaggttgcggtgagccgagatcgcaccattgcattccagcctgggcaataacagcgaaactccgtctaaaaaaaaaaagagagagaaaataaaaagaaaatgttctgtggttgactacagtgatggttgcacaattccatgaattcaccagaagctgttgagtgtatactttcaatgggtgaatagtgtggtgtttaaacgctcttaataaagttgctaaggccgggcacggtggctcacgcctgtaatcccagcgctttgggaggccaaggcaggcggatcaccaggtcaggagtttgagaccagcctggccaacatggtgaaaccccgtctctactaaagatacaaaaaaaaaaaaaaaaaaaaaattagccgggcgtggtggcacacgcctgtaatccgagctacttgggaggctgaggcaggagaatcgcttgaacctgggaagcagaggttgcagtgagccaatatcgcaccattgcactccagcctgggcaacagggcgagactctatctcaaaaataaataaataaataaataaataataaataaagctgctaaaatgaaaaaaggaagaaaacatgcttctgttcctcctgccccccacccctgcctcccctgggctttcagctgctgtctctagagaatgtttggaacaggtgtctgggaatagctaacaaaatccctctggcttctccttgccttgtgggttatggatactgcccccttcctccatcgtgaaatgaaaagtgacatgaccctaaaatctaaaaggaccataaggcccattaggcaatctcaagagagccacctgcaagggacagaggtgtggcagcagccctggagagaaggaggccaagcagagagggtgcaggctgccaggatggagcctctgcccgccactcactgggcagcagtggagctgcctctgcctgtatcatccccattttatgaatggggaagctgaggcagaagcagtgatacagccagaatgaacagtcttaggcatcgtccacagaccagcgagttactccaccaggtgtctgtatcacccaaagaacctgaagtgcatgggctccttgcgagcttttttctctcaaaaaaaaattgtggggctgggcgccgtggctcacacctgtagtcccagtactttgggaggccaaggcgggtggatcacttgagttcaggagttcaagaccagcctgggcaacatggcaaaaccccgtctctactaaacacacagacagtttggctgtagtggcgcatgcctgtagtcccagctacttgggggactgaggtgggagaatcgcttgagcccaggaggcggaggttgtaggtgagccgagatggtgccactgcactccagcctgggcgacagagtgagatcctgtctcaaaaaaactgtggtaaaataggccgggggtggtggcttacgcctgtaatcccaccactttgggaggccaaggtgggtggcaccggaggtcaagagtttgaggccagcctggccaacatggttaaaccccttctctactaaaaataccagcgttagctgggtgtggtggtgcgcacctatagtcccagctactcggggggctgaggcaggagaatcgctagaacccaggaggtggaggttgcagtgagccgagatcacatcactgcactccagcatgggtggcagagtgagactctgtctcaaaaaaaaaaaaaaaatttgtggtaaaaaacacatagcataaaatttgccactttagcctttttttttttttttagacagagtctcgctctgtcgcccaggctggagtgcagcagcacgatctcggctcactgcaagctccgcctcccaggttcacaccattctcctgcctcagcctcctgagtagctgggaccacaagtgcccgccaccgtgcctggctaattttttgtatttttagtagagatggggtttcaccatgtcagccaggatggtctcaatctcctgacctcatgatccacctgcctcggcctcccaaagtgctgggattacaggcgtaagccaccgcgcccagccaactttagccatttttaagtgtttcaattcagtggcagtaagtatcttcacatcgttgtgtgaccaagtgtcagaggtgacgtgggctgtccaggacacatgactggtgggaactacagggtccccgtcctggtcctcacaccgctgttggccctggacaaggtatgtcttctgagtgcgaccagaggcccagagagcacgggattggctgcggttgccagtgcctggggcagttcccgctaatgccatcgtcctggggatccccttgagtcccctgctcctgcttcttagtttgctgcaccccagagggtgactgggacccccatgcctgggacactggttgcataggcagcttccagggccaccccagacctcccagctcagagtcctggggcctggggctgtgagttaatcagtgtccaggcaaccagggatgccacaagaagtcaggaagtttccagacttgcctggtctcagaattatctaagctcctttttttatttttttttttttaagacagggtctcgctctgttgcccaggctggagtgcagtggtgggattttggctcactgcagtctcaacctccagggttcaagtgattctttcacctcagcctcccaagtagctaggaccacaggcgtgtaccaccatgccccagctaagtttttaaatattttgctgagacagatcttgccatgttgcccaggctggtcttgaacttctgggctcaagcgatcctcccaacttggcctcccaaagagctgggattacaggtgtgagccactgcgcccggcccatctgagctacttttagaagtataggttctctggcttctctccagctgagaccaaaccacctctgaatctattgttaagaggtacaaggggcttgtgatacaaaagtggcaaagctggacaggcacagtggctcatgcctgtaatcctagcactttgggaggttgaggtgggccgatcacttgaggtcagaagttcaaggccagtctggccaacatggtgaaaccctgtctctgctaaaaatacaaaaattagcctggcatggtggtgcgtgcctgtagtcccagctactcgggaggctgggacaggagaatcacttgaacctgggaggcggaggttgcagtgagctgagatcatgctgctgcactccagcctgggcaacagaacaagactctgtctcaaaacaaaacaaaacaaaaacaaaaacaaacctgcaaggctgtcggttcatgcgctcattccttcactcattactgcagtcctactctgtgtattcattattgcagtcctactgtgtgtgcctcacctctgcagccggatcctgccccagccccaggcatgaaggcatggagcccctgcctgtgcacgtccttcttcctgggctaccctgcctctccccttgtgcctgacattgagggctgtgagacctcctactcgtcacccctcagccagctctgtttggccccccaaaagccttgggacctcctcgggtcctggacgtgggactggctctgattctagcctctgggctgggctgctgctgacaagtgttcagctcctgctgctcagatgaatgaagggacagaaggcgggtgtctaggcatggccgggacctgggattctattttttttttttttttttgagatggagtttcgcttttgtcgcccaggctggagtgcagtggtgcgatcttggcttactgcaacctctgcttccagggttcaagcgattcttctgcctcagtctccctagtagttgggattacaggcgtgcaccaccaagcccagctaattttgtatttttagtagagacggggtttctccacgttggtcaggctggtctcaaactcccgacctcagatgatccgcctgcctcggcctcccaaagtgctgggattacaggtgtgagccaccatgcccaaccccccagccaggacgggaacttcttaggatccggctgcagcccagggcagaggagttcccgcggcttcctccagtgagttaagtcaggcctgagtgagcatctactctttctgggccgctagagggagaccttcgcagcctcgtacttggctcaagacaccaggctaaggggtgtcagtgtgtgtgagtgtatgtgtgtgtgtgagtatgtgttttgtgtgtgtgtgagtggcgtgtgtgtgttgagtgtgagtgtgtgaatgagtgtgtgtgtgttttgtgtgtgagtgcgagtgtgtttgtgtgttgagtgtaagtgtgaatgagtgtgtgtgttgtgtgtgtaagtgcgagtgtaagtgtgtgtgagagagagtgtgtgtgtcctacctgggcatgcacgggtgggtgtgggcagtgacctgagccctgcacgtactgccaggtggcccggcttgccaaaggtggggaagggttatttacccaaagtgggagagacctgcaggctgggcggcagcggcaggaagaacagcgagcgaggccacagtggcatccatggaagatgttatttggggccttttccgtgcctgctactgttcttcgcatcctgcgtgtatcacgagaagcaatcctatcaaaggaggacctatgaatacaatatccactttacagaggaagaaactgaggctcagagaggctgagtcacttccagagctgagatttgaacccagggagtgggggctggggcctgggctccacagcacaaaggagccctgcctgctgggacaaggagctgccttgtggtatggccagtgtgcccaagccagcctttggagcccgctgggctggctctgggttccagctctgccgcctgcctgctgagtgtccttgggaaagtccctccacctccctgagccccgctttctcctctgtaagatgggactaatgacacctatttctctggttgtttagaggtttaatggttcactgtatgcagagggaggcagacttcagggcctcctcaggagccttggcatgcggccacagggcctttgtatgtactgtgtgtgcgcctaagatgcccattagaaagataagatgccacctcactgcggactccccttaatctccctgctgcagggccagctccaggggtgtgtgacctatggaggtgcactggtccccatgctcagagcacgctgtgctgggtttaatgatctccgtcaccatttcgaaattcttagtgattttttaacaaggagccctgcatcttcattttgcactgggccctgccagtgtcacagctgggcctgccctgcagtttctttttctttctttcttttttttttgagatggagtctcgcttttgttgcccaggctggagtgcaatggcatgatcttggctcactgcagcctccatctcctgggctcaagtgattctcctgcctcagcctcccaagtagctgggattacaggcgcccaccaccacgcccagctaatttttgtatttttagtagagatggggtttcaccatgttggccaggctggtctcaaactcctgacctcaggtgatccgcccacctcagcctcccaaagtgcagggattacaggcgtgagccatggtgcccggctgccctgcagtttctcctcctgcgccgtgccccgcatgatctgcccccagcgaggaaggagactgaagagcagcagggagggtccctggagacagagcgggcagagtgggctcgacgcacccctgacacccatcagcaggcgccttcctcaatgcggacaggcagaccctcctctcttgggcacacactcagtcagcccctgggtcagttgctcctcctaaaatgggactgacagttgaagacctccaagcttcccagtcatagcagtggcccctctcagcccacacccagtccactctggattgctagtggggatcccccgagacagggttctcccccaggctggtcagccccacatctgtgaagctttctgggcctctccacacccccagttctctgaggcaggcggggtctccagggcaaactcgtgtgagcctcacctgtgtgttgcaccgtcctgtctgcaaacagaaaccctcacgctgccgagccgatgcctctgtccccagcacctccttggggacggtggactccatggtcaaagggccaactcaggggagccacagtatctgtgcttcaggcagcccgagttgaggacgtgtggcattctgctggcatcgttcatgcctcactcttggctctggggctgggcacttgctttctggcccagcctgccgccagggtgaatggcctctggggcagatggcgttctgggaacaggtaatgtcctggccagcgggcaggccggagctggagcctgggtggagggctccccaaggaccaccctgggtcccactcggctttccctgcgtgggggcgacactgttgccagttacagaccgcccaagagtgccccgagatctaagcataggacacaacaggggctggtctcatccacctcggatccacccacctgcagcccagtccggctgtgtccctcaggtcacactcactgtgttttgagaactctcctccgggcctacaaagtttgccaaggcgaatgtcaaagggatatgggggcaacagctcccaagatcagccctaatccaccctcctcatctgccctctccatggggcctcactccatgtctccaacatctcaggttggtgtccaagccacggcctcacatggactcacctcctgcttcagtctctgtttctgaccaggcttcttgctcccagggaggagcgagcttggaccgctgctctcagaagggaccctcctagctggacctgcccctgatttggccgggtgccctgggctctgtgcccatctccaccaacctcccagaagcgagagctggatacctgcctctctgtgtccagcttccttccttccttcctcaacaatcagttattaaacacccaggatacagatgcacggtgctgctgcagctgtcctccaggctgcctttttttttttttttttttttttgagacaaagtctcactctgtcgctcaggctggagtgcagtggcacgatcacagctcactacaacctcaaccttctgggctcaggtgatcctcctacctcaacctcccaactaactgggaccacaggtgcatgccaccatgcctggcttgtattttgtgtagagatgaagttttgccatgttgccgaggctgatctcgaactcctgggctcaagtgatccacccacctcggcctcccaaagtgctgggatttcaggcgtgagccaccgtgactggccccatgctcttggcttctaatcatagactttggggctcattcagatcacctctcatagtgaacttttgtcactttcttctccaccatccactttaccccagggatgagccttcattggtctaagccagtctgactctctcacccccttggttataacgatataggatacatgtcccaacccgggtcagatggccctataaataggtttcagttgctttacctacaagtagttccttttttttttgagatggagtcttgctttgtcacccaggctggagtgcagtggcacgaccttggctcactgcaacctccgcctcccaggttcaagtgattctccagcctcagcctcccaagtagctgcaattacaggcgcacaccaccacgcccagctaattttttttttttttttttgagacggagtctggctctgtcccccaggctggagtgcagtggcacaatctcggctcactgcaagctccacctcccgggttcacgccattctccagcctcagcctcccgagtagctgggactacaggcgcccgccaccacgcctggctaattttttagtatttttagtagagatggggtttcaccatgttggccaggatggtctcgatctcctgagctcgtgatctgccctcctcggcctcccaaagtgctgggattacaggcgtgagccaccgtgcccggcctacacccagctaatttttgtatttttagtagagatggggtttcaccatgttggccaggctggtcttgaacccctgacctccgctgatccacccacctaggcctgccaatgtgctgtgattacgggcgtgagccactgcacccggccaagtagttccctttctgttgcattgggacctagaggcacatggcctgggcctgcccaagggtgtcttgtgaccatgagggagagtctgcagaggacagggcccctccccgtgcaggagggcctggctagttgagtgagtctctgatgaggcagtgcctccgagggtcagtcatgctcaaactcagtgtgccccaagtcctgacccctggtattctgggctatcactgcccaggaaaacagcactccaaaccctggccttcaggcctgttcctttatgcttatcgctggaatccctggtccagagggtcttcaaatccacacaagcccctcctgcttggccctaacccgatgggttaagcgtttcaagggagggcttgagaggtccccaggacatgcctggagggccaataaatgaccgtgaacggtggtgagtgaggcaggtggagagtgtgaccatgaagagcagggcagactccccagagtactgtagggaggcagctgcagtctggatgaagagtacacgccaaggccaattgtggttgctggtgggatgcagctgggaaagcgagagtgaggaccccagaccctggcggctgcaatgcctgggggcatgtgacatggtggtgaagggggaattgtgtgttgatcctaccctggccgcaagtccaggctcacaggccatggccactgaccacaggaagaggcctccctccttaaagtcgggagaatatcccagaactaaggctagtcctgcatcctggccgggaatcccaggccaacaccctccccgcgatcttaggtgcttagcagccctggctggtgacccctgggcggagagagtacggtaatttgcaagaaatccaagaaagccctggtgagtggttgcttttcctatgttgcaaccatccgcgaagtgaatgctgctctgtgtctctattgttgttttgatggtgttcgagatgatgaggagaacctgagtcacagcctttacgagtctgatttcctcaatttacaggagctgcctacgcgttctggaagaattcacatgctgatttgtaggcggcctggccaggtgcttcggagactccagcagcatcgaaggtgtgattttagatctgtactcccgaggctcttgtgttatttaagaaggtcagtgtgaggccgggcgcggtggctcacacctgtaatcccagcactttgggaggccgaggcgggcggatcacgaggtcaggagatcgagaccatcctggctaacacagtgtaaaccccgtctcaaccaaaaatacaaaaaattagccggcgtggtggtgggcacctgtagtcccagctactcgggaggctgaggcaagagaatggcgtgaacccaggaggcggaggttgcagtgagccgagatcacgccactgcactccagcctgggcaacatagcaagactccgtctcaaaaaaaaagaaaaaaaggtcagtgtggttaaatgcataagaagtaatcagtgtgttaaatgtatgagttaattgagcatagcccaagtgaaagtgattgtgttttcatattaaaattagatttataaagagaatgctaaaacttgttggattttggaatgcaaggtctaagtaaaggtaggttttaatattgacaacttttacacttgatatattgactctttttttttttgagactagactctgttgcccaggctggagtgcagtgctgtaatcatggctcactgcagcctcaacctcccaggctcaagcaatcctcctacctcagtctctcaaagtgcttagactacaggtgcatgccaccatgcccgactaattttttaaaaaaaatttttagcgagatgacttagtgagaggtctcactaaattgtccaggctaatctcaaactcctgggctcaagcaatcctcccacctcagcctcccaagtagctgggactacaggcacgcaccaccacacccagataattttcaattcttttttttgtcgatagggtcttactattttgtccaggctggtctcaaactcctgggctccagcaatcctcccacctcggcctcccaaagtgctgggattacaggtatgagccaccgtggccagccttgactcaattcaaattcaagtcactaagtcttccttggaaagcacaaaacctcccccaggcattaaaatattcaagtgacacagaaaagggagaggtgaagaggagctaccacctggaggagaaggtgggctctgagccgggcctggagccaggcagggaggtcttcttagcacccagcaagctgcaccacccaagcactgccctctgccaccccacctctgctggcatggaaacctccctctgggggtccctctggcttcttgggtggagcctctttttttgagacagtctcactctgttgcccaggctggagtgcaggggcacaatctcgcctcaccgcaacctctgcctcccgacttcaagcgattctcctgcctcagtctcttcgcatagctgagattacaggcacctgccaccacgtctggctaatttttgggtttcaccatgttgtccaggcaggtctcgaactcttgatctcaagcaatccacctgcctcggcctcccaaagtgctgggattacaggcgtgagccaccacgcctggccttgagtcgagtcttgatgtctcaatcacactgccccaaatccatacacttgtttattcattcagcaaacaataaagcacctggacactccaggttccatgccaggagctggagttcacaggagagcacaggcctcggccctggggctgagtcttgccgccttcttcatggcttgtgactgctgtggtctgaatgctggtgtcccgcagattcatgtgttggaacttaatgcctaatgggatagtactaagaggtagggccttagggggctggttaagtcatgagggcttcaccctcacaaatgggattcatgcccttataaaagaggcttgagggagcatgtttccccttccgccacatgaggacacagcaagaaggtgccgtttgtaaggaatgggtcctcgccagacaccagatcggccagtgctttgatggtggacttcgcagcctccagcactgtgagcaatgaatttctgtcgttagaaaattacccagtctaaagtattttgtcagtccgggcgcgctgcctcacgcctgtaatcctagcactttgggaggccaaggcgggtggatcaccaggtcaagagattgagaccattctggccaacatggtgaaaccccgtctctactaaaaatataaaaattagctgggcctggtggcacacgcatgtaatcctagctactcaggaggctgaggcaggagcatcgcttgcacctgggaggcagaagttgcagtaagccgagatcacgccattgcactccagcccgggagacaagagtgaaacaccatctctaaataaataaataagaaagtattttgtcatagcagcctgagcagactaagcccctggccctcactcagcctctcctcagcctgccactcctgatggggacctactctggctctgtcctccccacccaaacacagcacccccacaagcagtggggagaggtccccagtggagcaggagtcctcctggactttgtacctggggccaccccagcagttaccgctttaaaaagaccacaacaaatgctaagctttggtgttctttatagaattctttttaaaaaacaaaaaaatgatcatcatgttttgtttgttttccatttagaagagaaacactttctcattattttaaaaatagaaacattacagaataggtactgtggaaagtgaaactgtcctttcccccgccaagcctctgtccctctcttctttcttcctgggggctcagcctgccagggccactgagctctaccatacaggttatagctacctgtcacttcttttttttttttttttttttggcccaggctggagtgcagtggcacgatctcggctcactgcaacctccgcctcccgggttcacgccattctcctgcctcagcctcccaagtagctgggactacaggcgcccgccaccacgcctggctaattttttgtatttttaggagagatggggtttcactgtgttagccaggatggtctcgatctcctgacctcgtgatcagcccgccttggcctcccaaagtgctgggattacaggcgtgagccaccgcgcccggcccttaattttctttttaatgcttctccgtattttctagctttctacaaagattaagtaatccataaataatttaaataaagtatcatttaaaagtctattctttttggccgggcgctatggctcacgcctgtaatcccaacactttaggaggcctaggcaggcgaatcacctgagcccaggagttcaagaccagtctgggcaacatggtgaaacccagtctctactaaaaatataaaaattagtcaggcttgatggtgcatgcctgtagtcccagctactcgggagactgacgcaggagaatcgttagaacccaggaggtggaggttgaagtgagctgagactgtgccactgcactccagcctgggtgacaaagcaagaccttgtctcaaagaaagaaaagaaaaaaaaaaagtctattctctttgattcaatatttactcttctgggaaagcaccccaaagaaataattctaaatcaagaaaaaggcctggtgtggtggctctcgcctataatcccatcactttgggaggccgaggtggacggatcacctgaggtcaggagtttgagaccagcctggccaacatggtgaaaccccatctctactaaaaatacaaaaattagctgggcttggtgcatggtggtggtgcctgtaatcccagctactcaggaggctgatgcaggagaatctcttgaactggagaggtggaagttgtggtgagcagagatcgcaccactgcactccagcctgggcaacagagactccgtctcaaaaaaaaaaaaaaaaaagtgttgtgcaggaacaaaaagattaagccaagcagatttgagcctcctcaagaaggcccttcctgacccaccctccagcacacctgtctggtgggagactgaggcacaagagcaggcatctgcgtgggaccatcactgtcttcggagttgaactaaaaatagtggagcgtggccagtctacacggacaccagccatcctcttgtttcgtgtttgctaaatgctgtgctcagcacttttctgcattattttattttattttcccaagaactctgcgtgggcagccactcttcttatcccccgtttcaagaacttactcacggaggacctgctcaagggggacttgcacgcagctcagtgggggcagagctgggactcggagcagggcccacctacctcctggtccgtgctcttaccctgcaggctgagccgctgcagtgtggctcgtccagcagggcctcatgctttcgggtgatgcctaacagccattccccctcctcctcattaacagagctccagccccacgggatgaatagagatgggcctaagctggtcctaccaaccccctgctcttttgccagtgattgatctagagtgcctatgtcaccctcacccaggtctgccagtgaaatgtagcgggggggatttctggagggcatttgctcttgctcactgcactgttacgtgagggggtgatgcttggagctgtggcagctcctttgtgcccatgagaagcagtagccctaatactagggtgagcagaaatccgtttgacttccttcaatacaggactttcagcaccaaaactgggaaagtactaagcaaatcagtatgattggtcaccttaaattgatgacacgggaagatagaaacttgggcccttgtcaagatgctaacctctggactttttttattttttattttttgagacagagttttgctcttgtagtccaggctggagcgcaatggcgtgatctcggctcactgtaacttccgcctcctgggttcatgcaattctgctgcctcagcctcccgagtagctgtgatcataggcacgtgccaccacacccaggtaatttttgtatttttagtagagacagtgtttcatcatgttggccaggctggtctcatactcctgacctcagatgatccacccacccagcctcccaaagtgctgggattacaggcatgaaccaccatgcccagcctggacgttttgttatgtaaacaatgactgtcttttttttttttttttttttttgagacagagtctcgctccgtcacccaggctggagtgcagtggcctgatctcagctcactgcaacctctgcctcctgggttcaagtgattctcctgcctcagcctcccaagtagctgggattacaggcgtgcaccaccatgcctggctaagttttgtatttttagtagagatggggtttcgccatgttggccaggctggtcttcacccctgacctcaggtgatccacccacctcggcctcccaaagtgttgggattacaggtgtgagccacctcgcctggccacaatgactgtctttatggttgaactcttcgtttcttgcggctgaaatcacaggggtgagacttgctggcctcccatgccctgtcaccccttgcgtttatgctgttccagtcccggagcccctggcccccaggtctgccatggatactgtgtccatccagccaggcgcctccctaaggccacctcctcctcaggggcttcccaggtgtcccagcagccaggggcaggcgtgccccggggttactccttttttctgacgtgtctcatgccctgcctttgtcatgggtcgctgggcaatcactgcttctcttctcgcctgtcccctccaccttcctgttcccccacaaactgtgagcccatagggagcagagagtacggcttcctgtatctttccctcatcccagcctcatggatcacatggagagcaggccacagactcagtttaaccagtctgctacatgtcttctctgggccaggaaacgaggtcaggcctcctcattccttcctgggccggcgggctcccttcacctcatcctgttcctgggttattcgcttctgacgcgaggccctagggccaccccagctccacatcggcctgtcttctctgcgccctgtggctgactcagccctgaatcacctcttccaccccaggtcctcttcccgggagaagctccaccatgggtgccatttctccttgtcccaggcttttcttgcctctggggactccaagcccttctccgggggatttcacccagctgctgtatatgactctctgtcccctctctgggccttagtcttctcctctggtaaaaaaggattcaccttgatgctatctaagtccctcgaatgagactctggggacaggaagtatttcagtcgatgtcgtcatgttgccagcttcacggggaccaaccaatgggcaggggaaggaaggagggccacgccagtgtgtctcttgtcctggctaggcatagggtcccaagccagagttggggacaagctgaccaagcaaacctcttggggtggctgctcctttcccagggaatccatgcgagagggtggccagggtctgcaggcaatgccaccgggccactgtggatgggagccagtggacttccaggaagggaagctaaagataccctcttcccggcatagcccagaaaggaccgggatctagttccctgtcctgttgtctctgggggcaggggtggtgaccctgagggccctggagcagctatgtggggctgggcacttctgggggctggagtctgggaccgggcatctattggccgagactctggaccggtgggcgagggcagggcagggtgggtgaattactggaagccccactggctctgtctctctgccaagctgcccactgcattctttggcctcctatttccaggcagtgtctgggatgggtcccaggcctggcctgccctgcaccggggagtccgtgtttggagtcaactgagctactgcttagggcggcagctgaggtgggtgggtgcagcttggacatgatgctatcagggacgctgggtacctggaacaaggaccgcctctccctagtgccatcctgggagctcaggtgacctgggagggaagggacatgtgtgagtgcctgtgtgtgcgcaagcgttcattgtggggggtgtgcacgtgcgtgtgcacacgctagcataggtggctgcgttgagacgaggggtcacaggcccgcatgtgcccgagtgtcctaggatgtgtgggtgagtgcaaaccttgggcaggccctgtcttctctagacatccccgtctggtggggtggccagaggggtggcatgggcagtttgggtctggatccctaacccacaacctgccccagggcagctgcccagagtgcttatgccagaacatctccaaggccgccagacgttgggatcgcatgtgccactgcattggctgtccccacccccatccccacgcctctgcccagggactgtagggtcggcgagaagcaaaggcgtgcccccatgcactctggtggctgcaccatggacactgaggttgatgcctggggttttcttagttttttttttaatttttaaaatttaattttttatttacttatatttttattctattatatttttatttaattatttgtttttatttaattatttttactgtgctcaaatatacataacataaaatctaccattttatcacatttatttatttatttatttgagacagagttttgctcttgttgcccaggctggagtgtagtggcatgatcttggctcctgggttcaagagattctcctgcctcagcctcccaagtagctgagattacaggcgcttgccaccatgcccagctaatttttgaatttttagtaaagacagggtttcaccatgttggccaggctggtcttgaacccctgagctcaagtgatccacctgcctcggcctcccaaagtgctgggattacaggcatgacccactgcgcctggccgtttgtttttgaggtggagtcttgctctgttgcccaggctggagtgaagtggcatgatctcagctcactgcaacctctgcctcccaggctcaagcgattctcctgcctcagcctcccaagcagctgggattacaggcacccaccaccacacctggttaatttttgtagttttagtagagatggggtttcaccatgttggccaggctggtctcgaacttctgacctcaagtgatcctcctgtctcggcctcccaaagtgctgggattacaggtgagagccaccacacctggccccatttttaccacttttaaacgtacagttctgtgacattaagcacattcccattgttgtgcaaccatcactatgacccatctccagagtgctttcatcttcccaagtgaacgtctgttcccattaaacaccaatgccccattccccctgcccccagcccctgcccccaccaatctgctttctgtccccacgaatctgactgcgctagggacctcctgtcagcagagtcacacggcatttgtgcacggcatttgtccttttctgctgggcttatggcaatcagcacagcgtccccagggctcacccatgctgcagcctgtgcctgggtttctctcccttccagggccggctgctcctccgtgtgagtttctccgtgtcgtttccccactgatccgcaggtggacacctgggctgcaccttctggctgcagtgaggagcctagatgttaagcctggcactggacagtggtgggcacctgggcacgtgatgggaccccctgagtctcactttcttcaactatggggcaggatctgtaacggttctggtggttttatttatttatttatttattttgagacagcgtctcgctctatcgcccaggctggagtgcagtggcgtgaactgggctctctgcaacctctgcctcctgggttcacaccattctcctgcctcagcctcctgagtagctgggaccataggcgcgcaccacgcccggctaatttttttgtatttttagtagagacagggtttcactgtgttagccaggatggtctcgatctcctgacctcgtgatctgcctgcctcggcctcccaaagtgctgggattacaggcgtgagccaccgtgcccagccacggttctggtgtttaagtgaggtcaggcatcctctgggaggtcagccgtcgtattgggttccaggcccgtgactactcacgggaggagtgagctgggccactgactccgtctctcacaagcctggaactggggagcaggagaatccctcacctcgtggggctgtggtggggacacttgtgtgggatgcagccagctcaggataggggcagcgaggaccaggcacgagtgggaggagcggggccctcagggctctgtagggttcttgactttttctcgcttctgtggcctcctcctatctccttccctagggccccacctggccttccgaatcctctcacggggcatatcagatctaccccagctgcctgaccgggagagcatcctgttcttcccctctggaattccgggtccacagctgtcttcctactcacatctggcctcggcattcccgccaagccctccccttgaagcacaaggatgttttgtccaggatcctgagcccagggccttccaggtggcagagagagatccggatgtccagccagctctgggggttcccccatcctgccagtgtggggacctccttgctgtagccaggtcaggccagccctagggagacagcaggatggttccaggaagcctgggccgctccccagatcaatgcagggacggacagcagccagcaggctgggccacggcatcagagctggggtcaagaggtttctagccctcttgtggctctcagccccgggtcctggctgcttcctgctgggcagtgacctccccagtccatttccctccctccttcctcccctggcctgagctcagctcatggaaggaggccctgtgtgcaggaaccttgatctgcacctctgaaggatgtcagggcagctttttctctgggcctgtatgactcagcgcaggatttagggcaggtggctccaccgtggagcctcagtttcctcatctggatgatgtgggtggacaatacccagtgcaggatccgtccaggcttacatgagacagcaatatagaagcctagctgatcacggcccccaacacaccttaaccccttcccactccccagctccccatctctagaccgagggagccaattaggctctcccgcagcaacaggtggtgagatagaagcttcgaggtggaggtaaagagtgaggactgtgcagcaatgaggagtggcccagatgggtctccctcccttcctgtgccacttctgcaggccccagtgcctgaggggtccagggccctatttggagagctccatggtggaggaggctgctcctccttcctgtggaccactccctgtcccaggggctgctgaccctgcttcactgcctggtggtggatgacgaggtcattatgagattagcacacactccaacgctgggtggagaaactagggtgggagccgagatcttctccagctagttcatgccctgaacaacatgagaaggaagctggggatggtctcacactttgagcttctcccacctgtcaaggttccctgtcttccttccagagccctcttccagcccctgcagcctctgtccccactgccatcccttgtgtggtgaccagtctccaagatggccccccagatccttgtctctggtattcatgcccttgggtagcccctcccacaccgaatcaggcagattcacatgacttcaggtctagggcataaagcatcgcctcttccatctggtctttcagctcagatactctgggggaagccagtcactattccacgaggaagttcaactaccccacggagaagctcatgtaaagaggaactgaggccaccagccaacagctgcatgaatgagccaccttagaagcgatcctccagccccagtcaagccttcagatgactgcagctctgaccaccatctcactgcagcctcatgagagacctcaggccagaaccacccagccaaaccactcttgaattcctgacccaccaaaactgtgagaggtaataaatgattattgctttaaatgaccaggttttggggtgaactgtaatatagccaaagtaaccagaataccttgggaaattgtaccccgactcattgagaaaggcatcccggtgtgtctcctctctgaaagctcagtcctctgcaggctgctgtgttagttttctatgctgtgcaacacattatcacgcactcaggaactaagacaacacgcacatttactatatcacaatttcttcaggtcagaagtctggaaactggctgggcatagtggcttatgcctgtaatgcaagcactttgggaggccaagggaggaggattgcttggggccaggagttcaaggccagcctgggcaacatggtgagactacacctctacaaaaaaaaaaagaaaagaaaaaattagttgggcatggtggtgtgtgcctgcagtcccagttaggaggctgaggccaggggatcacttgagcctaagagttcgaggttgcagtgagcagtgattgtgtcactgcactccagcctgagtgacgacagcctgagtgacagagtgagactctgactcttaaaaaaaagttaaaaaaaaaaaaaaaggataagtctggaaactgctttactgcatcctctgtttcagatctcctcaggttgcaaacaaggtgtcagctgggctgggttctcatctggaggctcaaccgaggaaggctctgcttccagagccatgctagttattgtcagatttcatattcttgctgctgtgtgcctaagggcctgaggtttttgctggctggaggctggagaccacctgcagttcctagaggctgccagcacttcctcacctcatgggcttcctcaatgtggctgcctactccaccaagccaatgaggaggatctcagtccagtcagctaagttggagtcttttctaatgtaatgtaatcatgagagtgatgtcatcatctttgccgtgttctattggctagaagaaactcctaggctttgcctacatgcccagaggagcttacccaagggtgactgcttgcagtcattttaaggtatgtccacagttactgatgggggttttctttggccagagccttgctggctctaaagagggagagggtctctgcctcatgactgggtgccccatgacatgcatttcctgatctccatccagttttctacagcagtgagagctaagaagactggtttcccaacaattaggcttttttcccagttaagatggaatagtcccatttgaatcatgcacgtttgttggttaacatgattctaacccaattcctacaaaataatgactctggtaccacaattgagcttactgtgtgccagacaccaaattaggtacttaaaaaaaattgagatgcaattccattacgttgccctggctggtcttgaactcctgggttcaagtgattctccagcctcagcctccctagtagctgggattacaggtgagcgccaccatgcccggcctaattagggactttaattcattatcttatttaagaatcacaacagccttatgagtaggtattattattttcagggaatattccttctgaggcacggaacacacaagtgaagtgtccaaggtcagctaatagctgtcagccagggctttttgaagccagtgtaaactgcccgaagcaattagcaggaggttgtatcactggctcccatgcagaaacacaaaggcttagagctgggcctcaggcacagttggatctagattcaccagtgatgtcacctggaaactgtccctctccatctcccaggtcggctttcctctgccatagcttcgccctcaggcaggctctctctagcggtagcagaaatggctgcagccagctccaggaaaaggccggggctggatggccttggcctggttgggtcttgtcccaaccgggtctggaccaactagggtgtgcatgcggtgtttgaccagccctgagcaggtcaggcccatcgctgagccacatacagcaagagtgatgaaggggtagaatccaagatgcttccacaaagagaagagaaagtgggtgctgagcaggcaacagcactggatggcagcctggggacagaactagattccaatccagttccatctgactccagggtgctgctgtcagtcactgtgctgagaagagtcccgggtgtggccaggacctgtactgggtgccaaactcactcccaggcgagtccttcccggaaggggggcaccgtgaaggcacaggccctctgtagaaaataggacacgggcgggggaacagcttgcttcttttttttttttttttttttttttttttagagataggatctcactctgtcatccaggccagagtgcagtggcatgatcatacctcactgctccctggaactccagggctcaagtgatcctcccatctcaggtttccaagtggctgggactataggtgcagcacgtcaccatgcctggctaattttcttttcttttctttttttttttttgagaccgagttttgctcttctcgtccaggctggagtgcaatggtgtgatctccactaactgcaacctccacctcccgggttcaaacaattctcctgcctcagcctcccaagtagctgggattacaggcacccaccaccatgcccagctaattattgtatttttagtagagacaggttttcaccatgttagccaggctggtcttgaactcctgacctcaagtgatccacctgccttggcctcccaaagtgctgggattacaagcatgagccaccacacccaacctttttttagagacagggtctcactctgttgcccaggctggcctcgaactcctgggctccagcgatcctcccaccttgacctcccacaatgctgggattacagcatgagcgtgagtcaccgtgtccggcctgaggggcagctttctttccatgctagggagagtagagcagctgagttaagaatggcttctgttaccagcttttccatgaccagcagttattgcttgggaggatttgggatgcttcttgttgcaggatttaatccctgcagcagccctggcaggtaggaaacatcaccacccccatcaggagggaagctcgaggctcaaagtcctccagacccaggagtcatgggtcttaatccctcacttagagaggagagaactgagggccagggaggggaatgacccctgagcttcctgtccctgtcctgggtacctctggtctcacctccagtctcctttgattgacattgtatttttagatgggtaatacattcatatggttcaaaattcagtcgtgaaaagagtttactgagaaatgtctgtctttgcgatcggccgaataatgggcccccaaaggtgcccatgtcccgattcctggaacctgtgactatgtcaccttatatggcaaaagggactttgcaaatgtgatgaagcttaggctcttgagatgggagattatcctggatcatctgggtgggccctaaatgtaatcacaggggtccttctaagaaggaggtctgagagatccctgcctgctgactttgaaggtggagggagagtgtcttagcatgagctgccagaacaaaattccacactgggggctgaaacaacagacacttatttctcaccattctggaggctgggaagttcaaggtcaaggttgtggctgactcagttccccgtgaagtttctcttcttgacttgcagagttgccttctttttattttttttttcaattatttatttatttatttattttttgagacagagtcttgctctgttacccaggctggaatgcagtggtgcgatcttggctcactataacatttgccttcctgattcaagcgagtctcccgcctcagcctcccgagtagctgtgattacaggcatgcgccataacgcccggctaatttttgtagttttagtagagacggagtttcaccacgttggccaggctgatctcgaactcctgacctcaagtgacccgcccaccttggcctcccaaagtgctgggattataggcctgagccaccatgcccagcctttattttttactttttgagacagggtctccttctgttgcttaggctggagtgcagtggcacaatcacagcttactgcagcctccacctcctgggctcaagcaatcctcttgcctcagcctctgaagtagctgggaccacgggcacacaccagcacacccagctaattttcttattttttgtacagatgagggtctcactatggtgcccaggtcgttctggcctcaagacatcctcctgcctcagcctcaagaattgctggaattataaacatgagccactgcacttggctcacaaatcgttttttaaaatgtatgtttccaggccggacacagtggcttacgcctgtaatcccagcactttaggaggccagggtgagaggccgaggtgggcggatcacctgaggtcagcctggccaacgtagtgaaaccccatctctactaaaaaaaaaaaaaaaaatgcaaaaattagctgggcgtggtggtgggcacctgtcatcccagctactcgggaggctgaggtaggagaattgcttaaacccagagacagaggttgcagtgagccgagatcgtgccacactgcactccagcctgggtgacacaagactccatctcaaaaaaaaaaaaaaaaaagtacgtttcctagcatattttatggacatgaaagcaaatgcttgcatatacatatacactttcttctttctttctttctttttttttttttttttgagatggagtctcgctctgtcgcccaggctagagtgcagtggtacaatctcggctcactgcaacttccaccttctgggttcaagtgattctcctgcctcagcctcctgagtgagtaggtaggattataggtgcataccaccacacctggctaatttttatatttttttagtagagatggggtttcactatgttggccaggctggtctcaagctactgacctcaggtgatccgcccacctcagcctcccaaagtgcggggattacaggcataagccaccacgccccgccaaactttcttctttctacccccatacaaatcatagcatgccatacacactcttccgcaccttgatttttatcccttaatatgtattagactgtcagactgtcctctatcagccttgaaagggctctcgctctctcccttccagtgttcctttggacagatgcgccagcacctatgtgccccattgctgcattttgcactgtgtacctgtcagggttctgtgcaaggcgaatccacctcaggtggttcaagccaaaagggattttaacataaggaatcaggaattcataaaatcattggaaaagattcatgggcttgagaaaaacaatcactgggagagatggaaggtcaaagctttctggggtaaggccacgcctccaccacagtccccgatcctccccactcccacacccacaaatcaggcactgagatggcagaatgggaaatggagccactgccaaccagtgcttctgctggaacccactttcatacccatgcagctgcagaaagacaagagtctgtcttccttccactttccaatcccacaagaacgcattgatttgcagagagaaagtcacatctagagagaacctgggaaagagtttctagctttcccactgctgtggtctgaatgtaacccccatcataactccatgcaatagtgttaagaggtgggttctttgggaggtgattaggtcaggagagcttctccctcgtgaatgggattaagacctttataaaagaggctttgaaggctggacgtggtggctcacgcctataatcccagcactttgggaggctaaggctggcagatcacctgaggtcaggagttcaagaccagcctggtcaacatggcgagacccgtctctattaaaaatacaaaaagttagctgggtgtggtggcccaggcctgcaatctcagctactcggaaggctgaggcaggagaatcacttgaacctgagaggcagaggttgcagtgagctgagatggcgccactgcgctccagcctgggtgacacagggcgaggctctgtcgaaagaaagaaagagagagagagagagagaaagaaagaaagaaagaaagaaaggctttgtagagtgttcaattcagctcattttttgcccttccatcccttctgccctgtaaggatgcagtgttcattctctccggagggtgcagcaccaagtcaccatcttggaagcagagagcagccctcaccaataccaaacctgccagcaccatgatcttggacttctcagcctccagaactgtgagaaatacatttctgttctttgaaaattacccagtctaggtattttgctaaagcagcatgaatggaccaagacaccaaccatctaaaaaaaagattaaaggagctgattccaccagccagcatcttgctgatcttccacaccatggcataaaaagcagcaagagctttcacctaatgctatacaactgtgccccaaacacacacacacacacacacacacacacacaccctctccccagaatgaaaaacctgatgttctgatcagtcactctccagctgtgggtggtgctcactcctcttctgggcagaaatcccatgagattaattaaagtcacccatccccagggcccccagaggcataagtatcatttgcaatatagatttttccaatagtgccctcttggaattgtgcagtgtgcagcctggacaacattatgtggtgaccctgggtcctatactttatgtagaatagtaaggaaaaaaaaagagggaaaaaaggaaattagttaacataaacaaaaatgaacaggataaaggggaaaggtgtatggtggtccctcactctgccatagtttctactgataacttcctccttccaccatctagccataatccctcccccttggccagcacctcatatggtcgtggttctacctggggtaaccccatctgtatataatacagccgtcccgctgcaggccaggtcgtgaaccaagcttgcaataggagatacccgtgacacagcccctgcccttgagaggagtctcaggcagtaacaaacacaggccactggctgggcatggtggctcatgcctgtaatcccagcactttgggaggccaaggcgggcggatcatttgaggtcaggagttcgagaccagcctggccaacatggtgaaccctcatctctacaaaaaatacaaaaattagctaggtgtgttggcgcgcgcctgtagtcccagctacttgggaggctgaggtggaagaatcacttgaacccgggaggtggaggttgcagtgagccgagatggcaccactgcactccaacctgggtgacatagcaagactctgccaaaaaaaaaaaaaaaaaaaaaaaaagctgggggaagggtgagcgtagaaaatagttgtagttaagagacggggttggctggttcagcttccaaagtctaggatttggtatctgatagtaagagcagtggccaatgcgggggtctccaggcagggccctaagcaccgcgccaggttaatgctcctcgcagctcttgggcaggactgactgttggaggcttgtccagcagagacaggaatgaggggaccgaggacccaggcatgatggggcgggggcgcggggacctgcagcccagcgggctcggacgacctcggacccccgccgctccacgggcaggaagggagcccggagcggcgcgggtgcgcattgatcgtggtgcggatgcagccgctgcggcgcggccccggcttctctgcgagcccgtgcccgggccgggctgtcgggaactcggcccggctccacttgctcgcgcttactggaaacgtgctcccgagcggcgcaaggctcggcggctggagcccggggcggcccttggccgagggcagggccgagccaggtgctcgggcgccccaggctgccgcgccctgctgggccaccctgggcgcgtgccacccccggggacccgtcccgtcctgagggcgcccagggcctcccagcgccgctctccccagggtgagcgggaggagggagggagctgggggcagcccggggaagccgtggggcgggctttcagcagctgcgaggcgaacccgcctcccttcccggtattctcgcggccacccggtggaaggtggcgccacgccagggccaggcggaggcggggagccaagcccgcagccacgccctgcccagggcgcaggtgggctcggctggaggaggtgctgggggtgggtgtgtctcctgacacaggaagagctgcctcctggctgccccagtcacagaaatgtttattgagcacctactaggcaaggtgcgaccactgcagtgggggtgggggcacttttctccccgggcgtgtatatttatttatttataaaccataggcactttattactgggtttatatattatgtatccatagaagttgagatttaaagaggatgaattaaaaaatagaaacagaggggttgttttcctttccgtatgccagtgagttgtcttatacatgtcccactttggagacctgggtttagtggctgtatcctgctgggcgcccccctccccagagctggagacaaaacccccacccgccccctggttcacgtcatcctgcctcatgaggcccagggctgagctgttttcggggccctggtctcggcttcacagcctgcagtggagtgtagcagatggcagactagggtaagtgaggatgccttgagatctgggttcaaatcttgcgtctgctgctccctggcccagtgacctcgcacctctctgagcctcagtttcttcttctgtaaaataaagggagtggcatctccctcttgcccggaggtgggcctgggggctgcaggctgccctcctgatctgctctgctgccagatgggcacagataggcggggggatgacagccctgagtgaacccagaaggcaaagtggttaggaacacaccccagaggccaggcagggtcctgcagggtcctgcagattcagagaaagaacccatttatcctggggtttggcagagattatggttccggtaaagggtggtcattagtaaagtccatgtcatgcagccgagggcctgtgggaaaggtagggttcaaggaggagttagtgggagaggagagtgaggaatcagagttggtcagtcagacagtcagtcaacaaacacaaactgagcatggcctctgtgccaggcatggttttaggctgtggataaccaaggagcttgctcagcagcctggggttctttgcagcccagggtgtccctgtcaggagtgggcactgtgtctctgaggagcagtggagtcacctgcaggccaaggctgggaaaccctcaggagtgtgggggaggccaccccctgaggtgtggtccccccctgggtagagagtgactcaggccccgcccagcctccccactgcctgggtttggtttgtttaagaacaaattagtcacagagcaggcagctttcccgaaaataaaatgagaatccccaggaaacagggaaaatggaaggcgggcggtgagtcagcacgtgctgccccccggggctccagtttccaaaagggcctcctgccctgctcctcctcctcctcctgggtctctctctttctcttttacttttcctctggtcccctgttgactttttccctcaccgaactcactgaatctcagtcctcacacacgcgcacccactcacttcctgccccttatcgtttccctccctgcatctgtctgtctgtccagcctcgatctgtgcacccactggctcctttggtgtttacagagcacctaccaagtccaggcactgtgcaccacgggagggagtggggaggcagagaaggcctaggtctctcctcccagagccctttcttgttggaaaaggagacttgtgccgggatgtggccagccacggccgcgcctgggtccccttccccagcccctgctcctgtggttggttcccccggatggacagagctgggcccccaacagagaacgatgcttgaggatcccattccaagccaatgccgtctctgcctccctcccggctcggagcacaaggcctgcacgctgagggcgagtgcgtggtggagcaggagcttcggggcggtgtttctcacccagccatgtctcccctgcccagaaccgggcatcaaggggagtgaactgcgggctgttttgaatttgagggacaagcttggttgtcccttgttccctgcctccccattccaagcctcctgtggcagaaggaggccaggccatatcttgagggaggattctgggcgtgcctgcttcaccccaacagcccaaggtcaggggaggggctccaggccgcagggggtacagcaaggggaagccactcaggccccttcccatctggacaagtccctgagtgccagggccctttgactctctcctgtctccctcctcccccatctcccagctagaatccaggctctcccaccaccctctgggacccctggggccgctcactttccagacccctctaattcgggcactggcccctcaggagccggggaggtggccctgtgcctgggtcatggggctgggctggggtctcctgcctctcgggtcactgtccaatctctgtctgcagctctcgatgaataatttagttgttcgaattacaggaaagagctatttagcttcccttcccaaatcgttaagagctgatgatacaagacgtcttggttccttctaaggaaagtccctttcccagtgaaactgagccttgtgggcggggatttctccccctccaactccctcaccaatcattaaccaatatccgacagtaatagggttttttcttttttcttttttttttttaagctcagctatatatattctaaagtatatgtcagttcttgggagcagggaagtataactgatctgaagggtggggtgggggttctgctctggaaggagccttgggtgagctaatggtgaccccaagtcataattgcaggtccctggaggggatttaagatataggaagtagcacttcgcaagcctgagaggaagaagcatggggtgtaaaactgttcaggtggttcaagagtgcgtgtgcgtgtgtgcatgtgagtgtgcatgtgtgtgtgagaatgtgaatatgcacatgtatgcgtgtgcacgagggcgcacacgtgtatgcacagatgcacacgcatacctgtgtgattgtgcatgtgtgcgctgtgcatgtacatatgtgcgtatgtgtgcacgtgtgtgagtgtgtacgtgtttataggagcatgactgcctgagcggcatggctggaatgtgtggaccgggaccaggtgggggtttgcagtgcagggacagcacttcttgttttcagagctgggagagttggggtggggaatctgggtagggctggcctcccagtcaggtgacttgcaggcagggaggggaggggctttaggaagttcagagagtgggagggaggaacagggaagggcaagggtggggaccttggctggaaggttcaatgcaaagtgaggcgacatccaggattgagcattctggatcctagacccagggatggctgggaggtggggctcccctgggtgaaggagccaggtgggtgtgtgagccaagagttagctgtggctgccagaggagggggctggagacgaggctgccagcctcagcctggctgaagaggacctcccagcaccaggccaggggaaggtggacaggtagggagagaaaaaggagggaaggaatgaggactgagctagcaggtcccacactttgcaggtgtggtgaggaggagagagggaagaagggggaccctctgcagtcctggctggcaggaagcttggcctgtgctctggcaagcacaccctgccctgctggactcactggaggagtctgttctctgtgtgcccggcagagggatagacacgcatttcccacgacgtcacccaccccagaaccacttagcctgcagcctcccccagattccctgacttcccacctgagcaagcccagctggcctcccgcatccactcaggtgccctccgtgtgttgtcttccggacaggggcacccaacacaggtgcaagcagtgcgtgctagggccggagaggaggacagtggaggctgctcccagcctcctttttcttccgtactcccaccagcacctccaccccacctctgaaactccaccccaattctggggagtgtggagatgactgaggaaggggggatatttccagagccactccaactggtcccagatgcatcagagggtgaccctgggaggccagtccttaggcagctgcctaaggacccgactctggaagggaactcagagacaaatgaggagcagaccagccccagctccgggtttgcagatctgggcagagtgaggaaaaggccgggaaagaaaaaccaacccccggaatctatctcagagaagcatccgtccaggtagagagggaccccagcccgaccgccaccctcacccaggggagaagcctagcagctccctctgggttgggtgtgcatgtgtcatcccaccaaagtgtgctgggattggaatgggcacgaccttcccccagagagatcgcctgggcagccccgtaagtgtccaggggtcccctgagagcattctatggtcccagcctcccacaggagccccaacaatgctctctggctcctcatcctccttggtggcagctcctctccccaccaaagggccatgtgggtcccagctgtgacctcagcacccctcagccagatgtggacccgccccagactccatcactctctctgctctcttcacagaagagaggtggagggaggaccccacgggcctcgctggtggcaggcggtggggatgtagcgggggagtgtgtggggggggttagagttaggacagcagcccctccccaaaccccgatccctgagccccaagcctgtcttggctccatggggcaagggaggggtagtcaagccccacagaagagaggcatcccccagtttccatggagaaggatcggggtgtcctgatttggaggcttccatgctgtctgctgctccctgtggatacacagttggggcgctctctgttcctccctagtcccttctctcctccctgcttgcctgggaggcttgggcaggagggcacctggatggtggccactagacagagcccaccccccgccgcttgacctctgccctctcctgggtgggaatggcagggccctctttggtgtcaggagctggtggcctctgtggcctctgtcccgcccgctcccaacacctgccttcccttctctgctccagctgcagtcggcttctgccaatgcccagaaccttgtagtcttttgcccgctggttttgcatgtgcttcccctaggccagagggcagcaaactttctctgaaaagggccaggtagtaaatatttcagcctctgcttagtgaggaagcagccatggaccactcacgaacaagtgagtatggctgtgttccaacacaactgcgtacgcacactgcaacttgaattccgtgtgattttcacatcatgaaatattcttttttcttttgcttggtttttcaaccacttaaaaatgtaaaaaccagccaggcacagtggtttacgtctgtaatcccagcactttgggaggccaaggcgggaggatcacttgagcccaggagttcaagatcagcctgggaaacacagtgggattccgtctttacaaaaaatgaagaaattagtcaggcatggtggtgcacacctgtggtccaagctagtcaaggaggctgaggcaagaggaccccttgagcccaggaggtcaaggcagcagtgagccatgatcacaccactgcgctgcagcctgggcaacagagcgggaacctgtctcaaaaaaataattaaaattaaaattaaaacatgtaggccgagtgcggtggctcacacctgtaatcccagcactttgggaggccgggatgggcagatcatttgaggccaggagttcgagaccagtctggccaacatggtgaaaccctgtctctactaaaaatagaaaaaaaattagccagatgtggtggcacacgcctatagtcccagctacttgggagactgaggcatgagaatcacttggactcagaggcagaggttgcagtcagctgagatcgcaccactgcactccagcctgggcaacagagtgagaccctgtctcaaaaaaaaaaaagaaactaaaacgtgtaaaaaccattttttttttagtggaatcttgctctgttgcccaggctggcgtgcagtggcacagtctcggctcaccacaacttccacctcccggggtcaagccattctcctgcctcagcctcagcctcccgagtagctgggattacaggcacgcaccacgatgccgggctaatttttatatttttgaatagagatggggtttcaccatgttggccaggctggttttgaactcctgacctcgtgatccacccacctcggcctcccaaagtgctgggattacaggtgtaagccaccgcgccaggcctgtaaaaaccattttttgcgggctgaacaaaaacaggcagcacgttggatttagcctgggggcagtggtggaggtttgctgacccctgtactaggctgctccattggggaactctctcaaggttcagcggaagcctcccttcccggaccaggtgagatgccccataagacctgtactgcctctcttctggcaggccgcctagcaccctaggtgctcaacaacagtttgttttgttttgagacagggtctcactccgtcacccaggctggagtgacagaccacgtcttactgcagccttgacctcccaggcccaagcaatcctccggccctagcctcccaagtagctgggactacaggcaggcaccaccacacctggcaaattttttctatgttttctttttttttttttttctgagacagtgtcttgctctgtcacccaggctggagtgcagtggcgtgatctcggctcaccgcaacctccccctcccagtttcaagcaattctcctgcctcagcctcccaagtagctgggattacaggcacgagccaccatgcctagctaatttttgtatttttggtagagacggggtttcaccattttggtctggctggtctcaaactcctgacctcaagtgatccacccgcctcggcctcccaaaatgctgggattacaggcgtgagccactgtgcccagcccttattttttctattttttacagagatgaggtctcacttgttgcccaggatggtcttgaactcctgggctcaagcaatcctcctgcctcagcctcccgaagttctgggattgcaggtgtgagccactgcacctggcctactagtttgttgattaaaggtgcttcctacacattgtctcctttgatcttcacaatgtctgagcaaagcatagcaattatccccatccctgtttttgttttgttttgttttgttttgtttgagacagagtctcgctctgttgtccaggctggagtgcactggcaccatctcagctcactgcaacctccgcctcccaattctcctgccccagcctcctgagtagctgggactacaggagtgcaccaccacgcctggctaatttttctgtttttagtagagacggtttcactgtgttggccaggctggtctcgaactcctaacctcaggtgatccacccaccttggcctcccaaagtgctgagatttcaggcgtgagcccccacaccaggcatattattcccattttttaaatttatttttatttatttatttattttgagatggagtcttgctctgttgcccaggctggagtgcagtgtcgtgatcacggctcactgcaagctctgcctcctgggttcaagtgattctcctgcctcagcctccaaagtagctgggactataggcgcctgccaccacgcccggctaattttttgtattttttttagtagagacggggtttcaccatgttagccaggatggtctcgatctcctgaccttgtgatccgccaacctcggtctcccaaagtgctgggattacaggcatgagccaccgtgcccggcctattattcccattttatagacaaggtagttgaagtctagagaggttaagcaacttgtccaatgtcaccccgctggctgaggcagaggcacaaagggagtccgcacactgttttccgggcagctgggcagctggagagcctggcctctgtccactggtccagggctttaggggatgagaccgggctgttccaggggtccagggagcccagcctgcctccatccctggtctcaggcttgcttgggaactgacgggggtgctccttgacctccatccaccgaaaggcccctgcccttctgtggagcagcattctttacgagtcatttctaggactgggcttatgactcctggtcttcagggattgagtcctgccttctcagtcatcccaggtcagggctagagttagtgactctgattctgtagtccctggcccacccttcctgagccttcctttggagccatcacttagcccagctggggccagtaactgctctctcccctgccccacccccagctgtggacatgtccccatggtctcagcctcttctcagccctgctccactcagcctccagccagaccatctctgccaggccttcatctccccatgcgtcagaggaggatgactgcccggcaccctcccactcccagcgtcagcctgggaattggggcgtgctcctgggctgggcctgatgtacacggtgtgcagctgtgggctccctcccaatcacggggtatctcaggaggtttctgaggttggggatgggggtggccctctcctttggatttgaggcagtggccccaggaccagcggggtcactcggctcagcactcccttccagttctttcccacagaacatcctggcttcagggattcccatcacgcggccagagttcatcggaagtccccctccctcatcccctggagggaggaaacagaccaggtcatctggctgagcgggaggagaaggctcgggttctggggaggggagcctgggtgcggcagggtccagggacagttggcatgggcgtaagtgcaggtatagaattccacatagggcctcacagctttgggggccatgagatgacagcgtcaccaatatcagtgatcatcacctcccatccagaggccgaagaagcagggccctgccacaggcagccaggctggctctgctgggggaacaggcagaagaattacaaggaaccagatgtggttcttttttttttttttttttttttttaagatgaagtcttgctcttgttgcccaggctggagtataatggcacacgatcttggctcactgcaacctctgactccctctgactcctgggttcaagcgattctcctgcctcagcctcccgagtagctgggattacaggcacccgccaccacacccagctaatttttgtatttttggtagagacggggttcgccacgttggccaggctggtctcgaactcctgacctcatgatccgcctgcctcggcctcctaaagtgctgggattacaggcatgagctgccgtgcccggctccagatgttgttctttagaagaggccccaaagccctcttctctctccttcctgtgactgcagctgaactgcccagggtctccagccagtgaaagccaatgtggtcatgctggcccctcctgaaggcctcactctatgggcaaaagcagccctctggtatcagtcatatgcagagccacctgccagctgtcaccaggaggatggggacatgtttcctaggctgggggcaggggcaatgctgaacacttgcagagcaagtaggaaggaaagagggagagtggaaggaaggaaggaagggagggagggagggaggggagagagagagggaaggagagagggaggaaagatggatagaagggtagaggggggaaggaataaaataaagaagggagaaaggagagaggaaggaaggaggaagtgggagaggagggaaggagagaggagggacagggcgccactttgtgaggggaagccgggctgagaagcgccacttgtgtatttgcttatttctttgctctccggtggaatttctctgtcgtccccccacgtgcccttatctgtctccttgccatctccctggctctggccccagatccagctgggattggcagccctgtgcccacaggcccggttgccttggcaacgcccctttgttaggcaccagcatctgaaaatgtcaaactgtttccagtgggtcagacctgcctccctccctttttttccccttctcctttttcagttccagttgccactgcccaagttgcaaacttcctctgtctccatggggatggaggagggctgtctctctttttccgtcccaaacatctgtctctataaacagttgtgtgtgcggcacctcctcctcctgggcccgggcttcggggaggaagtgctttgttgatctggagggggtcggtttccttgctcctctctcggggctggccccggtgctggacggctgcagccgtggactccgggagctccaggcatgtggccagtactcatggctcctctggggccagtgtctggagagaagggcagaggttctgctcagtcatctggtagacctcagctttgctttgcttgctaggttgccttagagaggttactgaaagtctctgatacccctctgtgcggcggggatttgttgagtgggtaatgagctgatctacgcagagtgtcaggagcaattcctgggtctttgcgtcagaacactcctggagttcacgctcccagtgattctgcaccctacggtgaagatgccatgatcatactgcgatgatcagccccctttgggagaatgttcagactcagagaggttaatcggcccagggcttacagggacttggtggcagagacaagattccaccccaggaggcaagcccagacattttccaatccactgggacctctatcagaaccctgggccctcagtttgcaaactgaaaagcttagattcagtgacctccttcccagcttgaaacttctttatttcagggaagagggtggggcgagctaagaagctagaagcgttttgccgtgagccaaggaccaaggacgggaatgcacgatgtacgagcgaggagtcagggacggggactccgatggccgatgactcagacctgctttgcctggctgggggaactgggccatgggaagaacacaggactggccccggcccaggcccaacccccgcttggccacggcggagagcctgccccaggcccacctggccgaagcaccagcatcattccaggggcctcaccctgcctaactcccaagtccatgtccaacaccttttcctgtgtccacaattctcatgtggttcaaagacgtagatccattactgtttccagatgatcaaagcagctacctaattaacaaccgagtgaatgtccaagttagagctttggcgttggaacaggaagaactggatttgaatccagctctactaattagtggctgacttggatgggttaatctctctgacacttgtttatatcatcagtgaaatgagtggcagggtaacaggacccactggagatgatgcctacaaagtgctaggggttttgcgtggcaagtggcttcagaaacaaggaaagtaccactgttgcgattattcagttggctcaggcaggcggaggctgtgcttccacatcccacagggccctgtgtccccagagagcaggacacgtaggaatttgccatctcagtgcagtgcacaaggacagaagcaagggcagcaggggcagtcaggctgccggggcaaggggcaagcttctgtccaaagcagaaacactggctgggccttctttggtccagcaaacctggaccttggcaggaaaatgggtataacaacgacctcagctggcgcttgcgggaacccacgataggtgcagaccctcagaggtgcatggggtgtgactctccctccacctctgtccagaccccaacaatgggagagggtggcaggttttctgggtgggggataggaagccagcatccgagaacctgcccctggatggcaggaggctaggccacgtgaaagccgaggctccaagccccctgtgctggctccattgtcccatcagactcgacttacaaatcacaagtttcaatttgaaattcaatttcaaattttttttttttttcagatggagtctcgctctgtcacccaggctggagtacagtggcatgatttcagctcactgcaacctccgcttcccaggttcaagcgcttctcctgcctcagcctccagagtagctgggattaccggtacctgccaccatgcctgtctagtttttgtatttttagtagagagggggtttcaccatgttagccaggctggtcttgaactcctgacctcaggtgatccgcccaccttggcctcccaaagcgctgggattacaggcatgagccaccacgcctggccatatttttctttctctttttttatttttgagatggagtctcgctctgtcacccaggctggaatgcagtggcccaatcttggctcactgcaacctcctggtttcaagcgatcctcctgcctcagcctccaagtagctgggattacaggtgcccgccaccatgcccagctaatttttatatttttagtagagacagggtttcaccatattggccaagctggtcttgaacttccaacctcaagtgatctacctgcctcggcctcccaaagtgctgggattacaggcgtgagccactgtgctcagccaatttcaaatttttcaagataaaattaagaatttcacggccgggcctggtggctcatgcctgtaatgccagcactttgggaggccgaggtgggtggatcacgaggtcaggagttcgagaccagcctgaccaacatggtgaaaccccatctctactaaaaatacaaaaattaagctgggcgtggtggctcacgcctataatcccagcactttgggaggctgaggtgggtggatcatgaggtcaggagatcaagaccatcctggctaacacggtgaaaccccgtctctactaaaaatacaaaaacaattagccagaagtggtggcaggcgcctgtagtcccagctactcgggaggctgaggcaggagaatggcgtgaacccgggaggcggagcttgcagtgagccgagatcacaccactgcactccagcctgggcgacagagggagactccgtctcaaaaaaaaaaaaaaaaaaaattagccaggcgtggtggcgggcacctgtaatcccagctactcaggaggctgaagcaggagacttgcctgaatctgggaggcagaggttgcagtgagccgagatcgcacgactgcactccagcctgggcgacagggagacactctgtctcaccaaaaaaataaataaataaataataatttcaaggtgactgtagagcattaaacgcccaagcactgagtgtggggccctgcgtgacagccctgcccctgagtatctaatgtgtgcgttgacagccctgcccctgagtatctaatgtgtgcgtgacagccctgcccctgagtatctaatgtgactggctgttgtctcccgggatatcttccaagagacagaataacctggatctgaggataaatgccaggaggaagggagaatgtatccatggttcccatctccattagtcaaaggtacctctacagtgccttcacagcccaggcctcactgcgcctagcggctcctcagcgtttcaggctcagcagcagcagggacaccacaagtggccaggtacagcctggaacccctcccagggctggccctagaggcaggtaaagtgaggagcaccttagatggtgcataaaaagtgtccaatgcaagtgcctttcctgaggctgatcactgtacagtgattctgtaagaaaatgcccttatttttaggaaatgcacactaaggccaggcgcggtggctcacgcctgtaatcccagcactttgggaggccgaggtgggtggatcacttgaggcccagagttcaagaccagcctggccaacatggtgaaactccatctctactaaaaatacaaaaattagccgggtatggtggtgggtacctgtaatctcagctacataggaggctgaggcaggagaatcgcttgaacccaagaggtgaagttgcagtgagctgagatcgtacactgcactccaggctggcgacagagtgagattccgtctcaaaaaaaaattagcttggcgtggtggcataagtctgtagtcccagctgctcaggaggctgaggtgagaggattgcttgagcctcggagatcgaaggtgcagtgggctgtgatagcaccaccgcacgccaccctgggcaacagggccagaccctgtctcaaaaaataaataaataaataagtaaagaaagaaagaaacaaacacacatggaagtatttcgaggtaaagaggcatcacgcctgtgacttatgctgaaatgtcttagaaaaaaattgggagagggtactgtggctcgcacctgtaatcccagcactttgaaaggctgaggcaggaggattgtttgaggccaggagtttgagaccagcctgggcagcatagtgagactctgcctctacacacaaaaaaattagctggctgtggtgattcacacctgtagtcccagctattaagaggctgaggtgggaggatcgcttgagcttgggaagtcgaggctgcagtgagccttgatcacacccactgcacttcagcctgcaagactctgtctcaaaacaaaaaacaaaaaagaaagaaaaaaatgaggatagagggagagagagaaaattaatacaaatgtggtaaaatgttcacatttggggaatctgggtgaaggttatatgaacattctttgtagtatttttgcaacttttctgtaagcctgaaatgatttcaaaataaaaagttgggggtttttttgttttgtttttaagggtatgatgcaaccattattgctgggggagaaagtaccagcaaagagccagtcctgctggcggtaggtggatgggtgctgctgggaggactctgggttccacaggaggaacgtagcccagggaaaagggagttacgggactgcagcgccagctccccactcctgccaccattgggctccagctttccggccttgtggccagtctttccctttggggggccggtgactcagccacgggttccatgtggcaggaagtgggcacagtgactcacggggtggcttggtcccctcctttgtggaggccgggatagcagctcaggccccaggccagtgatggcctgtaagagaggaggatttgcaccccacagtggcaagccccaaggagggctgccctagatggtggggggcctggagcactcagctggggtgggggccccgcctcgccctcttggggccggcaaaatctaccctctgccagctctgaccacagcctgcagagttttccagccacttgtgggcatgtgcacagtgctggacactctgtaagaattccccactgtctgcaaagccggcaacagctgccaaggtctcccaccctgctggctgcccccagccatgcaccttctccggggggccttgttagcactcagcaggcatgcagaccgccaaaggctcagttccctggggcccagccgcttccaggctgttcaggctcaagttccactggttggtgccagtgacttgtctactgtctcatcggtaggctcaaaactaacacctttagaactgttcgtgattgaggctagatgcggtggctcacgcctgtagtctcagcactttgggaggccgagacaggtggatcagttgagctcaggagttagagagcagcctgggcaacacagtgagaccccatctctacaaaaaatattttaaaaaattagctgggcatggtggcgggcgcctatagtcccagctacttgggaggctgaggcaggagaatggcgtgaacccgggaggtggagcttgcagtgagccgaggtcacaccactgcactccagcctgggagacagagcaagactccatctaaaaaaaaaaaaaagaacaggtagtgaatgaaccctgctgcttaggggacgagactatgtccctcctctaagacgtcctgacctctgcaacttctcttctgcagactccaggagcacttagggccggggttgctccctttaacgttaaggccgtgctcacatttggtgggaggatgacccagtgcttgtacatctgctgtttcacatcctcacaacagagaaggaaactaaggctcagagaggttcaggaacttgcctgaggtcacacagcatgaagtggtgaagtcgggatttgaactcaggccttcctgactcccacgttggtcctgcccatatcccacctcaggatggctgtgctgtgcattttgacagttaatgggcgttcacctcgctggatggcaaatctggcaggctggccaggactgcggcctcctcactttctaaagccgtcctggcagcccctgacatatcaggagtgttcaggcatgactcacaagtggactgagtgcccgatgggttcaaatcctctgcaggtggctctgggcaaagcaccagcctctgcagcaaaccctgccccatcccagtggagcctcctgcccctccctcttacccccacggctccttgtcaacaaacactgggcagatcccttcctccactaccacgtgccggctcctgtctcccggattctcccttgcaggcctcgccgtctctctctggcctcccttttcctgatctgttcataactttcctcctcctgtgtgtttccctttgctcctctctctctttcttttctttttttctttttgtttttgtttttgttttgttctgtttttgagaccgagtcttgctctgttgcccaggctggagtgcagtggtgccatctcgactcactgcaacctctgcctcccggattcaagcgattctcctgcctcagttccctgagtagctagctgagattacaggtgcacgtcaccatgcccagttaatttttttttttttttttttgtatttttgtagagatggagtttcgccatgttggccaggctaaacttgaactcctgacctcaagtgatccgcccacctaggcctcccaaagtgctaggattacaggcgtgaaccactgcacccagcctgtttttgtttgtttggttttgagacagtctcgctctgttgcccaggctggagagcagtggcgtgatctccgcttactgcaacctccgcctcccaggttcaagcaattctcctgcctcagcctcctgagtacctgggattacaggcacccgccagcatacctgactaatgtttttgttgtttggccgggcacggtggctcacgcctgtaatcccagcactttgggaggctgaggcgggcggatcacgaggtcaggagatcgagaccatctctggccaacacagtgaaagctcatctctactaaaaatacaaaataattagctgggcgtggtggtgggcgcctgttgtcccagctactcgggaggcagaggcaggagaatggcgtgaacccggaaggcagagcttgcagtgagctgagatcgcgccactgcactccagtctgggtgacagagcgagactccgtctcaaaaaaaaaaaaaaatgtttttgttgtttgaaacggatttgctttgtcacccaggctggagtgcagtggcatgatcttggctcactgcaacctccgcctgcgaggctcaagtgatcctcatcttgactctctcatcttggcctcagcagcctaaggagggaccgcagatgctgggattaccgcacccggccctctttctctctttcgagttccctttctgctcccccttggccttccctcgatccccttcctcctctgtgttgtcatcaggctgctgttacgagtccaatgtggtccccctcctgtgtgccagtgctgggtccacccctactgacggcacctgcaggacgagggtcaccactttgctgggtcacttcccatttcctctgtgcttccaatgagctggtggggatcctggggttgtcccatccagcgtccctagtggtacctcccgaagtctggtgtttttgagtggacggccccgggggttcagagtgactcttcctcacctggtctgtgtgatgaggcagtgaacaccccaggggagaggctctttggaggctggaaaagatgcccctctgagaatccggtacttggagggctcttggtgaatgatgtttttcttttccgtcactgtactgagttgaaatcggcctcctggaaagttatttccctgtgttctttgatctgggtgagggaagccatctccctgactagctgacagtcacttgatcgtcaactagctggtgaacctcgtcatagcttctctctctcctgtaaataacctgggttccatcagctgctcccacggctctgagcctcagacccctttccctgcctttctgtcctcctcgaaggccccccagtcctgagacatctgggtaacctgattgctggactcgattttcaatcctgttcaatttcatctgagtcgttcaacctgtgggtctagcctatcatccttctgggggttactctccagtgttatctgcaaatccaatcacatcatggtcttcattcaagtcattgataaaaacgttaactaggacatggtctaggtcacagccctgtggcacatctctggagacttacttctagatgagcactggtttacttatcaacggccttttgttttgtttttagtgaatctttctacctgccaccgccgcattaaactgttttctaggctactttgtttcctgtcttgtgtaaggctatcacaggaagttgaatgttctgtgaaatcaaggtattctatacccatagcatttccatgatctgaaaatcttgtcaaaggaaaaaggagttacttaggccagaggtgcaaatagggttttgttttgtttttacctttgaaaaaatgatgatttgtatattcctgcatttgttttatgaaaataccaaaatacagataaaggaaaaaagaatctgaaagcattctaaaaccctctatgcagagataagcacttcaaacattttggtatgtatttctggaagtttcttttttttttttttttttttttgagatggagtttcgctctttcgcccaggctggagtgaagtggcgcaatctcggctcactgcaacctctgccccccgggttcaagcgattctcctgcctcagcctcccgagtacctgggactacaggtgtgtgccatacacctggctaatttttgtatttttagtagagatgaggtttcataatgttggccaggttggtctcaaactcctgacctcaggtgatccacctgcctcggccacccagagtgctaggagtgagccactgcagactgccatttctggaaatttctaaaagcatctcgaactacatataccaaaaactcataaaaatgcaatcagtctctaaatactcttttgttatctgcttttctcatttactcatatttcatgactatcttcacatgtgattgaatatatatatgtacagctacataaactgtttctattagctgggtggtattgcattatgtggacatatcctattcaacagatcccatattactggattccatttttttgtctttataagcattgttatatatgcctgttatgaacatgtctggctccttccctgaaatacgttcagatgctatagtcagcctttttctaactattcaagacctatttctcccttgaatccctgtagctttttttttttatctgtgcttttttggtaagcatattttccactacaataattatgtcctgtcgctggccaggtgcagtagcacgcctgtaatcccatcactttgggaggctgaggcgggcagatcacgaggtcaggagatcaagaccatcctggctaacagggcgaaaccccatctctactaaaaaaaaatacaaaaaaattagccgggcatggtggcaggcgccaccagtagctcccagctactcgggaggctgaggcaagagaatggcgtcaacctgggaggaggagcttgcagtgagccgagatcatgctactgcactccagcctgggtgacagagcgagactccgtctcaaaaaaaataaataaatgaaataaataaaataaaattaattatgtcctgtcatctccctgcttgtagctactaagatcccttaggaaagatcccatcctgatttaagattgcatccctaatacctataacacaataacttgcacttacggacatgccatagatatttgttgactaagggcaagaatatatgaatttgtttagtgattcactgcagtgttttgtgggtgagtaacatagtcgtgagtttctagtttccccagtctagtttctggcccacagtggccttgtttgtcatctttctgtccctctcctcatctcaggccaagggtgaaagccagcaagagtccggggctggcatctacccagacagcgtctcactctgctgcccagcccactttcaagtcaatgtggagcttcccagctcgccctccccatcctggatttcagatccctcctaccctcaccctactttctctcggagtttgacaggggagcaggtagaacctggggcagatctgcattcccctgggagatgcttcaagcagtggcagggtcttagcctctgagctgctccctggtaggaaggaagcaactgcccctggtctgtgttgggagatggacagagctttaggatggacaggcgttggggatgcaccagtacacataggcgctcaataacggtggtctttattctctttcctcttctgtcatctgacacgattcggtcttctcagctaaggactgggtctgtccttcgctcgtccttgtagccgtgactacaaccttccaagccatttttgttttcttagaggttttattgggagctgagggttaatagcaccccagcccctcccatcaggctcaaggggctcttttgccttcacttgtggttgagagtcctccctccctcctgccctcttctctgtccttttgaaatatgagctcagctccctagaaggtatcagtgctttattttgtacccctaccaactttctttctctttttttttttttcgagacggagtttcactgttgtcgcccaggctagaatgcaatggcgtgatctcggctcactgcagcctccacctcctgggttcaagcaattctcctgcctcagcctcccgagtagctgggattacaggcgtgcaccaccatacccagctaattttttctatttttagtagagacggggtttctccaggttgctcaggctggtgtcgaactcctgacctcaggtgatccacccgcctgggcctcccaaagtgctgggattacaggcatgagccaccatgcctggcctctttctcatagaaatcttttgtgattgaattgtctgaattgtggattttttttggtctaccttaccattttcctttttagaacctacagctttctttttttggccagcatttctttttggagaaatttcccctaaagtatagggtacctatgtgataatttccagtatctcttcctgagctattataaactcacagggaatcatcctgtatgaagagtgaccccacaatgaaattcctttcctggggttcaaacaatagacttaaaaaaaaatttaagacacagggtcttaggtcgggcatggtggctcacgcctgtaatcccagctactagggaggctgaggcaggagaaccacttgatggaggttgcagtgagtagagatgaagccactgcactccagcctgggtgacaaagccagaccccatctggccagaccgccatcgggagatggaggttgtagtgagccgagatcctgccactgcactccagcctgggctacagagccagatcccatcccgccccacccccccaaaaaaagagagagaaagacagagagacagggtctggctctgtcacccaggctacagtggattgacttgatcgtagctcactcactgcagccttgaagtcctgggctcaagtgatcctcctgcctcggcctcctgagtacctggaactacaggcaccagccggtgtgccctgctcaagcagtagactttcccttggaataaagaccattataatcccctccaccaactctcgcaaagccatagtttgccagagccattactgaactttttgacaaggcaatcagctcaaatgcacccaaacaggttcgggattcctgaactcagcccaggcttcattgatgatacctaacacgcctgactctataagcggctgacttttaaaataataacttttttttttttctttttgagatggagtctcactctgttgctcaggctggagcgtaatggcatgatctcaggctcactgcaacctcctcctcttgggttcaagtgattctcctgcttcagcctcccaaatagctgggattacaggcgcccaccactatgcacagctaatcttttgtataaaataatgacttttaaaataatccaatacaataagatctattaagcacctagtacataactatgaaccagggattggggagagaaaggaggaaggagatttgatctcaccctcgaagggtttagaatctctccactaagatttttaggagttagagttggaaacttcacaatctaaagtgaagaaagacgaacagggtaaaactcaagacagtttttgtaaaaagaaatgtaaaactgtttgccttcctgtttcttcgtcagggataagtaatttccagtcatcccatccattaaacaaatatgtattaagaaagaaaaacagtccaggagcctactgcgggcacaaccggggtgcacagaacccatctcgggaggctggctctgccccttgagaaagttcaagatgaaggggatgccaaggccagaggcaaatgtccagccctcactagcggggatcacctcgagttccacgcgaggggctcagggttgggtaatcgagagtggaaagctctggaaaaaccctaatacccctgttgcaacattctaggaaaatggtctgtctattgaataagagtgagtcaccatgggaaagttggggcggtcaacactaccccgcactgctcatccccattctttggctcctagtgatgctccggtcaccctctgggggccatggggaggaggcagtgacgccgtgatccggaatttcaacgagacatatgcaaatggcccaatgggctgtgaaggaagttcagagacaggaggatgaggcagctcagtgtttctaacccacaaagcagaagtgagaatgggtgagaattcccagtcaccttccccttctcctttcccttctcactctaccccaaccctactccctgtgtgggccctctgccccttccctgttcagaaatgagatcactgggtgggtgcagtggctcatgcctgtaatcccagcacttcagaaggccgaagccggaggatcacttaaggccaggagttcaagaccagcctgggcaacatagtgagacccccgtctctgcaaaaaaattaaaatcagccaggcgtggtagtgcacacctgtggttctagctacttgagaggctgaggttgggggatcacttgaactcaggaggttgagactgcagtgagctatgatcacaccattgcactccagcctgggtgacaaagtgagaccctgtctcttttttgcttgagatggagtcttgctctgtcgcccaggctggagtgcagtggctcaatcttggctcactgcaacttccgcctcccgggttcaagcaattctcctgcctcagatctccccagtggctgggactacagatgcaagccaccacgcctggctaatttttgtaattttagtagagatggggtttcaccatgttggccaggctggtcttgaacaggtgatccacctgcctcagcctcccaaattcctgggattacaagcatgagccaccatgtccagctgaccctgtctcttaaaaaagaaattgagatctctgacttttacccaattacccaagtctgtcaaagtacccatctgtaaaagaaaccagccttgtaaggttcctttcaactccagaattgaggagtgggtttgggggcagtcagaggggggtgctggtgagcaggtgacaggagaaggaagaatctccagttgagcccccactatgtgtcaggccaggaacccagggacctcaccagagccctctgtagaggtcagcatcctcgttttacagatgacacaatgacagcctagtcggaggatgatgacaccaggatctgacccagtcttcccaggctcccccccccaactggaagccccccaagattgagcagacatattctttcaggaaacaccaccactctggtttatttcagctgcaggtctgatctccataacagaagcacacctgaaaaatactgccttagccgctgaattttgatagagcaattctatattcctggtaacttcctctgtaattaatcgtcaattgattactccgtcacttacatgtgagtgtgaaggcgctggcttctttgtcaggaagtgaactctctattgacgaatgagtcaaagcactgggcggctgttacttattcatgaaggagggcattggcgcgtttaggtttcccctcacctgtccagcacgccctgaaagattgtagtacagagtcctggggagaaagtggtttcctgcctctccctgggctcatatttgaatggtactttctttctctctctctcagcagactaggctcctctcagcagatttccatcccaagtttgggtagctcttgccaaaccttttaacccgtattctacagcaataatccaagttataaataaaactattcaattcagctatctagttaattaaagaattagtagccacttgtggataatatttatttttctgggcagtgaactgagttagttggactgggcatggggatgagttcaatattttattaattttccttgaggatagctatatatttagtacacatgtaatacaatgtattagtgtgataactttttttttttttttttttgagatggagtctcactctgtcacccaggctggagtgcagtggcacgatctcagcttactgcaacctctgcctcctgggttcaagcaattctcatgcctcagcctcctgagtagctgggactacaggtggaccccaccatgcctggctaatttttgtatttttagtagagatggggtttcaccatgttggccagactggtctcaaactcatggcttcatgtgatcctcccacctctgcctcccaaagtgctgaaattacaggcaacagccacctcgctcagtcaactttctttaaaaaggaaggatgactgggcacagtggctcatgcctgtaatcacagcactttaggaggctaaggcgggaggatggcttgagcccaggagttcgagaccagtgtaagcaacatagggagaccccccccccacccccaccgtctctacaaaaaaatagaaaaattagccaggtgtggtggcacatgcctgtagtcccagctattcaggaggttgcggcaggaggatccattgagcctagggggcaggggctgcaatgagctatgatcatgccactgcactccagcctgggtgacagaaggagaccctgcctcaaaaacaaaaggaagctaaggggtgtaaactgcctggggaagactctctggggtcatagagagtgggtttaggatctgggggacattctctgtggccagtcagtcagggtgctggcctgactgctcaacaagcttcttaatgactctaaacctcagattcttcgtttgaaaaccaggcagatgagctcagagaactgctgtgtggattccccctcccagttccagtgtggcagagtcctggcaagatagagtctacctagagctgctcagaaatgcagcatctcatggcccaccccagccagatgaatcagtctgcagtttaacaagatccaggtgattggtgctgacgtgaaagtttgagaggccaggctaaataacatgacatatgtaaaacacctggcagagagtgggcatggatgggcgtcagctgccctcctcctctcccccgagcatcctcagacaccatcccagggagatcttttgcttgggagggagagatgtgggttggattgtgggtgaaatgtgggcgacctgcattctcatggtgcagcacatattttgtctccttgcaatcattgatgtgggccagactgcaaagtgtggcccctaggagttcagcatatggtcctaaggttacagggtgaacccaaggcgaccagggccacgtatgcaagtacccacagcttcttccaccaagccgccaccacccgtggatgtggtcactcactctggtggggcaagggggcaagagggcagctggacctctagtcctcatatgggtttgctggttgtatgtaaaaagccccttaggggctggtgtccgcaatgtgatactgaatgtgatggtttaacagctttcatgacacacccattttggaagcagccatcctgtgctgggcactgcggattcaacacagaccaaatggacccatggcaggaaggtcgttagagttaggatgggcagagaagtagcacatggggacaagggctgaacccaggtcagcacagggtgttgggaagaccaccctagaaaggaagtgggggccgggcgcggtggctcatgcctgtaatcccagcactttgggaggccgaggcaggccgatcacttgaggtcaggagttcgaaaccaccctaccctggtcaacatggtgaaaccccatctctactaaaaatacaaaaactagccaggtatggtggcgcgtgcctgtagtcccagctacccgggaagctgaggcaggagaatcgcctgaaccggggaggtagaggttgcagtgagctgagatagtgccactgcactccagcctgggcaacagagcgaggccctgtctaaaaaaaaaataataaataaaataaaataaaataaatcaagaaaaagaaggaagtggggcccagggcggacaggctcagggcaaggcacctgcccggagggcactggggtagggcaccggatggccttagcctctggacattctcagcgacctggcactagggaatgttcctggcctaaggaaggacctgggtctggccaaaaaggcgagagagctaggcgcggcctgggaggaaggtgcggcgctggggagggaggggagccctgccctggtgtgccctcggtcccgcgccgcacaccctgccgggaagcccggggccgcagctgctcgggcggcccggcccagaatagcctcccttccgggcagggctgccccggcccgcagcgccagcgcccgaaatagggctcggccgggtggcgggcgccaggggccgccccagctgcaggactcgccggggagccggggcccgcgcgtggaccgggaggggctgcggggtgcgggcccggccctgggacgcgaggacccgggtgggcgggtccgcgggcggggtgggggcggggcgcggggccgggaccgggatcccgggcgcggggccagcccgaggcgggtggagccgggcgctgacctcacagcccgcgaggaagcccgtcggggccggcggggctgatggaaggcctgaggaattc

SEQ ID NO: 43 - DNA, 159660 bp, Homo sapiens
gcttttgctttaatgagaaaggaagtttgccataaggtttgttctggggtgtcttgctgaagccctcctgtgttcttgccctggggttcagggactggagggccctctgtggggggcatgagtcacttcattctctgtctctgcaccccagctgtcctctcctagagagaggcaatttctctttcccgaggttagtagagttttttaatatctgagagaggcttatgcatgataatgaacacctatagctgcttggttttaatggccattccacttagaacataaattccatgatgtttttcttaatcgtagcacaactttaatctagtccatttataggcttgagaactcctgtgtgaattaaatcacgaccttctgatgaagccactccgatgagcctgtgaggcacattgtcttcacactgtgctggggcagggttgttggcaaacccccatggatggcagccggcaatggcctcacagtgacaaatgcgtctgccttttgacccagaattctacccctgagagtgcgtcctacagatgcttgcaagtggtatggtaatggatgtacaaagctattcacagcaggggtgtttgtggtagcatggcctgggagacagcccagatggctttcagcaaaggattggtggcaggtctgcagccctggggcttatcagacaccaaccctgctggcaccttgatcttggacttccagtttgcagaactgtgagaaaataaaatttccattaagtttccccagtctggtattttgttatagccgcccaggctgactcagacaggagcccaggatggatgtgagcgtgttataaccagctcacgcttgtggctgtagggagtccgggtagaagctggaagagcctagaggggtggctgctgccttccagggaacaggtcaaagggtatccaaccagagtggtctcagtgcagatggggaggagactctagacccaggacaagcagtggagggggcatccaaggatttcctgatgatcagatgtggtttgagaaagagagggggccggtggcgcatgcctgtaatcccagactttgggaaaccaaagcaggaggacgcttgagcccaggagttcgaaaccagctggcaacatgcaagacctggtctctacaaaaaaattaaaaattagctgggtgtggtggtgcttgggaggctaaggtgggaggatcacttgagccctggagttcgagaacagcctgggcaacatggcgaaaccctgtccctacaaaaaatacaaaagttagccaggcgtggtggcacacgcctatagtcttagctactctggtggcagaggtgggaagcttgtttgaacctaggaggttaaggctgcagtaagccgagattgcaccactacactccagcctgtgtgacagagtgaaaccgtgtctcaaaaataaaaagtgaattcaggagttccagaccagcctggccaacaccgtgaaaacccatctttactaaaaatacaaaaattcgcctgggccagatgcactggctcgcacctgtaatcccagcactttgggaggccaaggcggggatatcactcaaggtcaggagttcgagaccaacctggccaatatggtgaaaccccatctctactacaaatacaaaaaaaaaaaaaattagccatgcatggtggtgcgtgcctgtaatcccagttacttgggaggctgcggcaggagaatcgcttgaacccaggaagcagaggttgcagatcacttgaacccaggaaacagaggttggagtgagcggagattgcgccgttgcactccagcctgggtgacaagagcaaagctctgtctcaaaaaaaaaaaaaaaaaaaattagacaggtgtggtggcgcacacctgtaatcccagctgctcagaaggaggagacaggagaatcacttgaaccccagaggcggaggttgcagtgagccaagattgcaccagtgggctccagcttgggcgacagagcgagcctctgtctcaaaaaaacaaaacaaaacaaaacaaaaccaaaaccacacaaggcttttcagtgaaatgctcactcctcttccctttcgtgtgcccagttcccctggcccccgtcaaggtggccactgttcttcatatggatatagactccccctccctttcatccaaatggccccgtagtacacacagttccaccctgccagtttcacttagtatttcttggagatgtttcctcatctgtacgtagatagcttctcgtcagtacgtcagtacgcagggagccctgcaggggcaagtggttggtaacgtgggtgctggcaaaacaggttttgcaacctcactggcgttctgcaaaggcagcttcctgcctggattggcccatgggcaacttccctttgatttccctcagctttaatccatccagctgaagtggagacagcccggtttatggttctgcattctggcatagacgcaattcgtacaagctctcagccccatgctttttcttcctctgccgtgtttacccttctggagttgcagaatgaatcacccacccgagggaagcacggttgtttttttttttcttttctttttttttgagacagtcttgctctattgcccaggctggagtgcagtggtgcaatctcggctcgctgcaacctctgcttcctggttcaagcaattctccttcctcagcctcctgagtagctgggagtacaggtgtgcgccaccacgcctggctaatttttgtatttttagtagagatggggtttcaccatattggccagggtggtctcgaatgcctgaccttgtggtccacccgcctcggcctcccaaagtgctgggattgcaggtgtgcgccgccgcgcccggccaggcttttttttctctaggcctgctgtggccaccaaggctggggaccagggggcctccagggacagggatcccaagttgcacgttaatacacggagccctttctgagatgcaggttctacagggaactggattccacctcttttggggagatcaacccagcagcccaaggatcccctgatggtgcctgagcacagctgtgagaagggggtatctggatccttggggtgacaggatgggagaggtggagcatgggcctgcaggctggcccccagaggccttaggtctctgctgactagctagaattctgaaaactgtgttatgtaagacgtttagcatctgcagtgccaaataaaggtgacccccacaacgacataaaaaaaaaaaaagatatgtccaaatcctaaccctgggaacctatgaaaatcctaaccctgggaacctatgaaggtatttccttatttggtgtgttttgttttggtttggtttggtttggtttgtttgatacagagtcttgctctgtcgcccaggctggagtgcagtggtgtgatctcagctcactgcaacctctgcctccgggttcaagcgattgtcctgcctcagcctcccaagtagctgggattacaggcacgcgccaccacgcccagataatttttgtatttttagtagagacagggttttaccatgttggccgggatggtctcaactcctgacctcaagtgatctgcccgcctcagcctccctgtaaccagctgggattgcaggttcccggttggtatttccttatttggaaagaccatctttgtaggtgttattagctaaagtcaagtcattctgggttagggtgggccctaaatgccattgactgctatcctgctaagagacagaagagggagggacacacagggaggggaccacgtgaagacggaggcagagacgggaagaggcagaggtgactggagtgacgtagccccaggccttggaacgcctggagccaccaggagctgcaggaggcaaaagaggcattggcagagtgtggcagtgtccacaccttaatttcagacttctggcctttagaactgtgagagaatcacgttctactgctgtgagacactcaatttgcagtactttgttacagctgccctggtaaacaaatgcaatatttattttcagcaaagcagggagttcctgcaaagatgactagaccaggttccttctcccaagagcgcagtgtcctagctgtgaatactaggagtgcgttgctgcggtgggaggggaggcagggtttactgactgatcattcccagtggtctggatgctctctttctttctttcctttctttcgagacagaatctcgctctgtcacccaagctggagtgcagtggtgcaatctcagctcactgcagcttctgcctcccaggttcaagtaatcctcccacttcagcctcccgagtagccggaattataggtgtccaccaccacgtccagataactttttttttaatttttagaaaatataggctaaggcacgagaattgctggaacccaggaggcagaagttgcagtgagccaagatggcaccactgcactccagcctgggtgacagagcaagactccgtcgcaaaaaaaaaaaaacgatgaatgctaggataaaaaataaagcaagaggccaggcacagtggctcatgcctgtaatcccagcactttgggaggccgaggtggatggatcatctgaggttgagctcgagaccagcctcgccaatacagtgaaaccccgtctctactaaaaatacaaaaattagccaggtgtggtggcacgggcccataatcccagctactcaggaggctgaggctggaggattgcttggcgccgggagtttgagactgtagtatgctttgattgcacctgtgaatagccactgtactccagcctgggcaatatagtgagaccctgtcctttaaaacaaaaaagtatagcgcacataataagtgtgtagtaaagtcgtgctgaaaagggtcctcgcagaaccacagttcacttgttgacagacgtcaggactggcagtcttttttttttgagttggcgtctcgctctgtcccccaggctagagtgcagtggcgtgatctcagctcactgcaagctccacctcccggattcacgccattctcctgcctcagcctcctgagtagctgggactacaggcacctgccaccacgcctggctaattttttgtatttttagtagagacagggtttcaccatgttagccagggtggtctcgatctcctgacctcgtgatccacccgcctcggcctcccagagtgctgggattataggcgtgagccactgcacccagcctggcagtcctctttcgatgggaggtgctcagagctgaagctcaacacgccaacttaagggagctttcagctggaatgtttctacctgagctgaaatagaaattgccgccacctggctgggcacagtggctcatgcctgtaatcccagcactttgggaggccaaggtgggtggatcacgaggtcaggagttcaagaccagcctggccaacaaccctgtctctactaaaaaatatatatatatatataaaaattagctgggcatagtggcgtgcacctgtagtcccagctacttgggaggctgaggcaggagaatcgcttgaaccggggaggtggagattgcagtgagccgagatcgcgccactgcactccagcttgggcaacagagtgagacttcgtctcaaaaaaaagaaaagaaaaatttctaccacctgagcttgtgctgacagcgacttgtccatttctgagacagccaccacaagggcccgggccaccaggaagagcctgctgcatgtcccctatggagacggcgaaggggagaaagtggacatttacttccccgacgagtcgtctgaaggttgtcggtgaaggggctgggggtcccggggcttgggggtccagtggcagagctcagcagggcgggccttgctcacacgccctgtgcttggttttgcagccttgcctttcttcctgttctttcacggaggatactggcagagcggaaggtgagtcgggggatgtggatggtggactgcaagagagattccactttccctgggggactcctcctccagggctgccgcaaccaaactgccacaagctgggcactccttgcagggctgtgtctcacagcgctggagaacggaagtctcaagtcaaatgtgggcagggttcctagggagggtccttcctgccttctccagcttctggtggccttagacagcccttagcttgtgtctgcatagctccagcctctgcctccattcacatgtgatcctggtgttcctgggtctcaaatcttcctctctctttttttttttttttttttttttttgagacagagtctcactctaacccagactggaacgcagtggtgcgacctcagctcactgcaacttctgcctcccgggctcaagcaattcttctgcctcagcctcccaagtagctgggattacaggtgcacgccaccacacccagctaatttttgtatttttagtagagacagggttttaccatgttggccaggctggtcttgaactcctgagctcaagtgatcctcctgccttgacctctcaaagttctgggattacaggcgtgagccaccacaccagcctccttttttttttttttttttttataaggtcatagtcacaggttctggggttaggatttggacatatcttttggggggacacagttcaacccactacacccagtgagaagcatgttcagcctcctcttgaatcaagggaaaagccagagtgaccaaccactgtcccagtttgcttgggactgaggaggggtttcccaggacatggggttttcagtactttaggaaaaaaaaatgagagtcccaggtaaaatgggacagttggtcactgtaagctaagcagtgggtatttgggaatttgggatcttggcagacactgctgttccctagggtcttcctacagagttgccttcaagcatgttcatgttaatagcttacatttaatggccaggtacggtggctcacgcctgtaatcccaacactttggaagggcaaggcggacggatcacttgaggtcaggagttcgagaccagcctggccaacgtggtgaaaccctgtctctactaaaaatacaaaaattagctggacgtggtggtgtgtgcctgtaatcccagctactcgggaggctaatgcaggagaatcacttgaacccaggaggcggaggttgcagtgagctaagatcatgccactgcactccacccagggtgacagagcgagactctgtctcaaaaaaaaaaaaaaaaaaagcttacatttattgcacacaaaactctctacactgctagtctttaattctcaaaaacagttccctgagagagggaacataattgcctctattttacagatgacaaaaccaggcttagaagttacacaaattgccttgcacagtggctcacacctataatcccacacattgggaggctgaggcaggaggattgagttagaaaccagcctggtcaacatagcaagacccccatctctacaaaagaaaagataaatttgctgggcatagtggtgcacacctatactcctgcttgggaggctgaggcaggaggatcgcttgagcccaggaggtcgaggctacagtgatccatgatcgcaccattgcactccagcctgggcgacagagcgaggccctatcgcttagaaaacaaaaagttacatgaagttcccccaaggtcccgtagctagcatgtgatgtggcagggagagagcctgtccgcttcactctctcacatgggaccagaaaggggtgatgctgtgcgtggacaggacatctggcaagtggtgtgtccaggacacaggaagcagcgtagtggccaagctgcctccagctgtcacatctgtgtgtctctgcagtaaggatgagtctgccttcatggtccacccgctgacggcacagggagtggccgtggtaatagtggcttacggcatcgcccccaaaggtaataggagtggttgctgcaggtccgagggccggtgggctttaggaggaagtgcatccctgacccagctcatgctctctgtgcaggcaccctggaccacatggtagaccaggtgacccgcagcgttgcgtttgtccagaagcggtatccaagcaacaagtgggtgttgccagtagattttcttcctgttggacctcagtgggtgggaggacagtgcaatcagtacctaggatacagccaagctgcccctctggcctgtggagcagaaagcaaattgggactcttcgaagggggcctgatgttgtggggaaactgcgtgcaaatccagctctctgctctgacccctcccaggggaatttacctgtgtggacactcagccggggcccacctggctgccatgatgctcctggccgactggaccaagcatggggtcacgcccaacctcagaggtttccatgggagctacagcctggctgggcaaccttcatctccccatgagccttggggtttgggccaactgcttgaaatcctcccggccatgagtggcttgaccgcagggcttcgagccctctgagcaaggccttctctgcctcctctgtgccccttcccctggtcctgcccctctggcggtgggggtgggctggccctgccttgctccgcctggagcctggccctgtgacaattctgtaccttcacaggctttttcctggtgagtggggtctttgacctggagcccatcgtgtatacttcacagaacgttgctctccagctgaccctgtgagttacttggccaccacctcccctggctcaccaggagcctggctcctctctgtcctgacccctgtccactccccaccccagggaggacgctcagaggaatagcccccagctgaaggtggcccaggcacagccggtggaccccacctgccgtgtgctggtggtcgtgggccagttcgactcccccgaattccaccgacagtcctgggagttttaccaggtactcccagtgcaggtttgtggccagaggtcgagggtcatgtgggctcattattttcctctttcttttacccaagtggacaagaccctccatcatttatttaacacgtactgagtgaaccctgacctgtgccaggcatggccccatgtcctgccccacctcccctcccactgctcaggcccctcttcccatgtctcccctgcccagaccctgtgtcaaggagagtggaaagcctcatttgaagagctccacgatgtggaccactttgaaattgttgagaatctgacccagaaggacaacgtgctcacccaggtggggcctcatccctggcagccctttcatggtagacagcacaggtcctgtcgcagccccttagatgtgcaaaccaggagttcaagaccagcctggccaacatggagaaactccgtgtctactaaaaatacaaaacaaattagccagatgtgatggtacgtgcctgtaatcccagctactcaggaggctgaggcatgagaattgctttaacccaggaggcagagattgcagtgagccaagattgcaccactgcactccggcctgagcgacagagtaagactctgtctcaaaaaaaaaaaaaaaaaaaaaagacctgagaacctaggaaagaaagaacctaagaaagaccatcttgtttctttctttttttttttctttagagacagggtctcctctcttgcacccaggctggagtatagtggcaaaatcttagctctctgctgcctcctgggctcaagtggttatcctgccccagcctctcgagtagctgggactacaaaggcgtgccactgtgccctgctaattattcaatgttttgtagagatggggtctctctatgttccccaggctggtcgtcgtcgtcttccttcttcttcttcctccttcctccttcatcttctttcttctcctcctccccctacccccccttcttcttcttcttccttcatctcagcatattatacctctaaccagactgtcttcaactcctgagttcaagtgatcttcccacctcagcctcccgaagggttggggttgcagacgtgagccactgcatccagccctgtctcatttccttaatcaaattcctgcaaagagctgctctgattctggggcttttgtgtcttctcttcctgttccagattatcttgaaaacaatcttccagtagttctgacgatacttggagcctggtccacgtgcatcccaccttgggaagcctctccaaagagctttcggagctgacactgacagcttcagtttcccccagcacccaggagagccttgctgtgtctgtctgcccggcaagagtccattctcactgctgggacactcatgaaaatctccacgtcctccctcttcccagcctggatggagctccagggctggggaacgtccgcaagtcaatgctcagagatgcccggagctgcctcttagactcgtctggcccatctacctgctgacagagcatgacaaagatgacgctcaaaagtaatgccattacttcttttttttttttttttttttttttttttgagatggagtcttactctgtcacccaggctggagtgcagtggcgtgatcttggctcactgcaacctccacctcccgggttcaagcaattctcctgcctcagcctcctgagcagctgggactacaggcgcctgccatcatgcctggctaatttttgtatttttagtagagacggggtttcaacatattggccaggctggtctcaaactcctaaccttgtgattcgcccgccttggcctcccaaagtgctgggattccaggcgtgagccactgcgcccggccagaatggcattatatttaaatagttcataaagaagcacaaaagaatattatttcataacatgtaaaaattatataaaacgtaaatttccatgttgataaataaagttgtattggaacacggccctgctcgttcatttacgtattgtctagggcagctttcaagctgcagggtggagctgagtggtggtgacagtgacctcctggcccgtagtgcctgaagcatttcctatctggcccttttcaggaaaagtttgcggacccctgggtaagggcttccccaagccagctaccctctgccttctgcttcagtctcctgtctgctctgtcctccatctccctgacatttgggtctgtccctgaatgccccggggtctcagcgttggggccaacaccttgaccttgacaggacaatgctacccacatgtaggacaagcttcctctgcacccgagagtggtgtgcatgtcccaagaagccagctatatccatccaccacccaccccaccacaccgcctctttctctcacaccgaatagcattcaagaatttccactgtgggctgggcgcaggggctagtgcctgtaatcccagcactttaggaggccgaggtgggcgaatcacctgaggtcaggagttcaagaccagcctggccaacatggcaaaaccctgtctctactaaaaatacaaaaattagccaggcgtggtggctggcgcctgtaatcctagatacgtgggaggctgagttaggagaatctcttgaatccgggaggcagaggttgcagtgagctgagattgtgcccctgcactccagcctgggtgacaaagccagactccatctcaaagaaaaaaaaaaaaattccactgtatgtgtgcagcaaaccatcatgacacacatttacctgtgtaacaaacctgcacatcctacacatataccctggaacttaaagtaaaagttgggggggggggtaaaaaagaatttccaccgtgacattattgagtatagcaaaaaaaaaaaaaacaagaaacagcctagtgttcattagggaataaacgcattcaagcagcatcaaaccctgcagccattacaaagagatctatgttgaccatgtggaatatctccaagagccacagtagcctcccttatctgtaggattcactccaagaccctctgaaaccatggataatactgaaccctatatacactatgttttttcttgtatatacatacctacgataaagtttaatttataaattggcaaagggtatataaatattccttctaagagattaacaataactaataaagtagaacgattaaaacaatatactgtgatcaaagttatgtgaagccaggtgctgtggctcatgcctgtaatcccagcactttgggaggctgagacaggtggatcacctgaggtcaggagttggagaccagcctggccaacatgacaaaaccccgtctctactaaagataaaaaaaattagccgggcatggtgacacatgcctgtaatcccagctacttgggaggctgaggcaggagaatcgcttgaacctgggaggcggaggttgcagtgagctaagatcacaccattgcactccagcctgggcaacaagagtgaaactctgtctcaaaacaaaacaaaacaaaacaaacttatggggttgctctctttctctcaaaatatcctttttttggcagggcacggtggctcatgcctgtaatcccagcactttgagaggctgaggtgggtgaatcacctgaggtcaggagttcaagaccagcctggccaacatggtgaaaccccgtctctattaaaaatacaaaaaattagctgggcgtggtggtgcaggcctgtaatcccagctacttgggaggctgaggcaggagaatcactcgaacccaggagctggagtttgcagtgagccgagatcatgccattgcactccagcctgggccacagagcaagactccatctcaaaaaaaaaaaaaagaaaaaaagaaagtcttttttttttttgagactgtatctcactctttctcccaggctggagtgcagtggcccaatcatggctcactgcagcctcgacctcccaggatcaagtgatccttccacctcagcctcccgagtagctggaagtataggtgcacgcccgactgatttttttttttttttttagacggagtctcactcttgttgctctggctggagtgcaatggcaggatctcggctcactgcaacctctgcctcttagattcaagcgattctcgtgcctcagcctcccgagtagctgggattacaggtgcccaccaccatgcccggataattttttgtatttttaatagagacagggtttcaccatattggtcaggctggtctcaaactcctgacctcaggtgatccacctgcctcagcctcccaaactgctgggattacaggcgtgagccaccgggcatggcctttcctggctaattttttaaatttttgatagagatggggtctcagtgttgcccaggctgatcttgaactcctagattcaagtgatcctccctccttggtctcccaaagtgctgagattacaggcgtgagccaccgccccgggctggaaaatacttttttaaacgagggcaatgtgaatctgaaatgccatttgaggaaagatctgttcgcctgacatcctgtttgagcctgggtggacaggacagcacctgccagcatcgggaagcactgcagatgggaagaggcttggtcactctccaaaggtggcaggagttggagggggtgagctgaaggtaaggagaaaggaggtggggacccaggagacaggggctgcgcagcgggctcggggctgacacccccacggatacagttcactggggctcaaacataaaaggaacccaactattgtgggaggaaaagactcttctgcctttctgccttttctttttttctttttctttctttctttttttttttttttttttgagacagagtcttgctctatcgcccaggctggagtgcagtggcgtgatctcggctcactgcaagctctgcctcccgggatcacgccattctcctgcctcaacctcccgagcagctgggactacaggcgcctgccaccacacccggctatttttttgtattttttagtagagatggggtttcaccgtgttagccaggacggtctcgatctcctgaccttgtgatccgcccgcctcggcctcccaaagtgctgggattacaggcgtgagccaccgcgcctggctcttttttctttcttttttttttttccgagacagagtttcactcttgttgcccaggctggagtgcagtggcgcaatcttggctcactgcaacctccacctccagggttcaagcgattctcctgcctcagcctcctgagtagctgggactgcaggcgcgcaccaccacgcctggctaatttttgtatttttagtagagacagggtttcaccatattggccaggctggtctcgaactcctgaccttgtgatctgcccacctcagcctcccaaagtcctgggattacaggcgtgagccaccgtgcccagcctgacccctctgccctttcaaaaactatgttcgttctctcacagccttctcttgtcatattaagtccacaccgcaggcctaatttgtccagtgaatgctatgcaaatatttcatgcacctgctgatcgcaggaatgatatgtacttggtacgcactgatcgtacctcggggtgggagaagagagggcaaggaagcaaagaatagccccctcctttcctggtgcaccttcagatgtgccgatggggcccaggctcgctgcagatggcccccttcccagagacaggggaggatcctccacccactccccagcctccaggaccatcctgactcctgccttcaggcactcaagttatgcgtctagacatgcggatatattcaagctgggcacagcacagcagccccaccccaggcagcttgaaatcagagctggggtccaaagggaccacaccccgagggactgtgtgggggtcggggcacacaggccactgcttccccccgtctttctcagccattcctgaagtcagcctcactctgcttctcagggatttcaaatgtgcagagactctggcacttttgtagaagccccttctggtcctaacttacacctggatgctgtggggctgcagctgctgctcgggctcgggaggatgctgggggcccggtgcccatgagcttttgaagctcctggaactcggttttgagggtgttcaggtccaggtggacacctgggctgtccttgtccatgcatttgatgacattgtgtgcagaagtgaaaaggagttaggccgggcatgctggcttatgcctgtaatcccagcactttgggaggctgaggcgggtggatcacgaggtcaggagttcaataccagcctggccaagatggtgaaaccccgtctctactaaaaatacaaaaaaattagccgggcatggtggcgggcgcatgtaatcccagctactgggggggctgaggcagagaattgctggaacccaggagatggaggttgcagtgagccaagattgtgccactgcactgcactccagcctggcgacagagcaagactctgtctcaaaaaaaaaaaaaaaaagtgaaaaggagttgttcctttcctccctcctgagggcaggcaactgctgcggttgccagtggaggtggtgcgtccttggtctgtgcctgggggccaccccagcagaggccatggtggtgccagggcccggttagcgagccaatcagcaggacccaggggcgacctgccaaagtcaactggatttgataactgcagcgaagttaagtttcctgattttgatgattgtgttgtggttgtgtaagagaatgaagtatttcggggtagtatggtaatgccttcaacttacaaacggttcaggtaaaccacccatatacatacatatacatgcatgtgatatatacacatacagggatgtgtgtgtgttcacatatatgaggggagagagactaggggagagaaagtaggttggggagagggagagagaaaggaaaacaggagacagagagagagcggggagtagagagagggaaggggtaagagagggagaggaggagagaaagggaggaagaagcagagagtgaatgttaaaggaaacaggcaaaacataaacagaaaatctgggtgaagggtatatgagtattctttgtactattcttgcaattatcttttatttaaattgacatcgggccgggcgcagtggctcacatctgtaatcccagcactttgggaggccgaggcaggcagatcacttgaggtcaggagtttgagaccagcctggcaaacatggtgaaaccccatctctactaaaaatacaaaaattagcctggtgtggtggtgcatgcctttaatctcagctactcgggaggctgaggcaggagaatcgcttgaacccgtggcggggaggaggttgcagtgagctgagatcatgccactgcactccagcctgggcgatagagcgagactcagtttcaaataaataaataaacatcaaaataaaaagttactgtattaaagaatgggggcggggtgggaggggtggggagaggttgcaaaaataaataaataaataaataaaccccaaaatgaaaaagacagtggaggcaccaggcctgcgtggggctggagggctaataaggccaggcctcttatctctggccatagaaccagagaagtgagtggatgtgatgcccagctccagaagtgactccagaacaccctgttccaaagcagaggacacactgattttttttttaataggctgcaggacttactgttggtgggacgccctgctttgcgaagggaaaggaggagtttgccctgagcacaggcccccaccctccactgggctttccccagctcccttgtcttcttatcacggtagtggcccagtccctggcccctgactccagaaggtggccctcctggaaacccaggtcgtgcagtcaacgatgtactcgccgggacagcgatgtctgctgcactccatccctcccctgttcatttgtccttcatgcccgtctggagtagatgctttttgcagaggtggcaccctgtaaagctctcctgtctgactttttttttttttttagactgagttttgctcttgttgcctaggctggagtgcaatggcacaatctcagctcactgcaccctctgcctcccgggttcaagcgattctcctgcctcagcctcccgagtagttgggattacaggcatgcaccaccacgcccagctaatttttgtatttttagtagagacaaggtttcaccgtgatggccaggctggtcttgaactccaggactcaagtgatgctcctgcctaggcctctcaaagtgttgggattacaggcgtgagccactgcacccggcctgcacgcgttctttgaaagcagtcgagggggcgctaggtgtgggcagggacgagctggcgcggcgtcgctgggtgcaccgcgaccacgggcagagccacgcggcgggaggactacaactcccggcacaccccgcgccgccccgcctctactcccagaaggccgcggggggtggaccgcctaagagggcgtgcgctcccgacatgccccgcggcgcgccattaaccgccagatttgaatcgcgggacccgttggcagaggtggcggcggcggcatgggtgccccgacgttgccccctgcctggcagccctttctcaaggaccaccgcatctctacattcaagaactggcccttcttggagggctgcgcctgcaccccggagcgggtgagactgcccggcctcctggggtcccccacgcccgccttgccctgtccctagcgaggccactgtgactgggcctcgggggtacaagccgccctcccctccccgtcctgtccccagcgaggccactgtggctgggccccttgggtccaggccggcctcccctccctgctttgtccccatcgaggcctttgtggctgggcctcggggttccgggctgccacgtccactcacgagctgtgctgtcccttgcagatggccgaggctggcttcatccactgccccactgagaacgagccagacttggcccagtgtttcttctgcttcaaggagctggaaggctgggagccagatgacgaccccatgtaagtcttctctggccagcctcgatgggctttgttttgaactgagttgtcaaaagatttgagttgcaaagacacttagtatgggagggttgctttccaccctcattgcttcttaaacagctgttgtgaacggatacctctctatatgctggtgccttggtgatgcttacaacctaattaaatctcatttgaccaaaatgccttggggtggacgtaagatgcctgatgcctttcatgttcaacagaatacatcagcagaccctgttgttgtgaactcccaggaacgtccaagtgctttttttgagattttttaaaaaacagtttaattgaaatataacctacacagcacaaaaattaccctttgaaagtgtgcacttcacactttcggaggctgaggcgggcggatcacctgaggtcaggagttcaagacctgcctggccaacttggcgaaaccccgtctctactaaaaatacaaaaattagccgggcatggtagcgcacgcccgtaatcccagctactcgggaggctaaggcaggagaatcgcttgaacctgggaggcggaggttgcagtgagccgagattgtgccaatgcactccagcctcggcgacagagcgagactccgtcataaaaataaaaaattgaaaaaaaaaaaagaaagaaagcatatacttcagtgttgttctggatttttttcttcaagatgcctagttaatgacaatgaaattctgtactcggatggtatctgtctttccacactgtaatgccatattcttttctcacctttttttctgtcggattcagttgcttccacagctttaatttttttcccctggagaatcaccccagttgtttttctttttggccagaagagagtagctgttttttttcttagtatgtttgctatggtggttatactgcatccccgtaatcactgggaaaagatcagtggtattcttcttgaaaatgaataagtgttatgatattttcagattagagttacaactggctgtctttttggactttgtgtggccatgttttcattgtaatgcagttctggtaacggtgatagtcagttatacagggagactcccctagcagaaaatgagagtgtgagctagggggtcccttggggaacccggggcaataatgcccttctctgcccttaatccttacagtgggccgggcacggtggcttacgcctgtaataccagcactttgggaggccgaggcgggcggatcacgaggtcaggagatcgagaccatcttggctaatacggtgaaaccccgtctccactaaaaatacaaaaaattagccgggcgtggtggtgggcgcctgtagtcccagctactcgggaggctgaggcaggagaatggcgtgaacccaggaggcggagcttgcagtgagccgagattgcaccactgcactccagcctgggcgacagaatgagactccgtctcaaaaaaaaaaaaaaaagaaaaaaatctttacagtggattacataacaattccagtgaaatgaaattacttcaaacagttccttgagaatgttggagggatttgacatgtaattcctttggacatataccatgtaacacttttccaactaattgctaaggaagtccagataaaatagatacattagccacacagatgtggggggagatgtccacagggagagagaaggtgctaagaggtgccatatgggaatgtggcttgggcaaagcactgatgccatcaacttcagacttgacgtcttactcctgaggcagagcagggtgtgcctgtggagggcgtggggaggtggcccgtggggagtggactgccgctttaatcccttcagctgcctttccgctgttgttttgatttttctagagaggaacataaaaagcattcgtccggttgcgctttcctttctgtcaagaagcagtttgaagaattaacccttggtgaatttttgaaactggacagagaaagagccaagaacaaaattgtatgtattgggaataagaactgctcaaaccctgttcaatgtctttagcactaaactacctagtccctcaaagggactctgtgttttcctcaggaagcattttttttttttttctgagatagagtttcactcttgttgcccaggctggagtgcaatggtgcaatcttggctcactgcaacctctgcctctcgggttcaagtgattctcctgcctcagcctcccaagtaactgggattacagggaagtgccaccacacccagctaatttttgtatttttagtagagatggggtttcaccacattgcccaggctggtcttgaactcctgacctcgtgattcgcccaccttggcctcccaaagtgctgggattacaggcgtgaaccaccacgcctggcttttttttttttgttctgagacacagtttcactctgttacccaggctggagtggggtggcctgatctcggatcactgcaacctccgcctcctgggctcaagtgatttgcctgcttcagcctcccaagtagccgagattacaggcatgtgccaccacacccaggtaatttttgtatttttggtagagacgaggtttcaccatgttggccaggctggtcttgaactcctgacctcaggtgatccacccgcctcagcctcccaaagtgctgagattataggtgtgagccaccacacctggcctcaggaagtatttttatttttaaatttatttatttatttgagatggagtcttgctctgtcgcccaggctagagtgcagcgacgggatctcggctcactgcaagctccgccccccaggttcaagccattctcctgcctcagcctcccgagtagctgggactacaggcgcccgccaccacacccggctaatttttttgtatttttagtagagacgggttttcaccgtgttagccaggagggtctcgatctcctgacctcgtgatctgcctgcctcggcctcccaaagtgctgggattacaggtgtgagccaccacacccggctatttttatttttttgagacagggactcactctgtcacctgggctgcagtgcagtggtacaccatagctcactgcagcctcgaactcctgagctcaagtgatcctcccacctcatcctcccaagtaattgggactacaggcgcaccccaccatgcccaccttatttatttatttatttatttatttatttattttcatagagatgagggttccctgtgttgtccaggctggtcttgaactcctgagctcaagggatccttttgcctgggcctcccaaagtgctgagattacaggcatgagccaccgtgcccagctaggaatcatttttaaagcccctaggatgtctgtgtgattttaaagctcctggagtgtggccggtataagtatataccggtataagtaaatcccacattttgtgtcagtatttactagaaacttagtcatttatctgaagttgaaatgtaactgggctttatttatttatttatttatttatttatttttaatttttttttttgagacgagtctcactttgtcacccaggctggagtgcagtggcacgatctcggctcactgcaacctctgcctcccggggtcaagcgattctcctgccttagcctcccgagtagctgggactacaggcacgcaccaccatgcctggctaatttttgtatttttagtagacggggtttcaccatgctggccaagctggtctcaaactcctgaccttgtgatctgcccgctttagcctcccagagtgctgggattacaggcatgagccaccatgcgtggtctttttaaaattttttgattttttttttttttgagacagagccttgctctgtcgcccaggctggagtgcagtggcacgatctcagctcactacaagctccgcctcccgggttcacgccattcttctgcctcagcctcctgagtagctgggactacaggtgcccaccaccacgcctggctaattttttttggtatttttattagagacaaggtttcatcatgttggccaggctggtctcaaactcctgacctcaagtgatctgcctgcctcggcctcccaaagcgctgagattacaggtgtgatctactgcaccaggcctgggcgtcatatattcttatttgctaagtctggcagccccacacagaataagtactgggggattccatatccttgtagcaaagccctgggtggagagtcaggagatgttgtagttctgtctctgccacttgcagactttgagtttaagccagtcgtgctcatgctttccttgctaaatagaggttagaccccctatcccatggtttctcaggttgcttttcagcttgaaaattgtattcctttgtagagatcagcgtaaaataattctgtccttatatgtggctttattttaatttgagacagagtgtcactcagtcgcccaggctggagtgtggtggtgcgatcttggctcactgcgacctccacctcccaggttcaagcgattctcgtgcctcaggctcccaagtagctgagattataggtgtgtgccaccaggcccagctaacttttgtatttttagtagagacagggttttgccatgttggctaagctggtctcgaactcctggcctcaagtgatctgcccgccttggcatcccaaagtgctgggattacaggtgtgaaccaccacacctggcctcaatatagtggcttttaagtgctaaggactgagattgtgttttgtcaggaagaggccagttgtgggtgaagcatgctgtgagagagcttgtcacctggttgaggttgtgggagctgcagcgtgggaactggaaagtgggctggggatcatctttttccaggtcaggggtcagccagcttttctgcagcgtgccatagaccatctcttagccctcgtgggtcagagtctctgttgcatattgtcttttgttgtttttcacaaccttttagaaacataaaaagcattcttagcccgtgggctggacaaaaaaaggccatgacgggctgtatggatttggcccagcaggcccttgcttgccaagccctgttttagacaaggagcagcttgtgtgcctggaaccatcatgggcacaggggaggagcagagtggatgtggaggtgtgagctggaaaccaggtcccagagcgctgagaaagacagagggtttttgcccttgcaaatagagcaactgaaatctgacaccatccagttccagaaagccctgaagtgctggtggacgctgcggggtgctccgctctagggttacagggatgaagatgcagtctggtagggggagtccactcacctgttggaagatgtgattaagaaaagtagactttcagggccgggcatggtggctcacgcctgtaatcccagcactttgggaggccgaggcgggtggatcacgaggtcaggagatcgagaccatcctggctaacatggtgaaaccccgtctttactaaaaatacaaaaaattagctgggcgtggtggcgggcgcctgtagtcccagctactcgggaggctgaggcaggagaatggcgtgaacctgggaggtggagcttgcagtgagccgagatcgcgccactgcactccagcctgggcgacagagcgagactccgtctcaaaaaaaaaaaaaaaaagtaggctttcatgatgtgtgagctgaaggcgcagtaggcagaagtagaggcctcagtccctgcaggagacctctcggtctctatctcctgatagtcagacccagccacactggaaagaggggagacattacagcctgcaagaaaagtagggagatttaaaaactgcttggcttttattttgaactgttttttttgtttgtttgttttccccaattcagaatacagaatacttttatggatttgtttttattactttaattttgaaacaatataatcttttttttgttgtttttttgagacggggtcttactctgtcacccaggctgagtgcagtggtgtgatcttggctcacctcagcctcgaccccctgggctcaaatgattctcccacctcagcttcccaagtagctgggaccacaggtgcgtgtgttgcgctatacaaatcctgaagacaaggatgctgttgctggtgatgctggggattcccaagatcccagatttgatggcaggatgcccctgtctgctgccttgccagggtgccaggagggcgctgctgtggaagctgaggcccggccatccagggcgatgcattgggcgctgattcttgttcctgctgctgcctcggtgcttagcttttgaaacaatgaaataaattagaaccagtgtgaaaatcgatcaggaaataaatttaatgtggaaataaactgaacaacttagttcttcataagagtttacttggtaaatacttgtgatgaggacaaaacgaagcactagaaggagaggcgagttgtagacctgggtggcaggagtgttttgtttgttttctttggcagggtcttgctctgttgctcaggctggagtacagtggcgcaatcacagctcactatagcctcgacctcctggactcaagcaatcctcctgcctcagcctcccagtagctgggactacaggcgcatgccaccatgcctggctaattttaaatttttttttttctcttttttgagatggaatctcactctgtcgcccaggctggagtgcagtggcgtgatctcggctgacggcaagctccgcctcccaggttcactccattcgcctgcctcagcctcccaagtagctgggactacaggcgctgggattacaaacccaaacccaaagtgctgggattacaggcgtgagccaccgcacccggcctgttttgtctttcaatagcaagagttgtgtttgcttcgcccctacctttagtggaaaaatgtataaaatggagatattgacctccacattggggtggttaaattatagcatgtatgcaaaggagcttcgctaatttaaggcttttttgaaagagaagaaactgaataatccatgtgtgtatatatattttaaaagccatggtcatctttccatatcagtaaagctgaggctccctgggactgcagagttgtccatcacagtccattataagtgcgctgctgggccaggtgcagtggcttgtgcctgaatcccagcactttgggaggccaaggcaggaggattcattgagcccaggagttttgaggcgagcctgggcaatgtggccagacctcatctcttcaaaaaatacacaaaaaattagccaggcatggtggcacgtgcctgtagtctcagctactcaggaggctgaggtgggaggatcactttgagccttgcaggtcaaagctgcagtaagccatgatcttgccactgcattccagcctggatgacagagcgagaccctgtctctaaaaaaaaaaaaaccaaacggtgcactgttttcttttttcttatcaatttattatttttaaattaaattttcttttaataatttataaattataaatttatattaaaaaatgacaaatttttattacttatacatgaggtaaaacttaggatatataaagtacatattgaaaagtaattttttggctggcacagtggctcacacctgtaatcccagcactttgggaggccgtggcgggcagatcacatgagatcatgagttcgagaccaacctgaccaacatggagagaccccatctctactaaaaatacaaaattagccggggtggtggcgcatgcctgtaatcccagctactcgggaggctgaggcaggagaatctcttgaacccgggaggcagaggttgcggtgagccaagatcgtgcctttgcacaccagccaaggcaacaagagcgaaagtccgtctcaaaaaaaaagtaattttttttaagttaacctctgtcagcaaacaaatttaacccaataaaggtctttgttttttaatgtagtagaggagttagggtttataaaaaatatggtagggaagggggtccctggatttgctaatgtgattgtcatttgccccttaggagagagctctgttagcagaatgaaaaaattggaagccagattcagggagggactggaagcaaaagaatttctgttcgaggaagagcctgatgtttgccagggtctgtttaactggacatgaagaggaaggctctggactttcctccaggagtttcaggagaaaggtagggcagtggttaagagcagagctctgcctagactagctggggtgcctagactagctggggtgcccagactagctggggtgcctagactagctgggtactttgagtggctccttcagcctggacctcggtttcctcacctgtatagtagagatatgggagcacccagcgcaggatcactgtgaacataaatcagttaatggaggaagcaggtagagtggtgctgggtgcataccaagcactccgtcagtgtttcctgttattcgatgattaggaggcagcttaaactagagggagttgagctgaatcaggatgtttgtcccaggtagctgggaatctgcctagcccagtgcccagtttatttaggtgctctctcagtgttccctgattgttttttcctttgtcatcttatctacaggatgtgactgggaagctctggtttcagtgtcatgtgtctattctttatttccaggcaaaggaaaccaacaataagaagaaagaatttgaggaaactgcggagaaagtgcgccgtgccatcgagcagctggctgccatggattgaggcctctggccggagctgcctggtcccagagtggctgcaccacttccagggtttattccctggtgccaccagccttcctgtgggccccttagcaatgtcttaggaaaggagatcaacattttcaaattagatgtttcaactgtgctcttgttttgtcttgaaagtggcaccagaggtgcttctgcctgtgcagcgggtgctgctggtaacagtggctgcttctctctctctctctcttttttgggggctcatttttgctgttttgattcccgggcttaccaggtgagaagtgagggaggaagaaggcagtgtcccttttgctagagctgacagctttgttcgcgtgggcagagccttccacagtgaatgtgtctggacctcatgttgttgaggctgtcacagtcctgagtgtggacttggcaggtgcctgttgaatctgagctgcaggttccttatctgtcacacctgtgcctcctcagaggacagtttttttgttgttgtgtttttttgtttttttttttttggtagatgcatgacttgtgtgtgatgagagaatggagacagagtccctggctcctctactgtttaacaacatggctttcttattttgtttgaattgttaattcacagaatagcacaaactacaattaaaactaagcacaaagccattctaagtcattggggaaacggggtgaacttcaggtggatgaggagacagaatagagtgataggaagcgtctggcagatactccttttgccactgctgtgtgattagacaggcccagtgagccgcggggcacatgctggccgctcctccctcagaaaaaggcagtggcctaaatcctttttaaatgacttggctcgatgctgtgggggactggctgggctgctgcaggccgtgtgtctgtcagcccaaccttcacatctgtcacgttctccacacgggggagagacgcagtccgcccaggtccccgctttctttggaggcagcagctcccgcagggctgaagtctggcgtaagatgatggatttgattcgccctcctccctgtcatagagctgcagggtggattgttacagcttcgctggaaacctctggaggtcatctcggctgttcctgagaaataaaaagcctgtcatttcaaacactgctgtggaccctactgggtttttaaaatattgtcagtttttcatcgtcgtccctagcctgccaacagccatctgcccagacagccgcagtgaggatgagcgtcctggcagagacgcagttgtctctgggcgcttgccagagccacgaaccccagacctgtttgtatcatccgggctccttccgggcagaaacaactgaaaatgcacttcagacccacttatttctgccacatctgagtcggcctgagatagacttttccctctaaactgggagaatatcacagtggtttttgttagcagaaaatgcactccagcctctgtactcatctaagctgcttatttttgatatttgtgtcagtctgtaaatggatacttcactttaataactgttgcttagtaattggctttgtagagaagctggaaaaaaatggttttgtcttcaactcctttgcatgccaggcggtgatgtggatctcggcttctgtgagcctgtgctgtgggcagggctgagctggagccgcccctctcagcccgcctgccacggcctttccttaaaggccatccttaaaaccagaccctcatggctaccagcacctgaaagcttcctcgacatctgttaataaagccgtaggcccttgtctaagtgcaaccgcctagactttctttcagatacatgtccacatgtccatttttcaggttctctaagttggagtggagtctgggaagggttgtgaatgaggcttctgggctatgggtgaggttccaatggcaggttagagcccctcgggccaactgccatcctggaaagtagagacagcagtgcccgctgcccagaagagaccagcaagccaaactggagcccccattgcaggctgtcgccatgtggaaagagtaactcacaattgccaataaagtctcatgtggttttatctactttttttttctttttctttttttttgagacaaggccttgccctcccaggctggagtgcagtggaatgaccacagctcaccgcaacctcaaattcttgcgttcaagtgaacctcccactttagcctcccaagtagctgggactacaggcgcacgccatcacacccggctaattgaaaaatttttttttttgtttagatggaatctcactttgttgcccaggctggtctcaaactcctgggctcaagtgatcatcctgcttcagcgtccgacttgttggtattataggcgtgagccactgggcctgacctagctaccattttttaatgcagaaatgaagacttgtagaaatgaaataacttgtccaggatagtcgaataagtaacttttagagctgggatttgaacccaggcaatctggctccagagctgggccctcactgctgaaggacactgtcagcttgggagggtggctatggtcggctgtctgattctagggagtgagggctgtctttaaagcaccccattccattttcagacagctttgtcagaaaggctgtcatatggagctgacacctgcctccccaaggctttcatagatcctctctgtacattgtaaccttttattttgaaatgaaaattcacaggaagttgtaaggctagtacaggggatcccgcataccgttctcctccttttccccgttgtgaggacagtgcactgtattcactttcaacatccaaggtctgtgttgagagggtgagttgtgcggcccagcttgccccaagcccgtcttgccatcacgaaggatttcctgactcagctgaatctagctcaacaaagcaaaggactaactaagctgcagattttctctccgctgggcttagcctacattatttacacctgttttcagctggatgggaccaaactggggccttgacttctggggtttccacgtgatccccaaagaggagacatccattcattcactcaggtatttgcttgtgcacctactgtgcgccaggtgccagatccaggaattgaagcccaggaacaactcttgcagtgagctccccgggtttttgttttctgaacggtgggaagacaggtcagcaaatagccatgcacgtctgcacatgtgtggctggtgtctgcaggagtaccgagaagacggtgagctctgccctggatggcaacaggaaagggcatccctgtgcagctgtttgtcctggcacaggtggcaggctgccagcgggaccaggaagggaaggggaggatgcacaggtcggagggaacggaacgggcactgcaggtgcgctctgcgatgtgaggaaggaagcaaaggctggttccgggatgatgtcggagaagccttgcagcctagggcactgcccattccacgttacccagtgagtcaaagcctcccagaaagacatttagtcactcaaagccagtgcaggtctcagctttgtccggggaggaactttcactctagaaaacacgaactcatttccctttgaggaagttgtttctccaggatatcatttccagccaccatccaggatgctgggcaggtgctgcagtgcccaaggcacggctgccgaagaagcttgtcccttagaaaccccttgtggcctcggaggcgcctgcctgcctccctgagaatggaaccctgttgggccgccaggctcgctgggcaggtgctggggaaggctgggtcaccgtgctgagcccctcacaggcctgggagttgtgcttggggaggagagctcccagctctttggctgcctcccaatcatggccacatctcacaaacaataccactgtccacgaaaaatgaaaaggtgcctggttctaacccatggccccaaccatgaaagagcccttagaatgtgggggtttgactcgaacagtggctttgagtctcccaggggggattagtgtcctaatgccctgagttaatgaattgacttgttggacagggaaactcagtgaggttcattttctgtggggggacgtttgtcaaatgctgtgaaatcagttgtagcatacgcgacgctcagctgctccgacagtgactcagccacggctccagctgcttccccagccctgtagtggaggtggcagatggtgtcatcagcctggcgcagagggctgtgcccactggcatcacaagggccaggcctgctggtcctccagccactggatccaggtagttacatatgggtttaaaagaagagaggcagggccagttgcggtggctcatgcctgtaatcccagcactttgggaagccgaggtgggtgatcatttgaggttaggagttcaagatcagcctgaccaacatggcgaaacccagcctccactaaaaatacaaaaaaattagctgggcatagtgctgggtgcctgtagtcccagctactcaggaggctgaggcaggagaattgcttgaacccggaaggcagaggttgcaatgagtcaggatcatgccactgcactccagcctgggcaacagaacgagactctaaaaaaaaaagatcaataaataaaataaaaataagagaggcagggtgggaatattacttgaggccaggagtttgagaccagcctgggtaacaaagcaagaccctgtctctaccaaaataataatttaaaaaattacccgggaatggtgtgacatgcctgtggtcccagctactctggaggctgaggtgggaggaacactcgcacataggaagttgaggctgcagtgagccgtgatcacaccactgcaccactctagcctgggtgacagagcaagacctcatctctggggaaaaaaaaaaaaagaagaggcttggaagccacattgttttttgtcacttataactagagtttcgtccatcaaaagcccattctgcactgatttcagtgataggggtctgatgctggcttggaagagggcctgacagcttagagacaggcttggagttccaagttgatgaaagaacgatgaataatgaaaaataatgtgttgttctaaagtagtgccttttcatactgagctagggtataatttgggtccatttcaagggaaatatactagcagaattcatcaaagtagcccctcgaagactggtgcctgctgcctacgggacaatttaatcagtggttccagctgcacatctagagttgggaacactgaacccaggctttctcatgcagatggggtgtggattgctaaggtggctgtctcctagcgctgcagcatgagtgaaacacgtgtccattctacagagacgcggctccgtgatgctgaaacctccttctttttttttttttttgagacggagtcttgctctgtcgcccaggctggagtgcagtggcgatatcttggctcactgcaacctccgcctcctgggttcatgcaattctcctccctcagcctcctgagtagctgggactacaggcgcgtgccaccatgcctggctaatttttgtatttttagtagagacagggtttcaccgtgttagccaggatggtctcgatctcctgacctcgtgatctgcctgcctcggcctcccaaagtgccgggattacaggcgtgagccactgcaccccgctgaaacctccttctagataacagcggcgttaagcatttttttttttttttgagatagagtgttgctctgttgcccaggctggagtgcagtgatgcgatctcggctcactgcaacctccacctcccaggttcaagcaattcttctgcctcagcctcccgagtagctgggactacaggcacacgccaccaggcccagctaatttttgtatttttagtagagacggggtttcagtatattggccaggctggtctcgaactcctgacctcatgatccacccgtctcagcctcccaaagtgctgggattacaggcgtgagccactgcacctggccaaaacctcctcctagataacagtggcgttaagcattttttttttttttgagatggagtcttgctctgttgcccaggctggagtgcagtggtgtgatctcagttcactgcaacctctgcctcccgggttcaagtgattcttctgcctcaggctcctgagtagctgggataacaggcatgagccaccactcccagctaatttttgtatttttagtagagacagggttttgccatgttggccaggctggtctggaactcctgacctcaagtgatcctcccacctcggcctcccaaagtgctgagattacaggcgtgagccactgcacctggcctttttttgttttttaagacagggtctcactctgttgatcacagccacagctcactgcagcctcaacctcctgcctgggttcaagcaatcctcccaccttggcctcccaggtagctgagaccacaggcacaagccaccatatctggccctacgtaagctttatgtgggtgcaataacagatctcaaaccagctctcagctcaagagaaggggaagctgggcacagtggctcacgcctataatcccagcactttgggaagccgaggcaggaggatcacttgaacccaggagttcgagaccagcctgggcaacatagggagacccctgccctccctgtctctgaaaaaaaaaaaaaaaaaaaaagaaaggagaggctgggcttggtggctcacacctgtaatcccagcactttgggaagcccaggcaggaggatcacttgaaccctggagtttgagtccagcctgggcaacatagggagaccttgtctctaaaaaaataaatagagtgagagagagaaggggaagtcaccgggaggacacacatggagcacgcagcccaaatggggctcctctgttctccctgcagagtcagttcgtacctttcacatgcacaaaggtgttgatccaaccgaagcaatattgattcttgttatattgctttattgtggggtcagtgtcagagtaccacgagttttcatcacgcaccgttctttccccagctgcagtgtgtttagggggggaacgaggccccaccccctatccctatcgcctctgcctttataacggctgctactctctgagcacctgttgagttctttcaccttccagatctaatgtgctatccccacccctagagaacagggctgctggatgccacatggctcccagagaggggctgtggtcagggaagccccagctccaagggggctggaaaaccccagagctgcccacgtgcggcaacacagtctggtgctgcaggtgtgaggacggctacaaaatacctgagccattctgtcactctgtctgaactctgtttgaaatattgtttcaataactgctaggctggtttttccttcctgactatattcctcaaaccaacaagagcctagcagaggaaagcatggccaaaacgccccaagaagagagccttggcttcacctccaagggccaccatccgggaggatgtcctcagacctctgatcccctctctgcaggctctgcccagccctgtgtggcaacccagaggaagcctccccttcgtttgagatttaaccccagaccttaggcgatggctgcccagcctgtcccttccgcctgtgtggctgcccacgcgggcgttgctcatggggctagtcctgggtggatgggtgggggcctctcgccggctcctctgcctcccacccccactggcaccccacgcctgtcctagaaggttctttctgcctgttttctccgtgagtgactggacaggcagaggccggccttgctggagggggcatttgtaattatgagtgaatccaaaacaaggttttttccttccgcagccccccgcccggctgtggggcccagccactgcacttcaccggatgccgtctggttggtcctcaggactgatacagaccaggaccccagggccagcccgtgccaggctcctatgcttccaggagcacgggtgggtggtcctgctgcctggccggccatcctcctggggtcggtctctggccgatcctccctcctcctctcaagccctgcacagcccggccaggcaggtgcatcttgtttggctgctgaggagccgggggttcagggaaattaaggaacgtgcccagggacccggggccagcccgtggggacgctgggattggagcccaagccccaggttcgccgcgcggctctcgacttcctctcctttcccccaggggcgagctcagcgaccgcagagaggtggggtcgatctccctgcgaccccagggggcccgcgaggccagtgcgcgggcaggagcggggacgtgctcagaagagccgggcgccgccgcgcccgcccgccccccgtcccccggctcccggctccgcgcgccccccgccgcccccggggccctgctacccccgacccgtcccctcccgccggccgcccccatggcccggctgggcgcgctgctcctggccgccgccctgggtgcactgctcagcttcgcgctcctggccgccgcggtcgccagcgactactggtacatcctggaggtggcggacgccggcaatggcagcgcctggcccgggcgcgcagagctgctctcctcgcactcggggctctggcgcatctgcgaaggtaaccggccaccgcgccggccctcctccctccgcgacctcgtccctccgacacccccttaaccccgccctgctcgtgttgccccgccagacccccttccaggacccctctcttgcatcccgctctgccccagggtgtctctccgctccctccccatcaccctccgtcttcccccaaaactgacagcccaagggctacaggagggagggagcccagttcggggcccctcacagccggaggagggggctgtggggcgacagtgggggagggaagcctagaggtgtgtagttggggggcctcatccaagtcaccaggggttgtttcttgatcacgctccccggggtttgggcctggcagccccttgtccccgtccctgtcaggcactgtcagagctgttcaccccacacctcctgatgccgcgggggcaggggttccaaatgtgtacagaggcttcagagtccggggagagagaaggggatcccagcaggctggagggtccacagggccccctccgttccccccagctccctcctccggagctggggccagcctggggagcttccccttcacagcgcgagggctggcagggcaggggtgtgtgtgtgagtgagcatgtgtgtgcatctgaatatgtgtgcatgtgctgaacatgaacatgtgtgagcacctggctgtgtatgtaaatatgaatatgtgagtgtgagtgtatgtagttgtgtgtgcatgtgaatatgagtgtgtgagcatgtcagtgtgcatgtgtgtgcatgtgagagtgtgtgggcatgtatatgagtgagtgcatgtgtgggtggtgcacatgtgctggtggcttcctcagtgcaactggggaggagttaggagccttgtgttcatccaacagactgcctaactgtgctccaaagacctcctgacatgcacctgtgtgcacgtgtgcacacgcctgtgcctatgcaggtggctctgcacgcgtgtgagaaccagagagtatgtatgcccacatgacacgagtcaggaagattccagagcgaggcttcccaggagcccgttttgtacaccctttttcctttcaggcaaagcctgagttccacacacaaacgcattacaaggacccctgcctgagggactctgagggggcctccatggagcgtttgaaagtttaaacatgcacctgtgcaggcataacttgcacgtgaaaataaacaaggtgaaggctgggcccggtggcccacgcctgtaatcccagcactttgggaggccgaggcgggtggatcacgaggtcaggagatcgagaccacagtgaaaccccgtctctactaaaaatacaaaaaattagccgggcacggtggcgggtgcctgtagtcccagctacttgggaggctgaggcaggagaatggcgcgaaaccgggaggcggagcttgcagtgaaccgagatcgcgccactgcactccagcctggggtgacagagcgagactccatctcaaaaaaaaaaaaaagaaaaagaaaataaacaaggctaaaggtcttgggccttttcatcccacttggagtcccagccctgagtttcagcagaagagaagctggcagggccctgtggtgccagggggtcccctgggctcgggtaggctgctgggtgcaccacagcgtccaggccccaggcttcgaggcctatgtttcccagggcagaacggctgcatcccgctggtcgacccttttgccagtgagagcctggacgtctccacctcggtgcagcacctcatctgtgagtcctgggtggggccacctccccatcctttccaaatattcaggcaaggcagatcccagccatccccatccccatcccgcagcactgcttccactgcccctgcgtttccaagaggacgtttccacgcagacctgtcccagtgctgtgctgctgtccctaaccacaggtgcccagctcccagcctatcctgttttcccctgtctcagtttccctctcagtggtgatggctcatccctttgttattggggaagccaggcagctcccagcttggctggatcctgcgggccttgcagactcctggctccccatttaggactcgattcttccagatggcctgctgtctacctggctggcaccttccacctggcgggttgggggacatgtgaggcctggggatgggggctgggagtgttctggggacgcctcccctcctggccttaggaagcccctgccagagtcagagggggccactgggagggtccagtggtgtccacagagatgggcgtcagccgcttttcctgagaagacgaagcaccacgtcactgtcctccggcagacaagtgctgaagggcccacctggaccagaattctcacctgagccccctttcctgcagtgctgcaccgtgcagtcattgtggtcctgcccctgagcctggtccttctcgtgtgtggctggatctgcggcctgctcagctccctggcccagagcgtgtctctgctgcttttcaccggctgctacttcctgctggggagtgagtctggggccctgggggaatggctccaaagatgggagctgggccacaggtcccgggagtggggtgctgcctctcctgttgccctcgtcccctgctcccttctgggcgggtgctgagtctggcgatggagccgtggcaggcagctccctgtggttccagaaggtacccatgtatatttgttctcacgttgctataaagaaatgcctgagactgcgtaatttataaagaaaagaggtttaggccgggagcagtggctcatgcctgtgatcccagcactttgggaggctgaggtgggtggatcatctgaggtcaggagttcaagaccagcctgaccaacatggtaaaaccccatctttactaaaaacacaaaaattagctgggcttataaagaaaagaggtttaattggctcatggttctgcatgctgtagaggaagcatgatgcttggcttctggggaggcctcaggaaaatgacaatcacaggcggaaggccaaggcagggagccagcatttcacatggctgggacaggaggaagagagtagggaggtgttacacacttttttttttttttgagatggagtttcgctcttgttgcccaggctggagtgcaatcgcatgatctcgactcactgcaacctccgcatcctgggttcgagcaattctcctgcctcagcctcctgagtagctgggattacaggcatgcgccaccacacccagctaattttgtatttttggtagagacggggtctctccatgctggtgaggctggtcttgaactcctgacctcaggtaatccacctgcctcagcctccctaagtgctgggattataggtgtgaggcaccgttcccagctgggtgctacatagtttttttttttttttttttgagacggagtctcgctctgtctcctaggctggagtgcagtggcgcaatcttcgctcactgcaagctctgcctcccaggttcatgccattctcttgcctcagcctcctgagcagctgggactacaggcacctgccaccacgcccggctaatttttttgtatttttagtagagatggggtttcaccatgttagccaggatggtctcaatcttctgaccttgtgatcctcctgcctcggcctcccaaagtgctgtgattacaggcatgagccaccatgcccagccctgggtgctacatacttttaaacaaccagatctcagaactcactcactatccagagaacagcaccaagggaaatggtgctaacccattcatgggaagccactgccatgatccagtcatctcccaccaggcgccccctccaacactggggattatcattccacatgcgattcgggccgggacaccaaaccctagcaccgtgataggagcagggcttctggttgtgggtcagagcctgggacagggaggagcaccggggtccaagcttcttggtgcggggggcatgagggcctccagggcaaccccaggacctgctctactgggtcagatcatgcgggggggcctggggccagcccctcaccacacccttctccttcctgtactgtcctggtgggaggagcaagggttccggggtttggcacagatgaggcagggccaggcatgaaggcaggtgagacagggcaccagaggcctcagctctgaccccagcacaggctgagactgtaaccggtaaccacccatccactgacgcggctccagctctgactacatgccgagtgctggccaagtgctcctccgaaggctcctccgagggccccccagtcccagctgcaggtgagaaatctgaggcctggagagggccgagggcctgggctccccttcacccccactggtgctgtctcctcagtttccaccgactgcccagcactggctgttgcggaaggtggactaggggctcctgacagtctgtcctcagccgcccctgtcaatcaaggctaggcccgagccaggccctgatgtctcaggccagctccactgtcaaggctgtggccacaaggagcagaccatccagggctgggggcaccctccctgtttctctgggaggcctctgtcactgaggaggcccgactgggtgcagagattggggaaaccagcagccttggtattggtcacaggccacatgagaacaacagtgaagtcaaggtctcctctagacaatgaaatcaggaagaatccaaatgacctgaccctgcggcccatctgtgagtgttcaaaatccaattaagaggaccttcgggagccagcgactagagtgtaattgggttgggattgtaaccagaagaacttacagggacacggaccctctgcattgtgcctgggagcgaaggcaccggctagggggtggaggggccggaggtagctggtggatgggtgggggttccactgcgactccagcctccccaggcagagggggcctccatcctagtatgagggtcagctgtgggccgaagcacagagggctctcaggatgtcacaccaaaggcacctgcccagggtcagctcggccctcacccctcactagcactgcaaggagggggagggagatagagggccccagatcgattgggtgcccttccctgagacaggatcttggggggcctgggggaccgacagggcccacggtgacagagtcctttagagtttcccagcttgaggttgcaggtgccagccgcagaggcctcctttaggaggtctgccaggagctgagcctgggccccatcaccagggatttgggaggtacttcaggtcccagtttgggagcttactcttcaccttcattttgggagaaaggccgtgtcctcggccaggctacaggaggcagctggtgtttggagagggctcagctggtggggcggcctgccaggaagtggggccttgggctgcagctgcagccagtgctacaggcagagacaggcagagacaggcacctcctgccgcacggtcagcccccgctgctgggggctgacccccacccctgcttctcccagggaccgcttcattcaatttggcttcacattcttccccaaaataaatccataatttctgttgctacgctgcccagccgggcaggcatccgtgtgtcctccctccctcagcctccccatgccttcttctccccactctctgtcccactcttcttcccaagtttggttcccaggaggaatcacagaagaccaggctgtgttgtgccccttcactgggcaccagtgagatccagacctggccctgaatgtcagcttgggtcagttgccttcttttggctgggcagtgcccagaggggaccctgtgcacccaggaagtgcctgtggggaaatcagggccacctgcccccctggctaacattccctacagtcggcgccaaggacaggctttctcatcagcctgaagctgtgggaagggggtggcactccgggctggttcctccaagctcagtggacaggaaaatgccctggaggcatgggccgagtcccctacctagctcgttgctggaccctgaactgccggatgaagcctggtgcccgccaccctgtgcaaagcccagcttcattcctttgacaacagctttgaccatgtggagagcgggagggaggagagaggagggcccagggcaggcatcctcccctggggaagggcctgaaactcagagctgggaggacaggggggctctggaaggggagtcagagggagggggatgttagccccggaggtagggagggcaaaggtgtgaggaagaggaggcgggggtgcagggcagggactcactctgatcagagcactgggcaacgctgctgccagcagaggccatggctctgtgtgtgtgtgtgtgtgtgtgtgtgtgtgtgtgtgaatgtgtgcaaatgtgttcgtgtaggtgtgcatgtgcatgtgtgtgctgggggccatggagggtacagagtgtgtggggggcagttatgtgagtgggaaccatgttgaggggcaggtggcactgtttgcaggaggctttatgggatgaggtctctgaggtttgaggactgaattggagcctcttaaagctccactccgccaaatgcagttgactacctttagccctgtccaaccccaagcaggaggtggtgtctgggagaggcggccaggttgacagccaggcagggctaaccatgacaggaagggcggtgtgctgcctgcagctctgcctgaatgctagcggggccggggatgctgaggccatgtctgcaggaccacctgggcctgggcccgctagagcagacaccgagcagctgccctccccatctctcccccaggtgtcctgacactggcgggggtcagcatctacatcagctactcgcacctggcctttgcggagacggtgcagcagtatggcccgcagcacatgcagggcgtccgcgtcagcttcggctggtccatggccctggcctggggctcctgtgccttggaggcattcagcggaaccctcctgctctcagctgcctggaccctcagcctgagccccccaatctgtggtcatctgagtccccagcaggtgggagggaggtaagagggggctgggtttccctttgcacctcccgggattgggcggtcagggccagggccccttgagagtctgggaatcccttctctgggcctcgctggggtcctggccaggaaggggctgggggtgacaaggggtggagggcagagccaagaatccagctcctcatgtttctctgtagatatttggggaggctcccctgccccggcaggcttgttagggactaattggttcaaccgcctcttagagatgagaagagccagtccagaaagaggaagtaagtggcccaggtgacacaggctgagtggcagagttgggtgggggcacctctcaagggtgtggcctgaactcgcccctcccccagcaggctagtgagtcactgctgcccccattcctaaggacctgggagaaaagtaggtgcctgttaaatgccgcaggactgggctccatgctcctctccagccccgcaatggccctactcaatgactaccctttatccattttacagagggggagactgaggcccagagcggcagagggacccacccagatcgcctggcgccagagagatgccgtctcaggccaaggcctccctggcctctgttctgtccactctccccgaagggcaggcttggtggagaagaggctgatgagagggcccgagagcccctccgatttgcaggggtggggggcaaggagctgagcgatccagatgtacccctctgccccctcccttgttctcaagcctgctaggtacttttcactgagcacttccgggaagagcaggcacccagatctctgtccttgtcctggcacaggctgctgctgcttccggcccccgacccttcctctctgcagcaacccgggggaggtatgccactgtgagtgccctggtgggcacactgagctggcagagatggaagtcccagaagggtggggtgggggtgtcatgccatggtggaggagtttggggccactccttgcctgcctcaaagggggcctggctgagggtgcttcttgaccacaggggccagggctgcctagggtggcgcagggctgggcctggagtttgggatgcaggcttgttaaacacagggcagaaccccaggttgggaggggctcagtttgcaggcccaggcccgcaggcccactgctggtcccagggtgagacaggtgagaagagggatggccagcacacacttgagtccccttgggccacaaaggctggggcacgcccaccgttatgcagatggacagttgaggtggctgcaggagaagggttcccagggcctgtacaacacgtggaagcactaaacggccccgtttggggtttgggggcccttcccgagtcttgagaggtcttgagaggtgtgctggggaaggtggcagcctcttgtagcttgatcttcctccaccctgccccacccctaggtctctttattgattcaaaggttaaggaagctcctgggggcttgagggggtggcacagttttggtggggcccagtgaggacaaatctggggggtgagcagggcctcctcttcctcctggtgtttgaacgtttaccattccatgtgggaccattgtgccaatttgtccttaagtaaatcacttgtgctgtgtgcagtataagccttttatttttcttagaacttttcaaaataggtaacacatgcctgtctgtcataaacagtacaaacgtgagcaaacactgtcaccagctgtgcgcgtgtctgtctgtccatccagaggtgttctgagagcgtgtgtgcacgtgtgtgtgtgtccactgtgaagtcatctgtagacatacaagcctacttcttattcccagatcagcacagggagtggggaggggggcctgggtctccgttttggaaacgggggctggcttcgtgggcatgtcctctcagcttgggaggaaaggtgtggcggactcttcctctcctcctcctggcccccaacttctgctgatgaggcttctcctgggggtttgctgggaagccagggatgtgagcctaacttcaggcctctcacggcagatgtgcttgggctctggggataggacactggggaagacacaccggggaggggctgctgggaccaccagcgttcccggagagtgtgtgtggtggggagggtgtgctgcttgacccttcccttccagaacagagctgcccaccttgcctccacgtgttctggggcgtgtggaacttagccaggccaggtaacttcttcactctctcattggccagccacatccctcaccctctggttggttagtggactccctcacgctctgattggctagtcaactccttcactctgactggccagccacatccctcaccctctgattggctagttgactccactctggccagttgatgccccacactctctgattggccagtcagtgttccttaccctctgaatggccagttaactccctcactctctggctagtctccacagtgattggcccaagggttctgtctgtgttcatggttctctgagtgtcaggctttgcagctgtgattaagaggcggatgagtgcctcccagggaagagacagtgcatggttcaaggtcacccagaatagacaacatgacatcaggctcaaatggtgctgcgtcgtttacagcaagaggagagagcctgtgcaccaaaaccgcttgcaatggtggttcccacggtgggatccactggcccacgtgggcctctttcttcaattttttcttagaatttttcaaaataggtaacacgtgcccttgtgccacaaatagcacaaaggcgagtaaacactgtcaccagctgtgcgcacgtctgtccatccagaggtgttctgtgtgtgtgtgagcaagcgtgtgcacgtgccagaaacaagccctgactcagaggcccttcccccagcatcgaaggcgcttgctcctctcgccacagcaaagccccttctccagggatggcccagctccgccaggtcctgggcccactggcatcccactcgggcatgtttatctgcaccacctggtaggtgcccctgccaggggcctgacctctgtgaggacaggggcctctcatcagctcaggccctatgcccaaccagcatttataaatgcagtaggcagcccgcaagagagcccccatctgtcctcatctcctggtgctcacgcctctgtaggccttaccacactgagtcagcgctgacttgggtgtcaagtaggaagtaccagcgtgtgagggggtcataaaaaggcagcttctgcctcggtctcagactgctcaccctaggggaagcaagtcatcagactgtgaagacactcaggaagccctgaggagatgctcacatggacaggactgaggcctccgccaacagcagcagcagcgtgtcagctgtgtgaggacaccacctgcgagaggattattcagataatgcagttctcactgatgtcttgacggcaacctcgtgagaaactccaaaccagaactttccagctgtaagccactcccaaattccgcctctcccccgctttttttttgagacagggtctcactctgtcacctaggctggagagcagtggctccatctcggctcactgaggcatggcccttctgggctcaagtgatcctcccacctcagcctctcgagtagctgggaccacaggtgtgagtcaccaggcctggttactttttttgtttgtttggttttggttttttttgagacagagtttttgctctgtcgcccagtctggagtgcagtggtgcgatcttggctcactgcaacctctgcctcccgagttcaagcgattctcctgcctcagcctcccaagtagctgggattacagatgcgtgctaccgtgcctggctgatttttgtatttttagtagagatggggttttaccatgttggccaggctgatctccaacttctgacctcaggcgataccccatgcctcggcctcctaaagtgctgggattacagacgtgagccaccacatccagccacctggctactttttgtgtttgtagagacggagttgcaccatgttggccaggctggtctcaaacttctgggctcaagcagtccacctgccccggcgttccaaagtgctgggattgactacaggtgtgcgtgagccaccacacccggctcactctccaattcctaacccacagtgctatgggaaataatgattgttgctttaaggcagtatgttttggggtcatttgttatgcagcaatggataaccaatataatgcacttttgctggtgcttgccccagacagggcagtaagggagacacggaattacaggggcttagagttactggcttccttctttttttttttttttttgagacggagtcttgctcttgtcacccaggctggagtgcaatggcgtgatatcggctcaccgcaacctccgcttcccgggttcaagcgattctcctgcctcagcctcctgagtagctgggattacaggcacctgccaccatgccctgctgatttttgtgcttttagtacagatgggggtttctccatgttggccaggctggtcttgaactcctgacctcaggtgatccacctgcctcggcctcccaaaatgctgggattacaggcatgcgagttgctggctttcttttgattctctgagttaccaccttctccagcacaggacagcagttctggggccctgggaactcctgtatacggatcttccacagtatggatctggattcttctaagagatggagggacagagggaaactcccctttgcctgccacgtggactcttctccccttacactcactgcagtccaagatttccaccgtcccctccctccctcccttccttccttttctttctttcatttctttcttgagacggagtttcactcttctctggtgcccaggctggagtgcaatggtgtgatctcaggtcactgcaacctctgcctcccaggttcaagtgattctcctgcctcagcctcccgagtagctgggattacaggtatgtgccaccacgcccggctaattttgtatttttagtagagatggggtttctccatgttggtcaggctggtcttgaattcctgatctcaggtgatccacccacctcagcctccctaagtgctgggattataggcatgacccaccacacccagcccatgctgtggtttctcatagctcttcctctagtccaggccccctcctgagctctgtgcttacattcctggcagcttcttaaccacctcttcttggggtctcaaagttaacaatcttaagctaaagtctctactttaccattctaaacaatcctccttctgggattcctattaagggctttctaaagcactgatctgactgtatacctcccctctttaatacacacacacacacacacacacacacacacacacacacacacacgcagagatttatatacatatatacatatccagaatgaaatagacaaaaatattaatagttattcttagatgataaaaatacaggtaatttttattttcttcttcttcttctttttttttttttttttttgagatggagtctcactctcttgcccaggctgaagtgcagtggcgggatctcggctcactgcaacctctgcctcctgggttcaagcacttcttctgcttcagccccctgagtagctgggattacaggcacgcaccaccaggcctggatacttttttgtatttttagtagagatggggtttgctatattggccaggctggtctcaaactcctgacctcaggtgatccacctgcctaagcctgccaaagtgctgggattacaggcatgagccaccatgcccagcctctttattctttttaatattatcacaagttatttatttatttatttatttatttatttattttttgagatggagttttgcccttgttgcccaggctggagtgcaatggcacgatctcagctcactgcaacctccacctcccgggttcaagtgattctcctgcctcagcctcctgagtagctgggattacaggcacatgccatcatgcctggctaattttgcatttttagtagagacagagtttctccatgttggtcaggctggtcttgaactcctgacctcaggtgatctgccctcctcggcctcccaaagtgctgggattataggcatgagccaccgtgcccagccattatcacaagttatttatacttcctttctcttgttcttgatcagtctcattagaggtttatcaattttattactcttttcaaagaactatcttttgtttatctggatattttctcttgatttatctccctcttcactaattctctctccagctgtgtctcatctactattcaacctatctactgagttcttaagttatcatatttttcagttctagaatttccatgtggccttcttatagttccaagattcctgccaaattttttttatcttgacttataattccttgaatattttattttttatttttttgagatgggggtctctctgtgtcacccaggctggaatgcagtggcacaatcttagctcactgcaacctccacctcctgggaggctcaagcaatcctcccacctcagtcccccatgtagctgggtctacaggtgccacatctggctaatttttgtacttttaagtagaaacagggttttaccatgttgcccaggctggtttcaaactcctgggttcaagcaatctgcctgcctcggactcccaaaatgctgggattacaagcatgagccaccacacccagcctagaatatttaatttaattaattaatttatttatttattttgagacggagtctcaccgtcacccaggctggagtgcagtggcgcaatcttggctaactgcaacctctgcctcccgggttcaagcgattctcctgcctcagcctccagagtagctgggattacaggtgtgtgccaccatgcccagctaatttttgtatttttagtagagatggagtttcaccatgtttgctaggctggtctcgaactcctgatctcaagtgatccacccacctcggcctcccaaagtgctgggattgtaggcatgagccaccacactcaagctatttatttttttagagatgggtctcgctctgtcacccaggttggagtgcagtggcatgatcacggttcactgcagccttgaactcctgggctcaagtgatcctcccacctcagcctcctgggtagctgggactacaggcacaagccactttgttatctgggtcacctaagggtctgtttctttttttttttttttggagacagagtcttgctgtgtcacacaggctggagtacaacagtgtgatcttggctcactgcaacctccacctcctgggttcaaatgattcgcttgcctcagcctcccgaatagctgggattacaggcccacaccactatgaccagctaaatttttttttggatttttagtagagatggggtttcaccatgttggccaggctggtctcaaactcctgacctcaagtgatctgcccgcctctgcctcccaaagtgctgggattagaggcatgagccactgcgcctggcctcttttgtccatttttttctcattttcaatcacatcttgtcccattctatacctggttatttctgattgagtgggggcatcccacatgaataactgtagaggaaattggaggctctgggagacgtcaccttcctccagagaagacggatctttacttctggcaggcagctaggccagaggcacccaccaccccagattgccgtaatcagggatcacagtgcttcacagctggcttcacttctcacgatggtcagtctacttccaattgcccttactcctagtgggtggcccctcagggactcaacccaaagcttgagggtttttttgtttgtttgtttgttttttgagacagagtcttgcttgagggactcttaccagggtctttcagcaggccttgaacttcagcttctgccctcagccctgtgtgcctgtgaaaagttctgctcagttcctcagctcccgagcagacgcgtcgaggaaaagtgtcccaaatgccaggctcacctctctaggttccctcttctcccagatcttgacctcacaattcatgactgccttgcaggctcttcagtactatcagattgtttgtttgtttatttgttgagacagggtctccctctgtcgcccaggctggaatgcagtggtgtgatctcggctcactgcagactccacctcctggacttaaatgatcctcctaccccaggctcccacgtagctgggaccacagatgcacaccccaccacgcctggcttcatttttttttttttgactgagtctgcctgaactaccctaagagttgctaaaagtaagatttactcccacatcatctacaatacagacatattattttgttaagcagagtaatttcttttccttttttttttttttgagacggagtctggctctgttacccaggccggagtgcagtggcgtaatctcggctcactgcaacccccacctccccagttcaagcgattctctcacctctgcctcccgagtagctgggactacgggtacgcaccaccacacctggctaatttttgtatttttagtagagatggggtttcaccatgttggccaggctggtctcgaactcctgacctcaagtgatccacccacctcggcctcccaaagtgctgggattacaggcgtgagccaccatgcccggccctgagtaatttattttctaaaaaggaaaatacgtattagaggaccacaagataaaatggaaatccctcaccacggcagttaaagccctgaccatcaagttcccatgtccctttctgcttccttctgacgtttcccttcctgaactcaggaagctgtaactggccacgtggccctgaagaaagggctcctctctgacctagagcgaaggcctgccccgctgcctcccgagctctggtgacgggagctggaagggtgtccttcctgtccctacaccctgtcccagacactggaggaattcagtgtgtgctgacaagcatgggggaggtcctaaccctgagtgttgtgggggtgaaggggaccaaagagccccaggagcaggtaacacctcctctgctgcctgcttgctgggaacacctccactccctgcttccaccccagcccgggcacagggtcccggtcactccgtcctcaggactccaacggcctcagcacaaactcccacttcctcagcaccagttcagtgtcctacaccgagacgtcgcggtgccacacggaagcacggactgctctgtccataggaacagtggcacgcacgccacgtggccagtgtgggccagctcatcagcactcacggcccgcaacccagccatgctcaccaccaccatgttcgtctccacgaaggtgggatcaactgagcagacggacaacaccagctcctggagtcctgggccaggtcctgaggtgagcagaggtgaccccaggccctgaccctgaccccattgccagcaaggtcacccgggaggcagggggcagttcggtcacggtaggagaaggaagggccctgtgtcctgacttggcctttgcagtcacacagactgggctctgctgcgtttagctatgtgatctcagacaaacctattgacctctctgggcctctgtttcctcattgtgaagtagggacatcatgggattgttggaggactcagtgagcagatggaagacccaggttagaggctctgccagactctgcagagcatcacaatcctggccgtccaccgagggcttccccaggctggactctgcgctgagtagggtctgctgaagcagctggtgccctgggtcccgccctagtgactcaatggccaccctgagtcccaggatccagaagcctgcaggcctgctgggggacccccgacggcacagctcaggccaagtcagaggaagcacagggaagcgagggtggggcgtcctgtccaggcaccttgggtgaatctctgggcgttcccatggtcttgccacagtgcctgctttgtgtcaaccagtcccaccagggccaccgcagccagcatccccacctggtgcatgcttccacccagggctttttggaggcgccaggcttcttcaatgaagtccttgggcctcccagccagggaccccactggggcgcccaggccctgggaggtggagaggagagactcctgccagctcacatccctgtccttgggccagggtggggacagatgcgtagccccatctgcagaggtgttaaaggggaacctggggccagctgccagggatggagctcaggaatccaaccctgcctcctgctggggcgccccaccccacctgtctgtgggaggccagcccagggctttcccaccttggagaggcagaaagacacagagtcacagtgctccacaatgtaggtgggcgggacatgcagggccagcaccacgttcatcagctgggccctgtccaggtggacccaggccccataggtctgggccaggaggtgcacctgggggtgaggtgcaggcagagtcagaggggccaggcctgagggaggcatagagggaggagggtcctgggcttagctgcctgaggaatcaggagggatcaggagacctggctggtgactggctctggtgatctgggacccaagcagtcaggctgtgctgcctaagcctccatgctgggctctgggaggatctgggggtgcacatttaacccagctttgtcgcacactgagcatgggccaaacgaccgtgggccaagggtaaatgtgtgtcacctcatttaggctgcacaacaactcgagggagacgccgctgctcccatttcacaggcaaggaacgcaaggcttggagagttaggctgctgcctaactagtgtctggtaaacagcagagctcagacactgcggcctcctcacctcgcacgtgggtggcaaggaccaggtggagggcactcacacgagcttgttcctgcagcctcatggggcacacgtttctgcgccagggcagcaggtcctggtgctgctctgggactcagctctggggacttgggggtgggggcatctctgctgttgggctggtgcagggactaggggccctgacctggggtaataattccctttgtgtctcagcctaggaccacacatgtgtccttcctgtgacaggtctggccgctgatgggtgcccatggcataaatcagaggggactgaaccccaggatgggccaggggcacaggaagccaggatcaggctggtggggggcacacagtggtggggctgggcctacctggcgtaggtagttgatggggaggatccggacccccgagatgctgtgtgagttctccaggcaaatgagctcgcagacctggtggtagggactctggaggccccgcgtgatcatcctctccagctcagccagtccagagtgcagtggggcagctctgggagggagtgggagtgcactccagccctctgtgggtcaggaagaggatgagggctgaggggtccaggggcacctcttggcggagtggggggctcctctggagtaaggagccagaccctgagtcctgtgtctgctcccccgaggcctgggccttggagcctttcctctgttctgtgcatctagacagacgtcccagctggggggcactgggcccctcccctattaactcttcagatgctgctgtctggctcccgtcgggagcgcgggagtgctccgagtgtccactagagggcaccaggcaccaagcaccgcccaggtgtctgcccggcaagcctggggccagccccagccgctgccgcccccacgtggcaaatctggggctctgctctccttccttcctcccctggagaggctgccatcccagccagcttctccatggctgtccctttctcccctccgcaggtcccagcctggtgcctgggaagggggtttgcccctgagcagcctgtgctggctggaggatgcccagggccccaggtgagcaatgcctgctccttacctgagccaccccaccctgctcatagacgtggaggtggcactcctgcccaaggaggagctgggagccccggcgccagcagtgacacatcactgagacagaaggagggcaggtcttggcattgagtctggaggcatgtggccctgctcagcgtggctaggctgagccctaaggctacagtcaactcacaaatgcctgaggccggcaaggaaacagcaccttcaagacacctcagtgctacgtgccagaagaccatcccattaaacacacaagtctaggatagctgtgctgcgctgggaatcgctgggccacacccagcctgcacacctgcgcctggaggcccctccacagagcatcgcctgctggagaagctgctgcaatgctgcttcttggtggacacgcagccgaggcacctgcagtcgtcagaccctggcaggaaacagacggcacacacacactgggaaactggcagtgtttaatcatgggacggtttatagaggggaggcaggagcagggaagcccggagaacaggcctgaggggtgagaggaaggtgtggctgcaggaacccggagccagggctatgtggagaggtccctgacgctggcccagaggccctggggaccctcggaagaggagctagggaggagcagacctgcagcccccactgtcctcctcccccatctccttccagggctccccaccaacccaacagaaatggaggaatgtggtccatgagtgtcagagcccccccatatgcactgaggacctgctaggcagacagaagtcgccctgcgctcaccagagatgaggttggccatagtgttggagggcacaaagagggtgcgccccagccctagcagctccacagccatttcttgcagctctgcggagggacagggaagccgctgtgcttgcacactcgggtgtcagcaccgtccatgctgctttccctgtgtcacttgggccagagcacgccctgagcccaggtgaggcccctagcccgaggctccggtgagcagctgagtgggtttggagccccatccaccagctgcacactctgtgggcttagcaaccacacatccagccccacagggccctcagtcaactctgcaccccacctaccctgggccatggcctctccccgctccccccaagaacctctcttgtggtttgaacctgtccccggcagacctcacacctgtctcacttcctttcccctcagccctttgcaggtggggcctgtggtttctctgctgacttcctttcctcgtcaggagggatgagtggggggctggacggggtgtgagggtgcagctggagggtgaggaaggctcccgctcttgctgtaaagcccactgtggtccccccaactgtggcatcaagtccttagcatgacactcagggctggagtgacctggcctctgccccccctcctcagagcctcctgcactctccacacctgccacatccccacctgcgccctgaagacctttctcaccagtctgcttctgctcctgaagacccctgccctgtgagccggcgctcccttccctgcctgggatgcttccactcagcctgcaggagggctcctctgtgaagcccccttccccgtgagccacagcctcgccccatcctctgcttcccagggcaccctctctagactcccatcaactcaagcgcctccccagcctctccttgagcggcagtgacttgttgacatgtgaggctgcctgggagcatggagatcagcatctccagcaacgctgggcagcagctggatacatgcttagccccagccatcccttaaccccttagcagacgggccctcgggattcaactggtgaccccatggcttgtcctggcctagctgaggggtgtgcacaccccaacagtcaaagtggttcactatggcaactcacaacccagggctggggctgggggtcgctgtaccctggagacactccctaggttattagaacccactccttgcgaggtgcagcctgtagaacctgcccctttctacatctattttccatttgccttctgtgggggaaggcagtgcaggagaacagttgtgggtttcagagtcagaagacccgggttcaaaccttggttctgccatttactaagtatggggcctggagcgcctccctccacatctcagaaccctcctctgcaagactggacatcacccatctcagggggcagctgggtgacaatgcaggacacacacaaccacctggtgagcctatagaaatgcaggttcttctcggcaggccatgtgaatctgcatttcttttatttatttatttttatttttatttttttttttttgagatggagtctcgctcttgtcgcccaggctggaatgcagtgggacgatctcagctcactgcaacctctgcctcccgggttcaagtgattctcctgcctcagcctcctgagaagctgggattacgggtgcccaccaccacgcccagataatttttgtatttttagtagagatggggtttcatcatgttggccaggctggtctcgaactcctgacctcgtgatccgcctgccttggcctctcaaaatgctaggattacaggcttgagccactgcgcccggccggaatctgcatttctaactttcaggtaacagcagcacgcacgcagacggcaagcctatcctgtggcaggtgttcattacacccatttatgtcggaggttgcaattttttgaatttttgccatcagaccttggcgatgaccttgagcagtaggacataaatacctcccagatgcttagcgttccaataatggaacactaggcataaatgggttttaagcgccaagggagccacttcccctgcgtcccagaccatcacggacagcgctccgctgccgcctccacgacccccggcctgcacgccggtcttcgccgtagtcgtcgtcccccacgaccgcctcggccatgacgcacctcatggccggcccgggcctggtcaccttgtcgctgcgcaggcccaccacgtaggctgcgacccccgcgctcccacaccccgcccggagcgccccatgtaccggggccgccgctcgggccagtctgcggagcatggcgcgggcagcgcccgactccccaccccggcgggagctgctgactcctctactccccagcgaaggcggcgagagcgacgtggtcggtgcggccagaattcctagagctgggaagcagccgccctgggccgggggtccagggagcgagccccgtggcacgctgggagttgtagttcgcgctccctcgcggcgggcgtgcgcgagcgtctgcgaacgggccccgtggcacgctgggagttgtagtacgggctgcgtcgcggcggagaaccagcgagcccgtgatgctgaagcagaaggttctgctcattgaaggagaaaccgaggccgagcgagtgtgtgtgtgtgtgtgtgtgtgtgtgtgtgtgtgtgtgtgtgtgacagagtctcgctttgtcgcccaggctggagtgcagtgacgcgatcttgactcactgcaacctccgcctcacaggtacaagcaattctcctgtctcagcctcccgagtagctgggattacaggcgcgcgccaccacgcccagctaatttttttttttttttgtatttttagtagagaggagttttcaccatgttggcctggctggtctcgaactcttgacctcaggtgatccacccgacttgacctcccaaattgctgggattacaggcgtgagccactgcacccagccctgggcgagcttttataacacagacgctcatgtggcacttgccatgtgccaggctctgccccaggccctttgcaaatgttagctcagttaaacctcccaacgactctaggagacaagcactattgctatccctgtcttgcagatggggaacaggagacgcggagctaacggacagctggaggccacttgggtaggaattggtccgggcggggtaccgctgtctccagagggcagccctaaatcactgtttcatgctgcccctaaaacacagcttccctcgtttaccatcttcagtattgatttgttgagcaagttcggtgcgccaggcagtgtccaggtgtccaggtgccaggctgggggacagggctatgtctccagccgggttccagtctaaggggagaccgctaaaagaatgcgtggggagcccctcctccataggcccctgcccctgggtggactgcctccatgggggcagggtggtgctgaagttcaagccagctgtgtggccttggacaagccatgtagcttctttgtgcctcggtttcctcaactgcagattgggctgttgtgagcattcagtgactggatatgtgtttggtgctgaccccaatgcctggcttgctgtaagctcagggtggtcaccccactgtggctgttttttaattttttaagacagggtctcactctatcccccaagctggagtgcagtggtgtgattacagctcagtgcattcttgacttcctgggcttgggtgaacctcccacctcagcctcccaagtagttgggactacaggcaagtgctactatgcctggctaatctttctgtgtttttcgtagagacaaggtcttgctgtgttgctcaggctggtctcaagctcctgagcccaagtgattctccctcagccccacaaagtgctgggattacaggcgtgagccatcacgacctgcccagctgtggctgttattatcattgtcgttactgatcccagcttggaactctgagggcccgggggctttggggtgaactctgacacagtctagactgtggggtgcccttcccccacacagggagcacaggcacccattgccactcagcggctcctcttcctctttctgtcccccataggagaaagatccaggaggggccacagctgctgggccaagcgtctggtgagggtggcccttggtgaggaggacacccatcctagatcagtcatggccaggcctttaccacaggccagctccaggtcaggcctggggacttagggcgagcagaggtggcctgccctccagagctcaggtcccaggggtgggggacaagatgctggccgtgagaggatggcagcgaggaagcagctctaacagtcccagtccaggcagcagggcaggctttttggaggaagcagtgattaggctgagcttcgaagatggagccgactttggacagagggatagcaggggtgaagcctctgggtagagaggagctgctgcgtttgtggccctgagggccagcgtggctggggaagtgagcaggggtggggatggagcccaaaagctacatccggggcctgatgacctctcaggggctctccatctctcttccttcagcttggtgggaattgtaagtacccgcagggtcagtggtcccaaggacacccatgtgatggacaggcttgctgccttcccctccccagagcccttctgggcctgacccacaatctgcaccaaattcctgcccttagaaaacaagccccttatctcattgtctggctccagaccttctgctgggaagtagggggcggggaacggaggcctctgtgggaaggaaaggaggtggtctggcggggcagggactgggggcagggatagcagcgctcaggggagaagggggacaaacaaatggacccccggcccctcgagctatggcagaatcacagaatggcctcctgtttgccaagcttcgcagtctgcaaagcctgccctctgcagcttccctgccaatggtcccagcggctttgcagtggaaggatgggcagggaggctggggtcacagaggcccgaggaccctgcccgagaggcacagctggtcacccaacagggcctttctccctttctcccaaatcagagctgtctccccagataggtggcctctccctgggggaacctggggcagaacagtttccttcttctgggtcctcctatctagtccccgggtcacctgggccagccctgccttgtcccagtggggtctgacagtgtggaggagcaagaagggtgggctctcacacggaaaggtgcagtgaggcctgtggcaggtggaccccatgaccccagcttggcctctggggggttgtctgggctcctacatgtgtgtgtgtgcatgcgtgtgtacatgggtgtgtgtgtgtgtgtgcatgtgtgtgtgcgcacgtgtgtgtgtgtgaccctggctgcaactgagatctgagttgtcttgctggtaagctggggacgggccgcagttcccaggctgggatgagaagcccaaagccctctgtggagccaactctacttgcccccacccctgtcccagcactgaccctcttccctcccctctctgcagttcttcttgacattctcactagaagggtcaccatcactggaggtcctggggtcatctcctgccccaacgcaggctggccccacccccacatgccagctgctcccttctctcctgagcccctgccccccaggactgacccctgcagcccagcccttcccaaacttctgagctcctctgtccgtgggtgcagtggggcccctcggcggggcttcctccctggcctctgtgggatccagcccttctgcctcccagacgcctccccgccccacactctggcttgcaacacttctgttcccgaatgcgctggcctctctttcaccccgagacctctgcacctgcattctgtctggaaaacccccaaccgtcggcacgcatccctggtcaccaccttctaagtcttcagatcttagctgagacgcctcattctccatgaagccctcctggcccagcccagtgggggatggaggtagccctcctcctgtgctgcctatagcaccttttcttcccactgcgcacgggtcacagctgcctgtttactcctctgacttctccgtgtggctgatgccctgtgcctgcagggcccagacgccctcctcctttggtgtgtcctgcatgcctagcccagtgccaggaccacaggactcagtaaacaccagccaggtgactgacaatggagggacatgtggttcgccatcccctgcccctgggaccccccaggcagaagtgtgcacaccccccagggtgtgagacccctgtgcagaaggacatggcgaggattccagaggaacaggggctggcctggcctcagcctctcagagtcaggtctgggggtcctgaagacagccccctccctggccttcttgagagatttgcggctcccctgagcagtgggaggccactgggctggctggagggggccttgcgacataagccccaggtgggctgcctttcacggcgcccccggctccctggcacccgcccaggcgcaggcgctggggtgtgggcacacactcacatgctgagttcagtgtgcggattcctgtaacgctgggctgctggcaggaagtgcgcgccggggaggctgctgctgggaacccagggctggccccgctgagataaagggaggcagcagatcgcagctggagatagcggccctgggtcctggtaaacaggtggggggggtggggggggggaaatgtcctttccatcccatcctcttggccctgagcctgcaggatctatagcgccctagcctaagcccagccccgatagcttgggatccagaggggagttgtcggcactgccatcatcattcccagcctgggggactgggtggcaaaggacagggcgctgggcctgggggcctggctgggcccatggtgggcatgcacttggcccacgtgggggccactgggtgtcaaggtcatgtgtgctgttgggagggtgggaaggggaagggagggagctcctccaagcccctgcacttccccaactgggaccccctagtgggaaagatgtccctctccaggttcgccttcagcaccatctccggaaatccagagtgaggtgccatgagggtgcgagaccgggagagaatggggggtggagtgaggggggcgtgagggctgttccccagccaggtgcagagcaggggggctacagagctggggagaccctgtgcatgacttcaacaggaagccacaggatgttcacctgcactccatcagctcaccgtgggctagcgggagctcggcatggcccatccccagtgcccaacacaatgggcgctcaaatacacttgcttgtttaaaaaattaagaaatttaccacgcatacagaaatgctcatgaagcatatttgtacagtgttatgaataaatacatataaaataaactcccgtgccatagccactcagaccaataaatagtccatggtggggcgtggtggctcacgcctgtaaccccagggctttgggaggccaaggcgggtggatcacctgaagtcaggagttcgagaccagcctggccaacatggagaaaccccgtctctaccaaaaatacaaaaaattacccaggcatggtggtgggcgcttggaatcccagctactcgggaggctgaggcaggagaatcacttgaactcgggaggcagaggttgcagtgagccgagatcgtgccattgcactccagcctgggcgacagagcaagactgtgtctcacacacacacatacacacaaacacaaacacacacacacacaaaagaaatagaccatggccaggattccagaagcttccttcctatttacaacccttccctctgcagaagttactgctgccctgacattcttcttcatatatatatacacatatacatatacatacacatatatgtatacatatatatacacatatatatacacacacacatagatagatagatagatagatgatagatagacagatttgagatggagtctaactatgttacccaggctggtttcgaactcctggactcaagcggtcctcccacctctgcctcccaaatctctgggatcacagatgtgagccaccaggcctggcctggcctgacttttatgaccaggacttgcttttctttatgattttgccaccgtagatgtatcccttaatagcagttgagtgttgagtgtggcctgtgtgtgaactttacagaagtcgaatcagggtgtctccttttatgtctggcttcattaggctgtttgcaagagtcacccgtgctgtggctgtcatttattctctgctgccaggtacttttccactgggtccctagagcatagtttatttctccattctacctgtttagggacatttgggattttgtttccagactggccatgtacggtggtgctggtgggcattcttattcctgtctgctggggcacaggtgcctgcttcgggagggcggacgcctggcggtggggctgctgattctggggtctctcatctgcagctttactaggtgtgccaaatcctttcccaaagtgctggaaatgccctcctcccccactttcccacacttctccatctcggtaacactagtgttatcagacttcttcatcttagctgtccttgtgatatgtggtgatatctcctggcaattttaatctgatcttttttttttttttttctttgatggaatctcactctgtcacccaggctggagtgcagtgacgcaatctcggctcactgcaacctctgtctcccgggttcaagcgattctcctgcctcagcctcccgagtagctgggattacaggtgcccaccaccacgcctggttaatttttgtatttttagtagatgggggtttcaccatgttagccaggctggtcttgaactcttgacctcaggtgatctgcctgcctcggccttccaaagtggtgggattacaggcatgagccaccgtgcctggcctcttttttttttttttttttttttttgaagaaactgagtcttgctctgtcacccaggctgcagtgcagtggtgcaatcatagctcattgcagcctgaactcctgggcttaagcaatccacccccatcagcctcccaaggtgctgggattataggcatgagccaccacactgggccctgctctttctgttaactgctaaaggagagtaccttttattatttatttatttatttatttattttttgagacggagtctcgctctatcgcccaggctggagtgcagtggcgcgatctcggctcactgcaagctccgcctcccaagttcacaccattctcctgcctcagcctcccgagtagctgggaccacaggcgcccgccaccatgcccggctaatttttcttgtatttttagtagagacggggtttcaccgtgttagccaggatggtctcgatctcctgacctcgtgatacacccgtcttggcctcccaaagtgctgggattacaggcgtgagccaccgcgcccagccccttttcttatgttttagccgtttgaattcctctttgtgaagagcatgttctggtcttttctcattgactggtcaggctggttggtatgtgcaagcatactgatccttgcgggttctgtgcgttgcaaagatttcaccccagggctgggtgcagtggctcatgccttcaatcccagcactttgagagtccaaggcgggcggatcacaaggtcagcagttcgagaccagtctggtcaacatagtgaaaccccatatctaccaaaaatacaaaagattatctgggtatggtggtatgtgcctgtaatcccagctacttgggagactgaggcaggagaatcacatgaacccaagagtcagaggttgcagtgagcagagatcgagccattgcgctccagcccgggcaacagtgcgagactccatctcaaaaaaaaaaaaaaaaaaatttccccacagtacagctgcggtggctctcgcctataatcccagcactttgggaggccaagggacggggatcactggaggtcaggagttcgataccagcctggccaacgtggtgaaaccctgtctctactcaaaatacagaaattagccaggcgtggtggcacatgcctgtaatcccagctactggggaggctgaggcaggagaattgcttgaacccaggaggtggaggctgcagtgagctgacatcgagctactgcactccagcctgggtgacagagtgagactctgtcaaaaaaaaaaaaaaaaaaaaaaatttcccccgtgctgtggtttgtctttttttgttgttattgtttgagacaaggtctgactcttttgctcaggttggagtgcagtggtatgatcatagctcactgtagcctcaacctcctgggctcaagcagtcctccggcctcagcctccagagtagcagggacataccaccatgcctggctattttattttatttgcagacatgaggtcttgctatgttgtccaggctggtctcaaactcttgtcctcaagcagtcctcccaacttggcctcccaaagtgctgggattacaggcatgagccactgcagctggctggcttttctttttcttttctttctttttcttcttctttttttttttttttttttttgagatggagtcatgctctgttgcccaggctggagtacagtggtgcgatctcagctcactgcaacctccacctcccaggttcaagcgattctctgcctcagcctccccagtagctgagattacaggcaccgaccaccacacgcagctaatttttgtgtttaatagagaggggatttcaccatgttggccaggctggtcttgaactcctgctctcaagtaatccacccgccttggcctttcaaagtgctgggatgacaggtgtgagccgctgcacccggccccgcttctgtctttagatacggttgcaagctgtggtgtgtgtggacaggggaatggggacttagggattgggctggggggaccctcaggaacccctctactgccttccaggtgtccccagcttgggctgagaccagggcacccccttgtgccttctgcccccacctgctccctcctgggcctaccagcctgcggccgcactggctgctgacagctgggacgctggggtctggcgttatttactgcggcagcttcctcctccttccaggaacttgtcctctaacttggggcggcagcgaggcctctaatctttcggatctcgtttaccggcattggcctctcacttcctgttgctaggcctggaccgaggcacggggtcagctccgtgcactgcgccttgcctgttgccggggcctctgttctggcccctcggcagggaggacagagggtcagatgccgggcctcaggcacagtggccatctggggtagggccagctccacagaggcaggggacccaaggctgagccggctgtgggctctgcttcctggagtccagggtccagcacggggaccaggttattccttcgctcctcctggcttggcagagcgtcatggaaggtggccttccccagactcccccacatcccctcctcccacttctgcagccaccagagccagggcccttgtgggaaaggacagggaagtctcaggagtttgggcacagacaagatccctggagaccgtggggtctgctgccctggagatgtggaatcccaggccttgcccacctcctccaccctgggtgggttccccaaccacccagaggagtgctggcatctcggggccaccagggcatgggcaagagtggctgcccagcccctgccaagggcctgaagccagcgccaggcagaccctgccttgttgagcagtatcttcagtaagggctctgtgtgccgaacacctgctgtgcgccctgcacacttatcccagagatgggattcaaacccaggttgcccagcgcagagaaacagcattctccttctgcatccgtgaaggaagctttgtcttctaaaagccctagcccttctgttaccttgtcctcagccggcctgcttctgtccctgtgccataagccagatgaatttctctcccaggctggccctgcagaggatgagagatggcccttgttagaggcaccctgggcaccccaggcatggctccccagctgatgatagaacaactgagacagacccggcatggtggctcacacctgtaattccagcactttgggaggccgaggcaggcggatcacttgaggtcaggagttcgagaccaccctggctaacatggtgaaaccctgtctctactaaaaatacaaaaaattagccgggcgtggtggcaggcgcctgtagtcccagctactcagaaggctgaggcaggagaatggcgtgaacccgggaggcagagcttgcagtgagccgagatctcaccactgcactccagcctgggtgacagagcgagactctgtctcaaaaaaaaaaaaaaaaaaaaacatctgggatcaggaaacgaggaaaagtatggtcttcatagtggcagagtttgcaggggtctttgggaagaaggaaggttggaacttgaggctgggggatggatcataggggaggggctccatcctagctggggaagggagggctgtcctgctgacattggcctctagaatgggatatgcaggatgacccccctggggcagggaggagaatgttatacttagcatttaaatctcgctctttttaaatgcctatctttcgtgaatgttttataatgcaagtaatgtattcatgcggtcatggaaacttgtaatctaaaaataactatgcatatatcatttttgttggtaagggtgcacgatcaaaatagtgtgaaggtttgaaggtcactttctcctaggtcttattgtttctttaattactttttatttatttatttatttttttggagatggagtcttgctttgtaacccaagctaaagctcactgcatcctcgaactcctgggctcaagagatcctcctgcctcagcctctagggtagctgggacggtaggcgtgtgccaccgcatctggctctaggtcttataatttctgtccttggccacccacctgctgattccaaggtctaggatggcaggatgaaggaaggtcccacatttggggacctgcaggacaggctgcaacagaaaggcctagtttaatgagtagcatgggcgggcctggagaccgagaggtgatgtaggcacgcatggggttcaggcctctctgtggtgagcgcttgcccccgctggaagcagagacaagaccctggctgggtcttctgttttgttttgttttgttttgttttctgagacagagttttgctcttgttgcccaggctggagtgcgatagcgcaatgttggctcactgcagcctctgcctcctgggtggaagtgattctcctgcctcagcgtctcgagtagctggaattacagccacacaccaccacgcctggctaattttgtattttcagtagagatggggtttctctatgttggacaggttcctctcgaactcctgacctcaggtgatccgcccgcctcggcctcccaaagtgctgggattacaggcgtgagccactgctcccggccatgtgccgtctgattaggaacccaagagccccttcctgggaacagaaggacaactggcacctgctgaggcacgcccacttgccgagctgccctgggatccctgggcagagcgtcatcgcttaagaacctaattccacaacaaatatttgtcacgctcctgccagggccctggcaggagcagaggcggtgtgtactgccatgcattcctggtctgttgggtgattgacacatacaagacgccagcggtcctgagagtcaggtgccttcctggaccccttggtgagcggaggtgagttgccatcaaggagggaagattcaggaagataactccaaggtcctcaatccgtccaccagtcagtggatggcaaacataatccatgggcactgattaggtttgccagcccatgctgagtgctgggttcagtgtccttcgtctcctgccaaggggagaggacctcgaatggacgcctgggaccatgatcccattttgctggggaggaaacagattagggaggaagggaaccttggtggtgagcagtaaagccaggattggaacccgcgccgctaaggtctctgcctccctgtaggacccaccctggctgtggggaggcactagcttggggaggagcccctggctggtcctcccaggtgtgtgtggagtcagccaggggcagtgctggcagggcctccaggcactgtccagcctcctcctcttctgcacttggaagaattccagctgtttttcagcctctctcttcctccaggaagccttgcatgatagccctacccctctgccaagacacacaccctcttctccctttttccttggcacctggcttatctcacagttgcctttgtcgtcggccagcgtccctcactgggtttcaggctcatggagggcaagacctgagtctttcattctcaggatccctagcagggggcttagggcataatgagcattcaggaaataactggagaaacgtggatgaggaaacggatagcagagggtggagaggggcttgcttctaaaggcgagacgtgaacctagtgggatgaccaggcagggtgggggtggtggggagttgtggggaggccagtacagaacagctccagggagggcatggagcatggtgtgagcaggaggcctgtctgacctccggggatggccccgtgggacagaggaccttgaaagccaggcagagggatgggatcagatactaacgcccatagggagccctggcaggtccttgagcaggggcatggcagggcaagccttcctttagcccagggtgagcttgcgccaacccgtgctgcagaggagaagggcatggaggatagctactccctctgggtgttcttccggcccggctaccctcagccagagctcaggaatcacactcccctggaacctggagttttggattcaatctttattcaataaatggcttattgggaaccgacagggtggctagagcctgcctggtgttggggttgggggaccctgcctggtggtttgggctctgtgggtgtgtgaggaccactccacggtggtgctggcgttccccattccactctgggctcagcgcccctgacacactccccctgcccactctggaggccaggccccctggtgctgggggaggcactggcttggagaggagcccctggctggtcctcctagaagagagagtctgtggggtgggcctccacagccctgccgggccccacacgggcagctgttcccggaatgggggtttgaaacttttcttttgttggcgaatatgcatgtggtcttaattattaatatgcagcacttatctcccccaaatgttttatcgggattcggcagatccgagtgtgcaggcagtgggtgcgggggcagggcagggatattatgggagcacagggaggccccagaagttggagtgtcctccaaatcagctggatgacccagaggaaggaaagaccctggttaacgatggtcaagttaactctttcaggccctgcccaatgctgcaaaatcgcacctgggtgtttggcctgggtaggcctaccgcgcctttctgggttctggcctatgccgatgtctcccctgccccgcaggaccctggtggactggagggaaggtagggagccgcatctctcagcagcaacccaggacttaaggagggccattgcccttttctggtgggggtgaaggaggaggaagcagcgtgaccttggaatccgtcacctattaacttcccgcgtatcacctgatctcattcggcgtccaccaccccctggaagtgggcttatcgggcccatttttagacgaggaaaccagagtgagacgagtcacagatctgaggacctccagcagagcagggaggtgcccaggtggggggcgggcgggtggtctttcttttggggcagcatcccaaaagaaaggaaaaacagcagggggcgtggctcccctcactgccccgcaaccatccctgcctggccagggccttttgggcagtgccactggagattcctggaagtgccttcgggccacacacacacacatcctccgggaccctcccagccccccactctgcgcttcccgggtttgcaggagggccccaaggccagccgggagccctgcaggacctgggaggaacctgagcctgaagggtctaggagcccgccgtgtctgctctcaagtgccccgcgttcccttggcctgatccccgatcccgtgcaccctgcacccagtaggccctccggggccggggctgaatcagcttcggaggcttcagcaaggcattgcagggggtccctacgggaggtttagtccagggcactcgcagtgttgtgggacgctgggcagggctgatcccagccactgagtcttcccgggcagagagcagacaggggggcattgggatttggaggggcacccgggaacctcctgtcccttccgggccgcctccccttaccctgatttcccttgcagggagggctgtgcaggtttgtggtggggtggggaggacttcctagaatttgttgctttgattggaatcttccctattggggcagggttggggtgagctcttgcccaccctgcccaccccctgccgccagaatcctgggctccctccgttgagttgtgttggggtcggggagcttcgtttatggcatccctgaattcaccccaggctttgaagtcaggctcgctccacaggaaaagctcttccaagagggagattccctggacctcctgggcctccgcctggtaattggcgcttcgattaacagctcgggtgcgaggggcacttcagtggggggcagggcagctgagtcaggggcccagcccaggggagatgttacaggagggaggacgggaagggaggcggggaggttggtaattccagattgaggagggtctccgtagctctccgagtgggtgaggacccctcggaggcaagtgtggggtcccccagggcctgctgggcccccttgggcccctggaacaatgggttcccactagccaacctgttcccacagccagaagttgccatggtgaccccctcccaccttcagctacagcttttccagtaaaaccactgcagaaatccatacttcccgacaggcacgcccggccccccaccccccactctgcgcggtcttggagcctcggggagttaaccctgcgcatgctggtgtctgttgtttgggggagacgggagtgagagccggcaatgcgggccccaggctggagaggagagggtggacgggggcaagacaagctgccctgtccttgaaggccccagcgagtgacttgagcaactccaggaagctggagcggagcagtgaagctagctctgacctaggggcccccttggcacagaggaggcctagctggggcccacagcgcagctcaccccttctagagtgaccccctgcccgcagtcgctgggacacgagacccttcccggcctggctgcagctgctaccctgttagccgatcccctcttcctcctctcccctcccggcacaaacctttttcctggaggcagagagggctcagtcccaggtccccgtggccctgctgccagcacctggcggcccccaagggcactgcgtacctggagcccggctttgcatccacaggtctgccctagggggctgttgaactccagaagtcgctgcctgctcagggtctccgtgtcctccccctgagaagtggggataatgatctgggctgcttccaagcttggggaagaggatccccctagaaggttctgtcctgctgcctctgccaggtggaggggcccctggggacaccccaggctgcaggggctcagggggctccgtggcccaggcccagcctcacttctgcagccagagtgagcaaggagatgctgtaattgttctctctgtagcccaggatgaataattgagaggtctttgaagagaattaattagccagcttattgactggaaacgctttgctgcagatgatggaggatggaagcctgcgtggggcccgtttgccggctggggccgcaccagacattcaattcacacccatggctgctcagcgggaccaggggctcggcctttgcctagtacctgctctctcctgctcaggaggaagtgggggagctgagccccaacttggcaccctgctgtggttctgtcctgatttctggtatggggagggggggcagcaccccttagactcaactctgctctgtcttctaagaggcaagatgggggcctctccaggagtgggggtgggtgtggctcagtcttgggagcagttcccttgcaggatagactctggtcctgggctccttcagtccagcccaccccaccgcctgagccccagccccttttcgggaactagggagtgacaggaaaagacgaaagcgttcttgcctgcaggctgcagggggtcagacatgtcgatgtccctggtgaggctgaggagggccggttctcatggaatggacaaggcgctaggcaggaaatgctggatcactagccccgggtaccagtcattaatagtagtagtaaacattcctccagcaggccctgtcctaagcacactgcatgcactaactcctgtagaccctgtgaagacagggggtgggcttgttccccagctgggtctgcagagcctcagggcagaacctggcacagataaagctttgttgattgaatgaatgagtgaatgaaggaaatgaatgtgaggaagctgagtggcaaagttagactcacacatcgggtttgtttgtttgtttttttgagatagaatctctctcagttgcccaggctggagtgcaatggcgcaatcttggctcactgcaacctctgcctcccaggttcaagcgattctcctgccttagcctcccgagtagctgggattacaggcatgtgccaccacacctggctaatttttgtatttttagtagagatgggatttcaccatgttggccaggctggtcttaagctcctgacctcaggtgatccactcacctcggcctcccaaagtgctgggattacaggcgtgagccaccgtgcccggcctcacacaccgtttttaagctggctcaaggatccgtgctctgatgcatcctccagtcccaggcgacgtcaacatggaagatgtgggcaagaggcaaacagtcatgaagggcttgggccatgtggaggatgagcaggaggtgggggccctgagagcgggcccagggttcagccctgcctctgcagctgctggagcaccagtgaagagagggcaggtgccagcaggcatggtgcaactgtgggggacatgggcggggcagggggtacctgggtggagctggttggggaccattgctcttggtccagataaggcatgacaaggcctgggccaagacccctgaaatggggcatggagagtctgtgacagctctgagatatgtggaggggaaggggaatggaacctggtgacttgtggacctgcggaatgggggacaggagttgagatgactccaggtatctcccgacatgagcacatgtatctgcaaatgaggcgggggtcaggaagcacagggagcttgctcttgccccgggggcctaggatgccctgggctgtcatcattccacactcacccctgacctgctcctgctcgctcagggaggctgccttacagggaggtatcagtggctccctcatcctctgcctctgtggagcccacagtgggaggcacctgcagaacatgggggtgggggacagtgcagttgggggcgtgggtgttccttcctctatctgcctccctcacagagttgtgatcaagcgagttgtagagaaacgccactctctgagacgaattcaggctagtgctcaaaattctctccaccccaaagaaggggctagattttcttttatactttgttttagaaaggggcggtggggggagtctagttaaaacaatcttacagaagcaaagcagacaaaaaagttaaaaggataaatggttacgggaaagcaaacagttccaggtgcaggggctttaaatgtattacaaggtgatagacgcggggctttgagtgttatcaaccggatacaaacgcggggactctgggtgctatcaaccgggcgaattcctaggaactgcggatataacttgccacagtatcttatcagttaattgcatccttggatgtgctggcagtctgcttgcacaagttaagtccttgaggaagggggtgggtaaggggctgtaagtgaaggagccaagatggagtctgtctggctctctcagctaagggagagtcaattcaggttaaaacaaggttgggtatcacaatagccctctccatgcctctctgtccagggctgggattggttggcatactctgcatgcctttccccagccctccagctgtcctagagttgggctgggataaccctccagccgccctgtgagttgcactgggatcagtcaggtgtactctgcatgcctcaccccagcccccgagccgtcccgtgggttggagttgtttgcgtcactggctttctgttctcagctgacttagctgggacgtcaacaactccctatgtcagaggcaagtctccgcctgcatctgccagagctccacacagctgcagacacctgtggcttcatctgagtcctcatctcggcctctgggaaccactccttcctaccctttgcctggagacagtggaagccgagggacatttctccgaatggcgttcacttggctccagaaatgagaactggaatgaggaagaggaatcagtctccctccaggtggctgaagctaggcacgtggaacctgggagcagcgggcagccacactggtgcccttcagacagcaggagggggctcttgtccgaagctctgagttcaaaacagaggggacatgggggaacagcaggaggtaggatcaggccccccaactcctgccgagagctcacacctgtcttcagcccctcctgcattcctgccagtggtagccatttgcccttttggttgcctggtgtccaaataccctttctacgttggaggtagggtcctgggggtccctgctccctttcccaggctctgaaaactgactcctgggaatgtgaccaaaatgattacattaaatgcttccacctgaatgtttaatcgtgaagatgagatgccaagttcaagagtaatttaggggccaggtgtggtggcttgcgcctgtaaccccagcattttgggaggccgaggcaggtggatcactggagaccaggagtttgagacaagcctggccaatatggtgaaaccctgtgtctactaaaaatgcaaaaattagtcaggtgtggtggtgcacacctataatcccagctactcgggaggctgagacaggagaatcgcttgaacctgggaggtggaggttgcagtgagccaagatcaggtcactgcactccagcctgggcgacacagcaagactctgtctcaaaaaaaaataaaaaataaaaaaagagtaatttaggattgttcccaagggttgtggtagagccagacagcactgtgtcacagcatgcagtgagtatccagcctcgataccctatgcagcccattctatgctaacggttacccccactgaattccttttctgcataggttaaccagagtgccactgtcagtcacaatactgactagtggcttctcttgggtttcctgagaaactccctatatcagttagtgagtgccataatcaggctgtgtaacaagcagccccgcaatcctggtggcattctacaataagcatttgttttgctcacatctctgtgggtctgtgggggttcaccagatccaggcttggattagctggctggcgtctgggctgtgagttgggtccaggtttgcttcacatgtttcttatcaacctcggcccagcaagctacctgaggcgtgttccttccagggtgacttcagcagtgaaagagagcaagttcattgtgcaagcacagttcaagtctactcactccatatcccctgacatcccactgatcaaagcaagtcccatagctatgccccaagtcaaggatgtgaatgcataattctactacaagggagtgaagaagcaggactgatcattccatcctccccttatttgtttttagtttttattatgaaaaaaaaaatttttttttgagaccgagtcttgttctgtcgcccaggctggctgaagtgcagtggtgtgatctcagctcactgcaacctccacctctcgggtttaagcaattctcttgcttcagcccccccgagtagctgggactacaggcttctgccaccacgcccagctaatttttgtatttttagtagatacggggttttgccatgttggctaggctggtctcaaactcctggactcaggtgatctgcccacctcggcctcctaaagtgctgggattatgggcgtaagccactgcaccaggaccatgaaaatatttttttaaaaataggcagaaggggccgggcacggtggctcacgcctgtaatcccagcactttgggaggcagaggcaggtagatcacgaggtcaggagatcgagaccatcctggctaacatggtgaaaccccatctctactaaaaatacaaaaaaaattagccgggtttggtggcgggcgcctgtagtcccagctactcgagaggctgaggcaggagaatggcgtgaacccaggaggcagagcttgcagtgagccgagatagcgccactgcactccagcctgggcgacagagcgagactccatctcaaaaaaataaataagtaaaaataaataaaaataggcagaagggtgtaatgaatccccatagaacatcacccagattccacaattattattattttcccatatttgtctaacctgttttttttcccttggtaaagtgtattttttaaacttttttttcccatatgtaaaacaaataatttatgtaaagatatatgtatatatacacacataacaaaatttaccattttaaccattttcaagtgtacagttcagtggcattaagtaattaccactgttgcacagttgctctccagctcctgaacattctaatcttcccaaactgaaactgtccccattaattaacactagctccccattcccctggaccccaacccctggcaaccaccatgctattttctgtctctataaatctaacaatctcacatgagtggaatcacacggtatgtgtctttgtgtgactggctgatttcatttagtgtgatgtcttcaaggtgcatccacgtgatagcataggtcagaatttccttcctttttaaggctgaataatattccaccgtatggatagaccatagtttgtttatccattcatgcatccatggatactagggttgcttctatcttctggctattgcaaatgaataatgctgctatgaacgtgggtgaacatatctctgagtctctgcttttaattcttttggggatagatacaggagtggaagtgctgggttatacgctaattctatgtttaatttttggagcatctcaccacactgttttccacagcaattgtaccattttccattcccaccaaaattgagtgcacagggccaagcgctgtggctcacacctgtaatcccagcactttgggaggccatggcgggtggatcacttgaggtcaggagtttgagaccggcctggccaacatggtgaaaccccgtctctactaaaaatataaaaattagtcgggccatggtgaagcatgcctgtaatcccagctactcaggaggctgaggcacgagaatcgcttgaatccaggaggtggaggttgtggtgggccgagatagtgccactgcactccagcctggatgacagtgagactccacctcaaaaaaaaaaattgagtgcacaggattccaatttctccacatcttcaccaacacttgttattttctgttgttttttttttaaaaaaaatagtagccgtcctaataggtattgagtggcgtcgtcttgtggttttagtttgcatttcaggctccatttgacttcggctggtttgaggtgagtttctgtttcttgtaactggcgctagttcaggtaggctcagcagctgcagaactcaaagagatatgttcacccgcgttcatagcagcattattcatttgcaatagccaaaagatagaagcaaccctagtgtccatggatacatgaatggataaacaaactatggtctatccatactgtggaatattattcagccttaacaaaggaaggaaattctgacctatgctatcatgtggatgaaccttggagacatcacactaagtgaaatcagccagtcacacaaagacacataccagctcagcagctgcagcacggtagccaacaatagcagctgtggcttgtggagaagtttatttctccttctgtaacagcccagggcgggtgcacccggtctatgcagccctactcccttaggggacccaggcggatgctgctttgctaccttgacgtggagtttctgagctcgctctgccggttgccacctgggtccccaggtgggagggtggagcacctgccaggattgatgggctaagggcggaactttccccttgcattccatcaggggtatttatctttttttttttttttttttttttgagatggagtcttgctctgtcacccaggctggagtgcagtggtgcgatctcggctcactgcaacctccgcctcccaggttcaagcaattctcctgcctcagcctcctgagtagctgggattacaggtgccaccatgcccagctaattttgttatttttagtagagacggggttttgccatgttggccaggctggtctcaaactcctgacctcaggtgatccgcccacctcggcctcccaaagtgctgggattacaggaatgagccaccgcacccggtctcagttgatatttctaagaatctgcatagaatagaccagccgaccctggatcctatcagagggtggaggctgggaggaggaagaggatcaggaaaaataactaatgcgtactagacttagtacctgcgtgctgaaataatctgtacaacaaaccccaatgtcacgggcttacctatataacaaacctgcacgtggacccctgaacttaaaaggtttttttaaaaaaagagggtcgggtacagtggctcacacctgtaatcccagcactttgggaggccaaggtgggtggatcatctgaggtcaggagttccagaccagtctggccaacatggtggaaccctgtcgtctctactaaaaatacaaaaattagccgggcatggtggtgggcgtaatcccatctactcgggagactgaggcaggagaattgcttgaacctgggaggcggaggttgcagtcagccgagatcacaccactgcactccagcctgggcgacagggcaagactctgtctccaaaaaaaaaaaaaaaggggaagcctgttgcccaaaagggctgctgtggtacctaaaaatgtgggctttctccttctgggagggggtaggaagaagtcgcccccactctccaggcccacggctgccccgcccctgctcaccagccggctggctgtggcaaaactaaagcctgccccgtgccctgagcccggcatgttgttcagcctctctgaaatggtctccttggatcatgggcagagatggtacgatgggatcccacccgaggggtcccggccggtgctcacggggctgggaccagctgctcttactctgtttttctacctttctcagccacttggaggaagagagaattttgttaccttttacaggtaaggacgctgaggttcacaggataagtcacttccagccaggtgtgtgtgacctcagatccatactcagagggaggtgggctgggcagagcctcccacctgctcccctggaggcccatgagtctgggcactggggccccaattcctataaaccggggttgattacggaggactcccctcacctgcaaccccgcctcccaccacagagcccaggcagcagggaagcctggagacaggcgcagagcctctgggcctgggtgcctacccctgcccacccccagggcctcaggccacaggagaccacctaaagcaggagccgggagtagggcccaggctgggctggcacagctgggcctgtgaggggtggaggggccgctggggaagggacttaccagcagcagctctgctgggacctgggaggctctcctcatttccagtaacaagcgggggtgggggcagtgggagggaggaggcggctttccccaggtgccagctgtgcttgaagacagcctgtcccctctgctgtctcctgttctcagctccttaatcccctccccgacctcgtagttgactcctgggctgactcctcccctggaagggaaagaagagccgggctcacccacacccaacaggtgcagcagctgcttgaggtcacagttgctgagaagggaagctgaggccagtggcagctccagccagggttggtgcagcctgctgaggggtcgaggtcacccaatcacccacccagctccacctgcccccacccctcccacccagcctggccaccagcccagacaccttcctcacatggcctgaagacccctgctgacctgtggcaccatgtggcccagcagggtggccaggctggccggggtcatggggtgggggacgctgctccccacctgccctggggtggtcggtgctgttggggaggccactctctaggggcatctgccaggtaggcagaccagaaacttaccccgagttctgtgacccgctccggggagcggggcatctcatgtcctctcagccacgtctgaaagctgggacatggcagagtgggcagggctgccctctgagctgacccccttcccctcctccccatcttgtctctcctcagatctagggctcactctgaggcgtgggtgacacttgccccccaaccccagcctcttcagtgcagggaggcagggcctgaacttcggagggccttggggcaggttcctggggcttgcagtgaggcctcccctttcccagggagaggaagggagaagccgcgtctggcgagggaagcctgtaccctcaccctcactgtgtccagatctgcacccctaacctggcctggggagactggcaccaggtggagctggtccccaaggagccccaaaccccagaacatctgctgcaggggtcagctctcagggggccccagggccagtcctctctgcaccccaccttccctgctcaatgtggcttgtaggaggttatgcaaagcattatgcaaagcacatgcaaatgagacccaaccacaactggtcactctctccaggcaagaccactgaagccctctggtcatcagcaggaatgcaggggcgcctatggcaggccggactccaggtcaggccttggggcagtgaggaagaaggtgcatgccaggtaagctatagtcaaaagggagggacacacaccaccaggcgaatgaatgaagcaaatcaatggcactcctccctgccccagaattcaaaatgacagaccggtgcagacagatgcatgtgtgttctgagaggtggttgtgtacaagcaagctcactccttcagtctcccattcattcacttattctgcaaactcggtgtctattatgagcctgggctgttccaggggctggggatatcccagcagatgaaaatgcctgctttgcagggctccagtagggagagaaagatacaggtgacaagtcaggatgagcaaggaggacacaccggtgtatgttccagaaaccataaggaggctggagccaggcacagggagccctgggccttgggaagagtatggtctgtgcaggggccatgtagtgggagggggccctgcaacatcaacccaggtgccctggggaggttgtggtggaaacaggcagagcacggagggaaccaagttccccgggcaggagatgccaggggctgcggccaggggtggcagtggaagggctgagaagtggtcggattctgggttaggaagagaaagctgccctttgccctctgaagcttcgccgaaaaatcagcggacaaaaggcagattcataggagaaaaggctcacaaaatttactgtaactgcatagcacaggactccccggacgtgattacccagtaatccagaggggtccagaacctgccatgcccttcctcatgggagaagaggtggtgggaaaccacctctttgaggcaaagtcaatgatttttggggggaaatgaaatgaatgggccccttgctcagacaatggttagtgaataattctctttgggaatcaaataggaccaaagaacagacaatggtttgggaggaagttggtctgggctctaggtgtggtggttcattgcagcctcttcctttgtgatgtgagttttaatcttctccggttaataacatttcagggaaggcaattgtgttcctcttggccagtctggtttctaggtagttaaggaaagtccgagaacagcctcatcctgtgctttgggaagacatggggctggaggtaggtcagagagaccttggggccccttcttgtcaaggcgccatattttctgagccccaacagtgtattttgggaatgctgttatatttccatctaatttgcattaaggaaaagctatatgtgttttggtgcctgggtacctgtgttggggaggctgggagtggggacagagtgggggagggcatcttctgggtgctctgcagacccaggggtctgtggtgttctccttcagggcaaccccccaaaacccaccacccaaactcagcgaaactacaaggtggggctgtgatggggcctagaggtttatgtaacaatcatgggaacggaggtcctcacccgtggaggccccgctaggggttgagcctattccaggggttccctggagttcacctctcctcactgcctcctgttcttattggttttctggtgggggaggaaggggcaaagccgctcttctgtgaaggtggatgttttttttttggcagcagctgaaatccatttgctactaggcctaggagtaagtgggcgatcaaaactgaatcgtgcagtttttactccaaaacaagccctggctctttaagacttggggctgattttcactctcgggtacctggggcgaaggtcgggaagccaggccttctgtaaagcttttaaggacagaaggtgtagcctcccaagttagcacactctggagccccgaatgcagttgccctctacagacctggtcagggcctcaccctgcagcccaggggaagggactgggggctttaaagctctcgcaggtctctgtttggctgtgtggcccaggaccagctccttctactctcctgctgtgaatcagcagcaccacccccgacttagtagcatagtgtgaggctgacgtgcacgtgggtgtgaatcccggtcagcgccactcgttgtgcctttgcgcttcaatggtccctgccaaggctgtggcagcagctcctgagctccccaccatacctcgcctaaagccttagggacaagttcagccacctgagaccaaaagcgccctgcctggctagctctaagcctccaaataacccctgggatcccagcagttcttcactgtaagagtttacttgtggctgggcatggtggtgaacacctgtagtcccagctgcttgggaggctgaggtgggaggatcacttgagcccaggaggttgagatggtagtgaaccatgactgcaccactgtactgtatgtaacctgggtgacagagtgagtgagaccctgtctcaaaaaaaaaaaaaaaaaaaagtgggccgggagcagtggctcactcctgtaatcccagcactttgggaggccaaggcggacggatcatgaggtcaaggtatcgagatcaggccgggcacggtggttcacacctgtaatcccagcacttcgggaggccaaggcaggcggatcacgaggtcaggagatcgagaccatcctgcctaacatggtgaaaccccgtctctactaaaaaaaaaaaaaaaatacaaaaaattagccgggcatggtgatggatgcctgtagtcccagctactcgggaggctgaggcaggagaatggtgtgaacccgggaggtggagcttgcagtgagccgagattgcgacactgcactccagcctgggcgacacagcgagactccgtttcaaaaaaaaaaaaaagatatcgagatcatcctggccaacatgatgaaaccccatctccactaaaaatacaaaaattagctgggtgtggtggctactccggaggctgaggcagaaaaatcgcttgaacccaggaggcagaggttgcagtgagctgagactgcgccactgcactccagcctggtgacagagcgagcctccgtctcaaaaaaaaaaaaaaacagaacaaaacaaaaaaagtgttcacagatgggcttggaggtccatggtccatccttgttcttcaggccagccaaaggtggccaaatttagtaaaaaagcaaacaaaaaaccaagacacctagttaaatttgaatttcagagaaataacaaatacatttttagtgtaagtatatcccatgcaatatgagagagatacttactctaaaaaatgtatttggccaggcgtgtgggctcacacctgtaatcccagcactttgggaggctgaggtgggtggatcacttgaggtcaggagttcgagaccagcctggccaacatggcaaaaacccatctctactaatacaaaaattagccgggcctggtggcgagcacctgtaatcccagctaccagagggctgaggcatgagaattgcttgaacccaggaggtggaggttgcagtgagccaagatcatgtcactgcactccagcttgagtgacagagtgagactgtgcctcaaaaataaaaaaaaatgtatttgttgtttctctgaaattcaaatttaactgagcatcctgtgttttatctggcaatcctagtcccaccctcttccaaattcacatctttttttttttgagacagagtttcactcttaatgcccaggctggattgcagtggcatgatcccaggtcacagcaacctctgtctcttgggttcaagcaattctcctgcctcagcctcccgcgtagctgccgtgcaccaccacgcctggctaatttttgtatttttagtacaacggggtttcaccatgttggctgggctagtctcgaactcctgacctcaggtgatccacctgcctcggcctcccaaagtgctgggattacaggcgtgagccaccacgcccggccctccaaattcacgtctataagaacgattttcctgccccaaccatacatttctcacagataaaggtgcatttttatcatttcgtctttcctggggctgaaatggcttcttctttttgcattttatggttttacaattgtagcagtaaaacattcttgccggcaagatgattgaaaatttaactacaaaaggcatcattcattttatttttgtcttcattggagacataaaatggattcgcaatcatcccaccacagtggttgagtattgtgggttttagagttgctcacatagcacatttatactcaccagtgtgagggctctttgcagccgccaatggagtgatcgtttgtgttttggaagcagcagtaacatttattcctaataatcctgctgcagtgggttcttggtattttatagttgttattgcagtaaaatttatatcctacagaattatgacaatattcagctactaatatgattattatttgtgtgtgtgtgttaaaaccacggaaataaaatttactcccaacaatacagtggcaattttatgtccctaaacctgaccgtaaataataaacataactacagaatgcctgtaaacacataaaacatccttctcggaaaaagtgaactctccattgctatcctgatgagaccagcagctggggagcctggtctagcagttagggctcctgggcagacttcaaaaggatgaagcaacttcttcacaggactcctggagagcaagttgcttaacatttcagagtccaagtcagcccgtctcagagaacgtgggctggtccatcgcctgatgagtgcacggatacaatgtgtggtaaccacactgtagaacactgcttggccgtaaagagaatgcagttctcatacacactgcaactcggatgagccttcgagacattatgctccacgaaagaagccagatacagccaggtgcggtggctcactcctgtaatcccagcactttgggaggccgaggcgggcagatcacaaggtcaggagttcaagaccagcctggccaacatggtgaaaccctgtctctactaaaaatacaaaattagctgggcatggtggcgcatgcctgtaatcccagctactggggaggccgagacaggagaatcgtttgaagccaggaggcagaggttttggtgagtcaatatcgtgccactgcactccagcctgggcaacagagcgagactccatctcaaaaaataaaagtaaaaaaagccagacacaaacgatgtatacttttgatccacatactgtatgatcccattgaaattaaatagccagaaaaaggctaggtgtggtggttcacacctgttatcccagtactttgggaggctgaggtgggagggtcgcttgagctcaggagtttgaggccagcctgggtaacatagcaagacccccatctctacaaataacttaaaaattaggcaggcatggtggtgtgcacctgtagtcctggctacttgggaggctgaggcaggaggatcccttgaacccaagaggttgaggctgcagtgagccatgatcatgctgttgcactccagcctagacaacagagtgagaccctgtccgaaaaaacaaaaacaaaaacaaaaattaaaaatatctagaaaaagtaaatttccatagacagaaagtagacgagtggttgtcaggggctgggggagggaaggggaaatgggaagtgaccgctcatggatcctttttttttttttttttttttttttgagacagagtcttgctctgtcacccaggctggagtgcagtggtgcaatctcggctcactgcaacttccgcctcctgggttcaagcgattctcctgcctcagcctcctgagtagctgggattacaggcatgcggcaccatgcccagctaattttgtatttttttagtagagacggggtttcaccatgttggtcaggctggtctcgaactcctgacctcaggtgatctgcctgccttggcctcccaaagtgctgggattagaggtgtgagccactgcgcccggcctcatggacacttttgagatgatgaaaatgttctggtagggctgggcagggtggctcatgcctgcaatcccagcactttaggaggccaaggttggcggatcacctgaggtcaggagttcgagaccagcctcaacatgaagaaaccccgtctctactaaaaatacaaaattagccgggtgtggtggtgcatgcctgtaatcccagctactcgggaggctgaggcaggagaatcacttgaacctgggaggcggaggttgcggtgagccgagatcgcaccattgcattccagcctgggcaataacagcgaaactccgtctaaaaaaaaaaagagagagaaaataaaaagaaaatgttctgtggttgactacagtgatggttgcacaattccatgaattcaccagaagctgttgagtgtatactttcaatgggtgaatagtgtggtgtttaaacgctcttaataaagttgctaaggccgggcacggtggctcacgcctgtaatcccagcgctttgggaggccaaggcaggcggatcaccaggtcaggagtttgagaccagcctggccaacatggtgaaaccccgtctctactaaagatacaaaaaaaaaaaaaaaaaaaaaattagccgggcgtggtggcacacgcctgtaatccgagctacttgggaggctgaggcaggagaatcgcttgaacctgggaagcagaggttgcagtgagccaatatcgcaccattgcactccagcctgggcaacagggcgagactctatctcaaaaataaataaataaataaataaataataaataaagctgctaaaatgaaaaaaggaagaaaacatgcttctgttcctcctgccccccacccctgcctcccctgggctttcagctgctgtctctagagaatgtttggaacaggtgtctgggaatagctaacaaaatccctctggcttctccttgccttgtgggttatggatactgcccccttcctccatcgtgaaatgaaaagtgacatgaccctaaaatctaaaaggaccataaggcccattaggcaatctcaagagagccacctgcaagggacagaggtgtggcagcagccctggagagaaggaggccaagcagagagggtgcaggctgccaggatggagcctctgcccgccactcactgggcagcagtggagctgcctctgcctgtatcatccccattttatgaatggggaagctgaggcagaagcagtgatacagccagaatgaacagtcttaggcatcgtccacagaccagcgagttactccaccaggtgtctgtatcacccaaagaacctgaagtgcatgggctccttgcgagcttttttctctcaaaaaaaaattgtggggctgggcgccgtggctcacacctgtagtcccagtactttgggaggccaaggcgggtggatcacttgagttcaggagttcaagaccagcctgggcaacatggcaaaaccccgtctctactaaacacacagacagtttggctgtagtggcgcatgcctgtagtcccagctacttgggggactgaggtgggagaatcgcttgagcccaggaggcggaggttgtaggtgagccgagatggtgccactgcactccagcctgggcgacagagtgagatcctgtctcaaaaaaactgtggtaaaataggccgggggtggtggcttacgcctgtaatcccaccactttgggaggccaaggtgggtggcaccggaggtcaagagtttgaggccagcctggccaacatggttaaaccccttctctactaaaaataccagcgttagctgggtgtggtggtgcgcacctatagtcccagctactcggggggctgaggcaggagaatcgctagaacccaggaggtggaggttgcagtgagccgagatcacatcactgcactccagcatgggtggcagagtgagactctgtctcaaaaaaaaaaaaaaaatttgtggtaaaaaacacatagcataaaatttgccactttagcctttttttttttttttagacagagtctcgctctgtcgcccaggctggagtgcagcagcacgatctcggctcactgcaagctccgcctcccaggttcacaccattctcctgcctcagcctcctgagtagctgggaccacaagtgcccgccaccgtgcctggctaattttttgtatttttagtagagatggggtttcaccatgtcagccaggatggtctcaatctcctgacctcatgatccacctgcctcggcctcccaaagtgctgggattacaggcgtaagccaccgcgcccagccaactttagccatttttaagtgtttcaattcagtggcagtaagtatcttcacatcgttgtgtgaccaagtgtcagaggtgacgtgggctgtccaggacacatgactggtgggaactacagggtccccgtcctggtcctcacaccgctgttggccctggacaaggtatgtcttctgagtgcgaccagaggcccagagagcacgggattggctgcggttgccagtgcctggggcagttcccgctaatgccatcgtcctggggatccccttgagtcccctgctcctgcttcttagtttgctgcaccccagagggtgactgggacccccatgcctgggacactggttgcataggcagcttccagggccaccccagacctcccagctcagagtcctggggcctggggctgtgagttaatcagtgtccaggcaaccagggatgccacaagaagtcaggaagtttccagacttgcctggtctcagaattatctaagctcctttttttatttttttttttttaagacagggtctcgctctgttgcccaggctggagtgcagtggtgggattttggctcactgcagtctcaacctccagggttcaagtgattctttcacctcagcctcccaagtagctaggaccacaggcgtgtaccaccatgccccagctaagtttttaaatattttgctgagacagatcttgccatgttgcccaggctggtcttgaacttctgggctcaagcgatcctcccaacttggcctcccaaagagctgggattacaggtgtgagccactgcgcccggcccatctgagctacttttagaagtataggttctctggcttctctccagctgagaccaaaccacctctgaatctattgttaagaggtacaaggggcttgtgatacaaaagtggcaaagctggacaggcacagtggctcatgcctgtaatcctagcactttgggaggttgaggtgggccgatcacttgaggtcagaagttcaaggccagtctggccaacatggtgaaaccctgtctctgctaaaaatacaaaaattagcctggcatggtggtgcgtgcctgtagtcccagctactcgggaggctgggacaggagaatcacttgaacctgggaggcggaggttgcagtgagctgagatcatgctgctgcactccagcctgggcaacagaacaagactctgtctcaaaacaaaacaaaacaaaaacaaaaacaaacctgcaaggctgtcggttcatgcgctcattccttcactcattactgcagtcctactctgtgtattcattattgcagtcctactgtgtgtgcctcacctctgcagccggatcctgccccagccccaggcatgaaggcatggagcccctgcctgtgcacgtccttcttcctgggctaccctgcctctccccttgtgcctgacattgagggctgtgagacctcctactcgtcacccctcagccagctctgtttggccccccaaaagccttgggacctcctcgggtcctggacgtgggactggctctgattctagcctctgggctgggctgctgctgacaagtgttcagctcctgctgctcagatgaatgaagggacagaaggcgggtgtctaggcatggccgggacctgggattctattttttttttttttttttgagatggagtttcgcttttgtcgcccaggctggagtgcagtggtgcgatcttggcttactgcaacctctgcttccagggttcaagcgattcttctgcctcagtctccctagtagttgggattacaggcgtgcaccaccaagcccagctaattttgtatttttagtagagacggggtttctccacgttggtcaggctggtctcaaactcccgacctcagatgatccgcctgcctcggcctcccaaagtgctgggattacaggtgtgagccaccatgcccaaccccccagccaggacgggaacttcttaggatccggctgcagcccagggcagaggagttcccgcggcttcctccagtgagttaagtcaggcctgagtgagcatctactctttctgggccgctagagggagaccttcgcagcctcgtacttggctcaagacaccaggctaaggggtgtcagtgtgtgtgagtgtatgtgtgtgtgtgagtatgtgttttgtgtgtgtgtgagtggcgtgtgtgtgttgagtgtgagtgtgtgaatgagtgtgtgtgtgttttgtgtgtgagtgcgagtgtgtttgtgtgttgagtgtaagtgtgaatgagtgtgtgtgttgtgtgtgtaagtgcgagtgtaagtgtgtgtgagagagagtgtgtgtgtcctacctgggcatgcacgggtgggtgtgggcagtgacctgagccctgcacgtactgccaggtggcccggcttgccaaaggtggggaagggttatttacccaaagtgggagagacctgcaggctgggcggcagcggcaggaagaacagcgagcgaggccacagtggcatccatggaagatgttatttggggccttttccgtgcctgctactgttcttcgcatcctgcgtgtatcacgagaagcaatcctatcaaaggaggacctatgaatacaatatccactttacagaggaagaaactgaggctcagagaggctgagtcacttccagagctgagatttgaacccagggagtgggggctggggcctgggctccacagcacaaaggagccctgcctgctgggacaaggagctgccttgtggtatggccagtgtgcccaagccagcctttggagcccgctgggctggctctgggttccagctctgccgcctgcctgctgagtgtccttgggaaagtccctccacctccctgagccccgctttctcctctgtaagatgggactaatgacacctatttctctggttgtttagaggtttaatggttcactgtatgcagagggaggcagacttcagggcctcctcaggagccttggcatgcggccacagggcctttgtatgtactgtgtgtgcgcctaagatgcccattagaaagataagatgccacctcactgcggactccccttaatctccctgctgcagggccagctccaggggtgtgtgacctatggaggtgcactggtccccatgctcagagcacgctgtgctgggtttaatgatctccgtcaccatttcgaaattcttagtgattttttaacaaggagccctgcatcttcattttgcactgggccctgccagtgtcacagctgggcctgccctgcagtttctttttctttctttcttttttttttgagatggagtctcgcttttgttgcccaggctggagtgcaatggcatgatcttggctcactgcagcctccatctcctgggctcaagtgattctcctgcctcagcctcccaagtagctgggattacaggcgcccaccaccacgcccagctaatttttgtatttttagtagagatggggtttcaccatgttggccaggctggtctcaaactcctgacctcaggtgatccgcccacctcagcctcccaaagtgcagggattacaggcgtgagccatggtgcccggctgccctgcagtttctcctcctgcgccgtgccccgcatgatctgcccccagcgaggaaggagactgaagagcagcagggagggtccctggagacagagcgggcagagtgggctcgacgcacccctgacacccatcagcaggcgccttcctcaatgcggacaggcagaccctcctctcttgggcacacactcagtcagcccctgggtcagttgctcctcctaaaatgggactgacagttgaagacctccaagcttcccagtcatagcagtggcccctctcagcccacacccagtccactctggattgctagtggggatcccccgagacagggttctcccccaggctggtcagccccacatctgtgaagctttctgggcctctccacacccccagttctctgaggcaggcggggtctccagggcaaactcgtgtgagcctcacctgtgtgttgcaccgtcctgtctgcaaacagaaaccctcacgctgccgagccgatgcctctgtccccagcacctccttggggacggtggactccatggtcaaagggccaactcaggggagccacagtatctgtgcttcaggcagcccgagttgaggacgtgtggcattctgctggcatcgttcatgcctcactcttggctctggggctgggcacttgctttctggcccagcctgccgccagggtgaatggcctctggggcagatggcgttctgggaacaggtaatgtcctggccagcgggcaggccggagctggagcctgggtggagggctccccaaggaccaccctgggtcccactcggctttccctgcgtgggggcgacactgttgccagttacagaccgcccaagagtgccccgagatctaagcataggacacaacaggggctggtctcatccacctcggatccacccacctgcagcccagtccggctgtgtccctcaggtcacactcactgtgttttgagaactctcctccgggcctacaaagtttgccaaggcgaatgtcaaagggatatgggggcaacagctcccaagatcagccctaatccaccctcctcatctgccctctccatggggcctcactccatgtctccaacatctcaggttggtgtccaagccacggcctcacatggactcacctcctgcttcagtctctgtttctgaccaggcttcttgctcccagggaggagcgagcttggaccgctgctctcagaagggaccctcctagctggacctgcccctgatttggccgggtgccctgggctctgtgcccatctccaccaacctcccagaagcgagagctggatacctgcctctctgtgtccagcttccttccttccttcctcaacaatcagttattaaacacccaggatacagatgcacggtgctgctgcagctgtcctccaggctgcctttttttttttttttttttttttgagacaaagtctcactctgtcgctcaggctggagtgcagtggcacgatcacagctcactacaacctcaaccttctgggctcaggtgatcctcctacctcaacctcccaactaactgggaccacaggtgcatgccaccatgcctggcttgtattttgtgtagagatgaagttttgccatgttgccgaggctgatctcgaactcctgggctcaagtgatccacccacctcggcctcccaaagtgctgggatttcaggcgtgagccaccgtgactggccccatgctcttggcttctaatcatagactttggggctcattcagatcacctctcatagtgaacttttgtcactttcttctccaccatccactttaccccagggatgagccttcattggtctaagccagtctgactctctcacccccttggttataacgatataggatacatgtcccaacccgggtcagatggccctataaataggtttcagttgctttacctacaagtagttccttttttttttgagatggagtcttgctttgtcacccaggctggagtgcagtggcacgaccttggctcactgcaacctccgcctcccaggttcaagtgattctccagcctcagcctcccaagtagctgcaattacaggcgcacaccaccacgcccagctaattttttttttttttttttgagacggagtctggctctgtcccccaggctggagtgcagtggcacaatctcggctcactgcaagctccacctcccgggttcacgccattctccagcctcagcctcccgagtagctgggactacaggcgcccgccaccacgcctggctaattttttagtatttttagtagagatggggtttcaccatgttggccaggatggtctcgatctcctgagctcgtgatctgccctcctcggcctcccaaagtgctgggattacaggcgtgagccaccgtgcccggcctacacccagctaatttttgtatttttagtagagatggggtttcaccatgttggccaggctggtcttgaacccctgacctccgctgatccacccacctaggcctgccaatgtgctgtgattacgggcgtgagccactgcacccggccaagtagttccctttctgttgcattgggacctagaggcacatggcctgggcctgcccaagggtgtcttgtgaccatgagggagagtctgcagaggacagggcccctccccgtgcaggagggcctggctagttgagtgagtctctgatgaggcagtgcctccgagggtcagtcatgctcaaactcagtgtgccccaagtcctgacccctggtattctgggctatcactgcccaggaaaacagcactccaaaccctggccttcaggcctgttcctttatgcttatcgctggaatccctggtccagagggtcttcaaatccacacaagcccctcctgcttggccctaacccgatgggttaagcgtttcaagggagggcttgagaggtccccaggacatgcctggagggccaataaatgaccgtgaacggtggtgagtgaggcaggtggagagtgtgaccatgaagagcagggcagactccccagagtactgtagggaggcagctgcagtctggatgaagagtacacgccaaggccaattgtggttgctggtgggatgcagctgggaaagcgagagtgaggaccccagaccctggcggctgcaatgcctgggggcatgtgacatggtggtgaagggggaattgtgtgttgatcctaccctggccgcaagtccaggctcacaggccatggccactgaccacaggaagaggcctccctccttaaagtcgggagaatatcccagaactaaggctagtcctgcatcctggccgggaatcccaggccaacaccctccccgcgatcttaggtgcttagcagccctggctggtgacccctgggcggagagagtacggtaatttgcaagaaatccaagaaagccctggtgagtggttgcttttcctatgttgcaaccatccgcgaagtgaatgctgctctgtgtctctattgttgttttgatggtgttcgagatgatgaggagaacctgagtcacagcctttacgagtctgatttcctcaatttacaggagctgcctacgcgttctggaagaattcacatgctgatttgtaggcggcctggccaggtgcttcggagactccagcagcatcgaaggtgtgattttagatctgtactcccgaggctcttgtgttatttaagaaggtcagtgtgaggccgggcgcggtggctcacacctgtaatcccagcactttgggaggccgaggcgggcggatcacgaggtcaggagatcgagaccatcctggctaacacagtgtaaaccccgtctcaaccaaaaatacaaaaaattagccggcgtggtggtgggcacctgtagtcccagctactcgggaggctgaggcaagagaatggcgtgaacccaggaggcggaggttgcagtgagccgagatcacgccactgcactccagcctgggcaacatagcaagactccgtctcaaaaaaaaagaaaaaaaggtcagtgtggttaaatgcataagaagtaatcagtgtgttaaatgtatgagttaattgagcatagcccaagtgaaagtgattgtgttttcatattaaaattagatttataaagagaatgctaaaacttgttggattttggaatgcaaggtctaagtaaaggtaggttttaatattgacaacttttacacttgatatattgactctttttttttttgagactagactctgttgcccaggctggagtgcagtgctgtaatcatggctcactgcagcctcaacctcccaggctcaagcaatcctcctacctcagtctctcaaagtgcttagactacaggtgcatgccaccatgcccgactaattttttaaaaaaaatttttagcgagatgacttagtgagaggtctcactaaattgtccaggctaatctcaaactcctgggctcaagcaatcctcccacctcagcctcccaagtagctgggactacaggcacgcaccaccacacccagataattttcaattcttttttttgtcgatagggtcttactattttgtccaggctggtctcaaactcctgggctccagcaatcctcccacctcggcctcccaaagtgctgggattacaggtatgagccaccgtggccagccttgactcaattcaaattcaagtcactaagtcttccttggaaagcacaaaacctcccccaggcattaaaatattcaagtgacacagaaaagggagaggtgaagaggagctaccacctggaggagaaggtgggctctgagccgggcctggagccaggcagggaggtcttcttagcacccagcaagctgcaccacccaagcactgccctctgccaccccacctctgctggcatggaaacctccctctgggggtccctctggcttcttgggtggagcctctttttttgagacagtctcactctgttgcccaggctggagtgcaggggcacaatctcgcctcaccgcaacctctgcctcccgacttcaagcgattctcctgcctcagtctcttcgcatagctgagattacaggcacctgccaccacgtctggctaatttttgggtttcaccatgttgtccaggcaggtctcgaactcttgatctcaagcaatccacctgcctcggcctcccaaagtgctgggattacaggcgtgagccaccacgcctggccttgagtcgagtcttgatgtctcaatcacactgccccaaatccatacacttgtttattcattcagcaaacaataaagcacctggacactccaggttccatgccaggagctggagttcacaggagagcacaggcctcggccctggggctgagtcttgccgccttcttcatggcttgtgactgctgtggtctgaatgctggtgtcccgcagattcatgtgttggaacttaatgcctaatgggatagtactaagaggtagggccttagggggctggttaagtcatgagggcttcaccctcacaaatgggattcatgcccttataaaagaggcttgagggagcatgtttccccttccgccacatgaggacacagcaagaaggtgccgtttgtaaggaatgggtcctcgccagacaccagatcggccagtgctttgatggtggacttcgcagcctccagcactgtgagcaatgaatttctgtcgttagaaaattacccagtctaaagtattttgtcagtccgggcgcgctgcctcacgcctgtaatcctagcactttgggaggccaaggcgggtggatcaccaggtcaagagattgagaccattctggccaacatggtgaaaccccgtctctactaaaaatataaaaattagctgggcctggtggcacacgcatgtaatcctagctactcaggaggctgaggcaggagcatcgcttgcacctgggaggcagaagttgcagtaagccgagatcacgccattgcactccagcccgggagacaagagtgaaacaccatctctaaataaataaataagaaagtattttgtcatagcagcctgagcagactaagcccctggccctcactcagcctctcctcagcctgccactcctgatggggacctactctggctctgtcctccccacccaaacacagcacccccacaagcagtggggagaggtccccagtggagcaggagtcctcctggactttgtacctggggccaccccagcagttaccgctttaaaaagaccacaacaaatgctaagctttggtgttctttatagaattctttttaaaaaacaaaaaaatgatcatcatgttttgtttgttttccatttagaagagaaacactttctcattattttaaaaatagaaacattacagaataggtactgtggaaagtgaaactgtcctttcccccgccaagcctctgtccctctcttctttcttcctgggggctcagcctgccagggccactgagctctaccatacaggttatagctacctgtcacttcttttttttttttttttttttggcccaggctggagtgcagtggcacgatctcggctcactgcaacctccgcctcccgggttcacgccattctcctgcctcagcctcccaagtagctgggactacaggcgcccgccaccacgcctggctaattttttgtatttttaggagagatggggtttcactgtgttagccaggatggtctcgatctcctgacctcgtgatcagcccgccttggcctcccaaagtgctgggattacaggcgtgagccaccgcgcccggcccttaattttctttttaatgcttctccgtattttctagctttctacaaagattaagtaatccataaataatttaaataaagtatcatttaaaagtctattctttttggccgggcgctatggctcacgcctgtaatcccaacactttaggaggcctaggcaggcgaatcacctgagcccaggagttcaagaccagtctgggcaacatggtgaaacccagtctctactaaaaatataaaaattagtcaggcttgatggtgcatgcctgtagtcccagctactcgggagactgacgcaggagaatcgttagaacccaggaggtggaggttgaagtgagctgagactgtgccactgcactccagcctgggtgacaaagcaagaccttgtctcaaagaaagaaaagaaaaaaaaaaagtctattctctttgattcaatatttactcttctgggaaagcaccccaaagaaataattctaaatcaagaaaaaggcctggtgtggtggctctcgcctataatcccatcactttgggaggccgaggtggacggatcacctgaggtcaggagtttgagaccagcctggccaacatggtgaaaccccatctctactaaaaatacaaaaattagctgggcttggtgcatggtggtggtgcctgtaatcccagctactcaggaggctgatgcaggagaatctcttgaactggagaggtggaagttgtggtgagcagagatcgcaccactgcactccagcctgggcaacagagactccgtctcaaaaaaaaaaaaaaaaaagtgttgtgcaggaacaaaaagattaagccaagcagatttgagcctcctcaagaaggcccttcctgacccaccctccagcacacctgtctggtgggagactgaggcacaagagcaggcatctgcgtgggaccatcactgtcttcggagttgaactaaaaatagtggagcgtggccagtctacacggacaccagccatcctcttgtttcgtgtttgctaaatgctgtgctcagcacttttctgcattattttattttattttcccaagaactctgcgtgggcagccactcttcttatcccccgtttcaagaacttactcacggaggacctgctcaagggggacttgcacgcagctcagtgggggcagagctgggactcggagcagggcccacctacctcctggtccgtgctcttaccctgcaggctgagccgctgcagtgtggctcgtccagcagggcctcatgctttcgggtgatgcctaacagccattccccctcctcctcattaacagagctccagccccacgggatgaatagagatgggcctaagctggtcctaccaaccccctgctcttttgccagtgattgatctagagtgcctatgtcaccctcacccaggtctgccagtgaaatgtagcgggggggatttctggagggcatttgctcttgctcactgcactgttacgtgagggggtgatgcttggagctgtggcagctcctttgtgcccatgagaagcagtagccctaatactagggtgagcagaaatccgtttgacttccttcaatacaggactttcagcaccaaaactgggaaagtactaagcaaatcagtatgattggtcaccttaaattgatgacacgggaagatagaaacttgggcccttgtcaagatgctaacctctggactttttttattttttattttttgagacagagttttgctcttgtagtccaggctggagcgcaatggcgtgatctcggctcactgtaacttccgcctcctgggttcatgcaattctgctgcctcagcctcccgagtagctgtgatcataggcacgtgccaccacacccaggtaatttttgtatttttagtagagacagtgtttcatcatgttggccaggctggtctcatactcctgacctcagatgatccacccacccagcctcccaaagtgctgggattacaggcatgaaccaccatgcccagcctggacgttttgttatgtaaacaatgactgtcttttttttttttttttttttttgagacagagtctcgctccgtcacccaggctggagtgcagtggcctgatctcagctcactgcaacctctgcctcctgggttcaagtgattctcctgcctcagcctcccaagtagctgggattacaggcgtgcaccaccatgcctggctaagttttgtatttttagtagagatggggtttcgccatgttggccaggctggtcttcacccctgacctcaggtgatccacccacctcggcctcccaaagtgttgggattacaggtgtgagccacctcgcctggccacaatgactgtctttatggttgaactcttcgtttcttgcggctgaaatcacaggggtgagacttgctggcctcccatgccctgtcaccccttgcgtttatgctgttccagtcccggagcccctggcccccaggtctgccatggatactgtgtccatccagccaggcgcctccctaaggccacctcctcctcaggggcttcccaggtgtcccagcagccaggggcaggcgtgccccggggttactccttttttctgacgtgtctcatgccctgcctttgtcatgggtcgctgggcaatcactgcttctcttctcgcctgtcccctccaccttcctgttcccccacaaactgtgagcccatagggagcagagagtacggcttcctgtatctttccctcatcccagcctcatggatcacatggagagcaggccacagactcagtttaaccagtctgctacatgtcttctctgggccaggaaacgaggtcaggcctcctcattccttcctgggccggcgggctcccttcacctcatcctgttcctgggttattcgcttctgacgcgaggccctagggccaccccagctccacatcggcctgtcttctctgcgccctgtggctgactcagccctgaatcacctcttccaccccaggtcctcttcccgggagaagctccaccatgggtgccatttctccttgtcccaggcttttcttgcctctggggactccaagcccttctccgggggatttcacccagctgctgtatatgactctctgtcccctctctgggccttagtcttctcctctggtaaaaaaggattcaccttgatgctatctaagtccctcgaatgagactctggggacaggaagtatttcagtcgatgtcgtcatgttgccagcttcacggggaccaaccaatgggcaggggaaggaaggagggccacgccagtgtgtctcttgtcctggctaggcatagggtcccaagccagagttggggacaagctgaccaagcaaacctcttggggtggctgctcctttcccagggaatccatgcgagagggtggccagggtctgcaggcaatgccaccgggccactgtggatgggagccagtggacttccaggaagggaagctaaagataccctcttcccggcatagcccagaaaggaccgggatctagttccctgtcctgttgtctctgggggcaggggtggtgaccctgagggccctggagcagctatgtggggctgggcacttctgggggctggagtctgggaccgggcatctattggccgagactctggaccggtgggcgagggcagggcagggtgggtgaattactggaagccccactggctctgtctctctgccaagctgcccactgcattctttggcctcctatttccaggcagtgtctgggatgggtcccaggcctggcctgccctgcaccggggagtccgtgtttggagtcaactgagctactgcttagggcggcagctgaggtgggtgggtgcagcttggacatgatgctatcagggacgctgggtacctggaacaaggaccgcctctccctagtgccatcctgggagctcaggtgacctgggagggaagggacatgtgtgagtgcctgtgtgtgcgcaagcgttcattgtggggggtgtgcacgtgcgtgtgcacacgctagcataggtggctgcgttgagacgaggggtcacaggcccgcatgtgcccgagtgtcctaggatgtgtgggtgagtgcaaaccttgggcaggccctgtcttctctagacatccccgtctggtggggtggccagaggggtggcatgggcagtttgggtctggatccctaacccacaacctgccccagggcagctgcccagagtgcttatgccagaacatctccaaggccgccagacgttgggatcgcatgtgccactgcattggctgtccccacccccatccccacgcctctgcccagggactgtagggtcggcgagaagcaaaggcgtgcccccatgcactctggtggctgcaccatggacactgaggttgatgcctggggttttcttagttttttttttaatttttaaaatttaattttttatttacttatatttttattctattatatttttatttaattatttgtttttatttaattatttttactgtgctcaaatatacataacataaaatctaccattttatcacatttatttatttatttatttgagacagagttttgctcttgttgcccaggctggagtgtagtggcatgatcttggctcctgggttcaagagattctcctgcctcagcctcccaagtagctgagattacaggcgcttgccaccatgcccagctaatttttgaatttttagtaaagacagggtttcaccatgttggccaggctggtcttgaacccctgagctcaagtgatccacctgcctcggcctcccaaagtgctgggattacaggcatgacccactgcgcctggccgtttgtttttgaggtggagtcttgctctgttgcccaggctggagtgaagtggcatgatctcagctcactgcaacctctgcctcccaggctcaagcgattctcctgcctcagcctcccaagcagctgggattacaggcacccaccaccacacctggttaatttttgtagttttagtagagatggggtttcaccatgttggccaggctggtctcgaacttctgacctcaagtgatcctcctgtctcggcctcccaaagtgctgggattacaggtgagagccaccacacctggccccatttttaccacttttaaacgtacagttctgtgacattaagcacattcccattgttgtgcaaccatcactatgacccatctccagagtgctttcatcttcccaagtgaacgtctgttcccattaaacaccaatgccccattccccctgcccccagcccctgcccccaccaatctgctttctgtccccacgaatctgactgcgctagggacctcctgtcagcagagtcacacggcatttgtgcacggcatttgtccttttctgctgggcttatggcaatcagcacagcgtccccagggctcacccatgctgcagcctgtgcctgggtttctctcccttccagggccggctgctcctccgtgtgagtttctccgtgtcgtttccccactgatccgcaggtggacacctgggctgcaccttctggctgcagtgaggagcctagatgttaagcctggcactggacagtggtgggcacctgggcacgtgatgggaccccctgagtctcactttcttcaactatggggcaggatctgtaacggttctggtggttttatttatttatttatttattttgagacagcgtctcgctctatcgcccaggctggagtgcagtggcgtgaactgggctctctgcaacctctgcctcctgggttcacaccattctcctgcctcagcctcctgagtagctgggaccataggcgcgcaccacgcccggctaatttttttgtatttttagtagagacagggtttcactgtgttagccaggatggtctcgatctcctgacctcgtgatctgcctgcctcggcctcccaaagtgctgggattacaggcgtgagccaccgtgcccagccacggttctggtgtttaagtgaggtcaggcatcctctgggaggtcagccgtcgtattgggttccaggcccgtgactactcacgggaggagtgagctgggccactgactccgtctctcacaagcctggaactggggagcaggagaatccctcacctcgtggggctgtggtggggacacttgtgtgggatgcagccagctcaggataggggcagcgaggaccaggcacgagtgggaggagcggggccctcagggctctgtagggttcttgactttttctcgcttctgtggcctcctcctatctccttccctagggccccacctggccttccgaatcctctcacggggcatatcagatctaccccagctgcctgaccgggagagcatcctgttcttcccctctggaattccgggtccacagctgtcttcctactcacatctggcctcggcattcccgccaagccctccccttgaagcacaaggatgttttgtccaggatcctgagcccagggccttccaggtggcagagagagatccggatgtccagccagctctgggggttcccccatcctgccagtgtggggacctccttgctgtagccaggtcaggccagccctagggagacagcaggatggttccaggaagcctgggccgctccccagatcaatgcagggacggacagcagccagcaggctgggccacggcatcagagctggggtcaagaggtttctagccctcttgtggctctcagccccgggtcctggctgcttcctgctgggcagtgacctccccagtccatttccctccctccttcctcccctggcctgagctcagctcatggaaggaggccctgtgtgcaggaaccttgatctgcacctctgaaggatgtcagggcagctttttctctgggcctgtatgactcagcgcaggatttagggcaggtggctccaccgtggagcctcagtttcctcatctggatgatgtgggtggacaatacccagtgcaggatccgtccaggcttacatgagacagcaatatagaagcctagctgatcacggcccccaacacaccttaaccccttcccactccccagctccccatctctagaccgagggagccaattaggctctcccgcagcaacaggtggtgagatagaagcttcgaggtggaggtaaagagtgaggactgtgcagcaatgaggagtggcccagatgggtctccctcccttcctgtgccacttctgcaggccccagtgcctgaggggtccagggccctatttggagagctccatggtggaggaggctgctcctccttcctgtggaccactccctgtcccaggggctgctgaccctgcttcactgcctggtggtggatgacgaggtcattatgagattagcacacactccaacgctgggtggagaaactagggtgggagccgagatcttctccagctagttcatgccctgaacaacatgagaaggaagctggggatggtctcacactttgagcttctcccacctgtcaaggttccctgtcttccttccagagccctcttccagcccctgcagcctctgtccccactgccatcccttgtgtggtgaccagtctccaagatggccccccagatccttgtctctggtattcatgcccttgggtagcccctcccacaccgaatcaggcagattcacatgacttcaggtctagggcataaagcatcgcctcttccatctggtctttcagctcagatactctgggggaagccagtcactattccacgaggaagttcaactaccccacggagaagctcatgtaaagaggaactgaggccaccagccaacagctgcatgaatgagccaccttagaagcgatcctccagccccagtcaagccttcagatgactgcagctctgaccaccatctcactgcagcctcatgagagacctcaggccagaaccacccagccaaaccactcttgaattcctgacccaccaaaactgtgagaggtaataaatgattattgctttaaatgaccaggttttggggtgaactgtaatatagccaaagtaaccagaataccttgggaaattgtaccccgactcattgagaaaggcatcccggtgtgtctcctctctgaaagctcagtcctctgcaggctgctgtgttagttttctatgctgtgcaacacattatcacgcactcaggaactaagacaacacgcacatttactatatcacaatttcttcaggtcagaagtctggaaactggctgggcatagtggcttatgcctgtaatgcaagcactttgggaggccaagggaggaggattgcttggggccaggagttcaaggccagcctgggcaacatggtgagactacacctctacaaaaaaaaaaagaaaagaaaaaattagttgggcatggtggtgtgtgcctgcagtcccagttaggaggctgaggccaggggatcacttgagcctaagagttcgaggttgcagtgagcagtgattgtgtcactgcactccagcctgagtgacgacagcctgagtgacagagtgagactctgactcttaaaaaaaagttaaaaaaaaaaaaaaaggataagtctggaaactgctttactgcatcctctgtttcagatctcctcaggttgcaaacaaggtgtcagctgggctgggttctcatctggaggctcaaccgaggaaggctctgcttccagagccatgctagttattgtcagatttcatattcttgctgctgtgtgcctaagggcctgaggtttttgctggctggaggctggagaccacctgcagttcctagaggctgccagcacttcctcacctcatgggcttcctcaatgtggctgcctactccaccaagccaatgaggaggatctcagtccagtcagctaagttggagtcttttctaatgtaatgtaatcatgagagtgatgtcatcatctttgccgtgttctattggctagaagaaactcctaggctttgcctacatgcccagaggagcttacccaagggtgactgcttgcagtcattttaaggtatgtccacagttactgatgggggttttctttggccagagccttgctggctctaaagagggagagggtctctgcctcatgactgggtgccccatgacatgcatttcctgatctccatccagttttctacagcagtgagagctaagaagactggtttcccaacaattaggcttttttcccagttaagatggaatagtcccatttgaatcatgcacgtttgttggttaacatgattctaacccaattcctacaaaataatgactctggtaccacaattgagcttactgtgtgccagacaccaaattaggtacttaaaaaaaattgagatgcaattccattacgttgccctggctggtcttgaactcctgggttcaagtgattctccagcctcagcctccctagtagctgggattacaggtgagcgccaccatgcccggcctaattagggactttaattcattatcttatttaagaatcacaacagccttatgagtaggtattattattttcagggaatattccttctgaggcacggaacacacaagtgaagtgtccaaggtcagctaatagctgtcagccagggctttttgaagccagtgtaaactgcccgaagcaattagcaggaggttgtatcactggctcccatgcagaaacacaaaggcttagagctgggcctcaggcacagttggatctagattcaccagtgatgtcacctggaaactgtccctctccatctcccaggtcggctttcctctgccatagcttcgccctcaggcaggctctctctagcggtagcagaaatggctgcagccagctccaggaaaaggccggggctggatggccttggcctggttgggtcttgtcccaaccgggtctggaccaactagggtgtgcatgcggtgtttgaccagccctgagcaggtcaggcccatcgctgagccacatacagcaagagtgatgaaggggtagaatccaagatgcttccacaaagagaagagaaagtgggtgctgagcaggcaacagcactggatggcagcctggggacagaactagattccaatccagttccatctgactccagggtgctgctgtcagtcactgtgctgagaagagtcccgggtgtggccaggacctgtactgggtgccaaactcactcccaggcgagtccttcccggaaggggggcaccgtgaaggcacaggccctctgtagaaaataggacacgggcgggggaacagcttgcttcttttttttttttttttttttttttttttagagataggatctcactctgtcatccaggccagagtgcagtggcatgatcatacctcactgctccctggaactccagggctcaagtgatcctcccatctcaggtttccaagtggctgggactataggtgcagcacgtcaccatgcctggctaattttcttttcttttctttttttttttttgagaccgagttttgctcttctcgtccaggctggagtgcaatggtgtgatctccactaactgcaacctccacctcccgggttcaaacaattctcctgcctcagcctcccaagtagctgggattacaggcacccaccaccatgcccagctaattattgtatttttagtagagacaggttttcaccatgttagccaggctggtcttgaactcctgacctcaagtgatccacctgccttggcctcccaaagtgctgggattacaagcatgagccaccacacccaacctttttttagagacagggtctcactctgttgcccaggctggcctcgaactcctgggctccagcgatcctcccaccttgacctcccacaatgctgggattacagcatgagcgtgagtcaccgtgtccggcctgaggggcagctttctttccatgctagggagagtagagcagctgagttaagaatggcttctgttaccagcttttccatgaccagcagttattgcttgggaggatttgggatgcttcttgttgcaggatttaatccctgcagcagccctggcaggtaggaaacatcaccacccccatcaggagggaagctcgaggctcaaagtcctccagacccaggagtcatgggtcttaatccctcacttagagaggagagaactgagggccagggaggggaatgacccctgagcttcctgtccctgtcctgggtacctctggtctcacctccagtctcctttgattgacattgtatttttagatgggtaatacattcatatggttcaaaattcagtcgtgaaaagagtttactgagaaatgtctgtctttgcgatcggccgaataatgggcccccaaaggtgcccatgtcccgattcctggaacctgtgactatgtcaccttatatggcaaaagggactttgcaaatgtgatgaagcttaggctcttgagatgggagattatcctggatcatctgggtgggccctaaatgtaatcacaggggtccttctaagaaggaggtctgagagatccctgcctgctgactttgaaggtggagggagagtgtcttagcatgagctgccagaacaaaattccacactgggggctgaaacaacagacacttatttctcaccattctggaggctgggaagttcaaggtcaaggttgtggctgactcagttccccgtgaagtttctcttcttgacttgcagagttgccttctttttattttttttttcaattatttatttatttatttattttttgagacagagtcttgctctgttacccaggctggaatgcagtggtgcgatcttggctcactataacatttgccttcctgattcaagcgagtctcccgcctcagcctcccgagtagctgtgattacaggcatgcgccataacgcccggctaatttttgtagttttagtagagacggagtttcaccacgttggccaggctgatctcgaactcctgacctcaagtgacccgcccaccttggcctcccaaagtgctgggattataggcctgagccaccatgcccagcctttattttttactttttgagacagggtctccttctgttgcttaggctggagtgcagtggcacaatcacagcttactgcagcctccacctcctgggctcaagcaatcctcttgcctcagcctctgaagtagctgggaccacgggcacacaccagcacacccagctaattttcttattttttgtacagatgagggtctcactatggtgcccaggtcgttctggcctcaagacatcctcctgcctcagcctcaagaattgctggaattataaacatgagccactgcacttggctcacaaatcgttttttaaaatgtatgtttccaggccggacacagtggcttacgcctgtaatcccagcactttaggaggccagggtgagaggccgaggtgggcggatcacctgaggtcagcctggccaacgtagtgaaaccccatctctactaaaaaaaaaaaaaaaaatgcaaaaattagctgggcgtggtggtgggcacctgtcatcccagctactcgggaggctgaggtaggagaattgcttaaacccagagacagaggttgcagtgagccgagatcgtgccacactgcactccagcctgggtgacacaagactccatctcaaaaaaaaaaaaaaaaaagtacgtttcctagcatattttatggacatgaaagcaaatgcttgcatatacatatacactttcttctttctttctttctttttttttttttttttgagatggagtctcgctctgtcgcccaggctagagtgcagtggtacaatctcggctcactgcaacttccaccttctgggttcaagtgattctcctgcctcagcctcctgagtgagtaggtaggattataggtgcataccaccacacctggctaatttttatatttttttagtagagatggggtttcactatgttggccaggctggtctcaagctactgacctcaggtgatccgcccacctcagcctcccaaagtgcggggattacaggcataagccaccacgccccgccaaactttcttctttctacccccatacaaatcatagcatgccatacacactcttccgcaccttgatttttatcccttaatatgtattagactgtcagactgtcctctatcagccttgaaagggctctcgctctctcccttccagtgttcctttggacagatgcgccagcacctatgtgccccattgctgcattttgcactgtgtacctgtcagggttctgtgcaaggcgaatccacctcaggtggttcaagccaaaagggattttaacataaggaatcaggaattcataaaatcattggaaaagattcatgggcttgagaaaaacaatcactgggagagatggaaggtcaaagctttctggggtaaggccacgcctccaccacagtccccgatcctccccactcccacacccacaaatcaggcactgagatggcagaatgggaaatggagccactgccaaccagtgcttctgctggaacccactttcatacccatgcagctgcagaaagacaagagtctgtcttccttccactttccaatcccacaagaacgcattgatttgcagagagaaagtcacatctagagagaacctgggaaagagtttctagctttcccactgctgtggtctgaatgtaacccccatcataactccatgcaatagtgttaagaggtgggttctttgggaggtgattaggtcaggagagcttctccctcgtgaatgggattaagacctttataaaagaggctttgaaggctggacgtggtggctcacgcctataatcccagcactttgggaggctaaggctggcagatcacctgaggtcaggagttcaagaccagcctggtcaacatggcgagacccgtctctattaaaaatacaaaaagttagctgggtgtggtggcccaggcctgcaatctcagctactcggaaggctgaggcaggagaatcacttgaacctgagaggcagaggttgcagtgagctgagatggcgccactgcgctccagcctgggtgacacagggcgaggctctgtcgaaagaaagaaagagagagagagagagagaaagaaagaaagaaagaaagaaaggctttgtagagtgttcaattcagctcattttttgcccttccatcccttctgccctgtaaggatgcagtgttcattctctccggagggtgcagcaccaagtcaccatcttggaagcagagagcagccctcaccaataccaaacctgccagcaccatgatcttggacttctcagcctccagaactgtgagaaatacatttctgttctttgaaaattacccagtctaggtattttgctaaagcagcatgaatggaccaagacaccaaccatctaaaaaaaagattaaaggagctgattccaccagccagcatcttgctgatcttccacaccatggcataaaaagcagcaagagctttcacctaatgctatacaactgtgccccaaacacacacacacacacacacacacacacacaccctctccccagaatgaaaaacctgatgttctgatcagtcactctccagctgtgggtggtgctcactcctcttctgggcagaaatcccatgagattaattaaagtcacccatccccagggcccccagaggcataagtatcatttgcaatatagatttttccaatagtgccctcttggaattgtgcagtgtgcagcctggacaacattatgtggtgaccctgggtcctatactttatgtagaatagtaaggaaaaaaaaagagggaaaaaaggaaattagttaacataaacaaaaatgaacaggataaaggggaaaggtgtatggtggtccctcactctgccatagtttctactgataacttcctccttccaccatctagccataatccctcccccttggccagcacctcatatggtcgtggttctacctggggtaaccccatctgtatataatacagccgtcccgctgcaggccaggtcgtgaaccaagcttgcaataggagatacccgtgacacagcccctgcccttgagaggagtctcaggcagtaacaaacacaggccactggctgggcatggtggctcatgcctgtaatcccagcactttgggaggccaaggcgggcggatcatttgaggtcaggagttcgagaccagcctggccaacatggtgaaccctcatctctacaaaaaatacaaaaattagctaggtgtgttggcgcgcgcctgtagtcccagctacttgggaggctgaggtggaagaatcacttgaacccgggaggtggaggttgcagtgagccgagatggcaccactgcactccaacctgggtgacatagcaagactctgccaaaaaaaaaaaaaaaaaaaaaaaaagctgggggaagggtgagcgtagaaaatagttgtagttaagagacggggttggctggttcagcttccaaagtctaggatttggtatctgatagtaagagcagtggccaatgcgggggtctccaggcagggccctaagcaccgcgccaggttaatgctcctcgcagctcttgggcaggactgactgttggaggcttgtccagcagagacaggaatgaggggaccgaggacccaggcatgatggggcgggggcgcggggacctgcagcccagcgggctcggacgacctcggacccccgccgctccacgggcaggaagggagcccggagcggcgcgggtgcgcattgatcgtggtgcggatgcagccgctgcggcgcggccccggcttctctgcgagcccgtgcccgggccgggctgtcgggaactcggcccggctccacttgctcgcgcttactggaaacgtgctcccgagcggcgcaaggctcggcggctggagcccggggcggcccttggccgagggcagggccgagccaggtgctcgggcgccccaggctgccgcgccctgctgggccaccctgggcgcgtgccacccccggggacccgtcccgtcctgagggcgcccagggcctcccagcgccgctctccccagggtgagcgggaggagggagggagctgggggcagcccggggaagccgtggggcgggctttcagcagctgcgaggcgaacccgcctcccttcccggtattctcgcggccacccggtggaaggtggcgccacgccagggccaggcggaggcggggagccaagcccgcagccacgccctgcccagggcgcaggtgggctcggctggaggaggtgctgggggtgggtgtgtctcctgacacaggaagagctgcctcctggctgccccagtcacagaaatgtttattgagcacctactaggcaaggtgcgaccactgcagtgggggtgggggcacttttctccccgggcgtgtatatttatttatttataaaccataggcactttattactgggtttatatattatgtatccatagaagttgagatttaaagaggatgaattaaaaaatagaaacagaggggttgttttcctttccgtatgccagtgagttgtcttatacatgtcccactttggagacctgggtttagtggctgtatcctgctgggcgcccccctccccagagctggagacaaaacccccacccgccccctggttcacgtcatcctgcctcatgaggcccagggctgagctgttttcggggccctggtctcggcttcacagcctgcagtggagtgtagcagatggcagactagggtaagtgaggatgccttgagatctgggttcaaatcttgcgtctgctgctccctggcccagtgacctcgcacctctctgagcctcagtttcttcttctgtaaaataaagggagtggcatctccctcttgcccggaggtgggcctgggggctgcaggctgccctcctgatctgctctgctgccagatgggcacagataggcggggggatgacagccctgagtgaacccagaaggcaaagtggttaggaacacaccccagaggccaggcagggtcctgcagggtcctgcagattcagagaaagaacccatttatcctggggtttggcagagattatggttccggtaaagggtggtcattagtaaagtccatgtcatgcagccgagggcctgtgggaaaggtagggttcaaggaggagttagtgggagaggagagtgaggaatcagagttggtcagtcagacagtcagtcaacaaacacaaactgagcatggcctctgtgccaggcatggttttaggctgtggataaccaaggagcttgctcagcagcctggggttctttgcagcccagggtgtccctgtcaggagtgggcactgtgtctctgaggagcagtggagtcacctgcaggccaaggctgggaaaccctcaggagtgtgggggaggccaccccctgaggtgtggtccccccctgggtagagagtgactcaggccccgcccagcctccccactgcctgggtttggtttgtttaagaacaaattagtcacagagcaggcagctttcccgaaaataaaatgagaatccccaggaaacagggaaaatggaaggcgggcggtgagtcagcacgtgctgccccccggggctccagtttccaaaagggcctcctgccctgctcctcctcctcctcctgggtctctctctttctcttttacttttcctctggtcccctgttgactttttccctcaccgaactcactgaatctcagtcctcacacacgcgcacccactcacttcctgccccttatcgtttccctccctgcatctgtctgtctgtccagcctcgatctgtgcacccactggctcctttggtgtttacagagcacctaccaagtccaggcactgtgcaccacgggagggagtggggaggcagagaaggcctaggtctctcctcccagagccctttcttgttggaaaaggagacttgtgccgggatgtggccagccacggccgcgcctgggtccccttccccagcccctgctcctgtggttggttcccccggatggacagagctgggcccccaacagagaacgatgcttgaggatcccattccaagccaatgccgtctctgcctccctcccggctcggagcacaaggcctgcacgctgagggcgagtgcgtggtggagcaggagcttcggggcggtgtttctcacccagccatgtctcccctgcccagaaccgggcatcaaggggagtgaactgcgggctgttttgaatttgagggacaagcttggttgtcccttgttccctgcctccccattccaagcctcctgtggcagaaggaggccaggccatatcttgagggaggattctgggcgtgcctgcttcaccccaacagcccaaggtcaggggaggggctccaggccgcagggggtacagcaaggggaagccactcaggccccttcccatctggacaagtccctgagtgccagggccctttgactctctcctgtctccctcctcccccatctcccagctagaatccaggctctcccaccaccctctgggacccctggggccgctcactttccagacccctctaattcgggcactggcccctcaggagccggggaggtggccctgtgcctgggtcatggggctgggctggggtctcctgcctctcgggtcactgtccaatctctgtctgcagctctcgatgaataatttagttgttcgaattacaggaaagagctatttagcttcccttcccaaatcgttaagagctgatgatacaagacgtcttggttccttctaaggaaagtccctttcccagtgaaactgagccttgtgggcggggatttctccccctccaactccctcaccaatcattaaccaatatccgacagtaatagggttttttcttttttcttttttttttttaagctcagctatatatattctaaagtatatgtcagttcttgggagcagggaagtataactgatctgaagggtggggtgggggttctgctctggaaggagccttgggtgagctaatggtgaccccaagtcataattgcaggtccctggaggggatttaagatataggaagtagcacttcgcaagcctgagaggaagaagcatggggtgtaaaactgttcaggtggttcaagagtgcgtgtgcgtgtgtgcatgtgagtgtgcatgtgtgtgtgagaatgtgaatatgcacatgtatgcgtgtgcacgagggcgcacacgtgtatgcacagatgcacacgcatacctgtgtgattgtgcatgtgtgcgctgtgcatgtacatatgtgcgtatgtgtgcacgtgtgtgagtgtgtacgtgtttataggagcatgactgcctgagcggcatggctggaatgtgtggaccgggaccaggtgggggtttgcagtgcagggacagcacttcttgttttcagagctgggagagttggggtggggaatctgggtagggctggcctcccagtcaggtgacttgcaggcagggaggggaggggctttaggaagttcagagagtgggagggaggaacagggaagggcaagggtggggaccttggctggaaggttcaatgcaaagtgaggcgacatccaggattgagcattctggatcctagacccagggatggctgggaggtggggctcccctgggtgaaggagccaggtgggtgtgtgagccaagagttagctgtggctgccagaggagggggctggagacgaggctgccagcctcagcctggctgaagaggacctcccagcaccaggccaggggaaggtggacaggtagggagagaaaaaggagggaaggaatgaggactgagctagcaggtcccacactttgcaggtgtggtgaggaggagagagggaagaagggggaccctctgcagtcctggctggcaggaagcttggcctgtgctctggcaagcacaccctgccctgctggactcactggaggagtctgttctctgtgtgcccggcagagggatagacacgcatttcccacgacgtcacccaccccagaaccacttagcctgcagcctcccccagattccctgacttcccacctgagcaagcccagctggcctcccgcatccactcaggtgccctccgtgtgttgtcttccggacaggggcacccaacacaggtgcaagcagtgcgtgctagggccggagaggaggacagtggaggctgctcccagcctcctttttcttccgtactcccaccagcacctccaccccacctctgaaactccaccccaattctggggagtgtggagatgactgaggaaggggggatatttccagagccactccaactggtcccagatgcatcagagggtgaccctgggaggccagtccttaggcagctgcctaaggacccgactctggaagggaactcagagacaaatgaggagcagaccagccccagctccgggtttgcagatctgggcagagtgaggaaaaggccgggaaagaaaaaccaacccccggaatctatctcagagaagcatccgtccaggtagagagggaccccagcccgaccgccaccctcacccaggggagaagcctagcagctccctctgggttgggtgtgcatgtgtcatcccaccaaagtgtgctgggattggaatgggcacgaccttcccccagagagatcgcctgggcagccccgtaagtgtccaggggtcccctgagagcattctatggtcccagcctcccacaggagccccaacaatgctctctggctcctcatcctccttggtggcagctcctctccccaccaaagggccatgtgggtcccagctgtgacctcagcacccctcagccagatgtggacccgccccagactccatcactctctctgctctcttcacagaagagaggtggagggaggaccccacgggcctcgctggtggcaggcggtggggatgtagcgggggagtgtgtggggggggttagagttaggacagcagcccctccccaaaccccgatccctgagccccaagcctgtcttggctccatggggcaagggaggggtagtcaagccccacagaagagaggcatcccccagtttccatggagaaggatcggggtgtcctgatttggaggcttccatgctgtctgctgctccctgtggatacacagttggggcgctctctgttcctccctagtcccttctctcctccctgcttgcctgggaggcttgggcaggagggcacctggatggtggccactagacagagcccaccccccgccgcttgacctctgccctctcctgggtgggaatggcagggccctctttggtgtcaggagctggtggcctctgtggcctctgtcccgcccgctcccaacacctgccttcccttctctgctccagctgcagtcggcttctgccaatgcccagaaccttgtagtcttttgcccgctggttttgcatgtgcttcccctaggccagagggcagcaaactttctctgaaaagggccaggtagtaaatatttcagcctctgcttagtgaggaagcagccatggaccactcacgaacaagtgagtatggctgtgttccaacacaactgcgtacgcacactgcaacttgaattccgtgtgattttcacatcatgaaatattcttttttcttttgcttggtttttcaaccacttaaaaatgtaaaaaccagccaggcacagtggtttacgtctgtaatcccagcactttgggaggccaaggcgggaggatcacttgagcccaggagttcaagatcagcctgggaaacacagtgggattccgtctttacaaaaaatgaagaaattagtcaggcatggtggtgcacacctgtggtccaagctagtcaaggaggctgaggcaagaggaccccttgagcccaggaggtcaaggcagcagtgagccatgatcacaccactgcgctgcagcctgggcaacagagcgggaacctgtctcaaaaaaataattaaaattaaaattaaaacatgtaggccgagtgcggtggctcacacctgtaatcccagcactttgggaggccgggatgggcagatcatttgaggccaggagttcgagaccagtctggccaacatggtgaaaccctgtctctactaaaaatagaaaaaaaattagccagatgtggtggcacacgcctatagtcccagctacttgggagactgaggcatgagaatcacttggactcagaggcagaggttgcagtcagctgagatcgcaccactgcactccagcctgggcaacagagtgagaccctgtctcaaaaaaaaaaaagaaactaaaacgtgtaaaaaccattttttttttagtggaatcttgctctgttgcccaggctggcgtgcagtggcacagtctcggctcaccacaacttccacctcccggggtcaagccattctcctgcctcagcctcagcctcccgagtagctgggattacaggcacgcaccacgatgccgggctaatttttatatttttgaatagagatggggtttcaccatgttggccaggctggttttgaactcctgacctcgtgatccacccacctcggcctcccaaagtgctgggattacaggtgtaagccaccgcgccaggcctgtaaaaaccattttttgcgggctgaacaaaaacaggcagcacgttggatttagcctgggggcagtggtggaggtttgctgacccctgtactaggctgctccattggggaactctctcaaggttcagcggaagcctcccttcccggaccaggtgagatgccccataagacctgtactgcctctcttctggcaggccgcctagcaccctaggtgctcaacaacagtttgttttgttttgagacagggtctcactccgtcacccaggctggagtgacagaccacgtcttactgcagccttgacctcccaggcccaagcaatcctccggccctagcctcccaagtagctgggactacaggcaggcaccaccacacctggcaaattttttctatgttttctttttttttttttttctgagacagtgtcttgctctgtcacccaggctggagtgcagtggcgtgatctcggctcaccgcaacctccccctcccagtttcaagcaattctcctgcctcagcctcccaagtagctgggattacaggcacgagccaccatgcctagctaatttttgtatttttggtagagacggggtttcaccattttggtctggctggtctcaaactcctgacctcaagtgatccacccgcctcggcctcccaaaatgctgggattacaggcgtgagccactgtgcccagcccttattttttctattttttacagagatgaggtctcacttgttgcccaggatggtcttgaactcctgggctcaagcaatcctcctgcctcagcctcccgaagttctgggattgcaggtgtgagccactgcacctggcctactagtttgttgattaaaggtgcttcctacacattgtctcctttgatcttcacaatgtctgagcaaagcatagcaattatccccatccctgtttttgttttgttttgttttgttttgtttgagacagagtctcgctctgttgtccaggctggagtgcactggcaccatctcagctcactgcaacctccgcctcccaattctcctgccccagcctcctgagtagctgggactacaggagtgcaccaccacgcctggctaatttttctgtttttagtagagacggtttcactgtgttggccaggctggtctcgaactcctaacctcaggtgatccacccaccttggcctcccaaagtgctgagatttcaggcgtgagcccccacaccaggcatattattcccattttttaaatttatttttatttatttatttattttgagatggagtcttgctctgttgcccaggctggagtgcagtgtcgtgatcacggctcactgcaagctctgcctcctgggttcaagtgattctcctgcctcagcctccaaagtagctgggactataggcgcctgccaccacgcccggctaattttttgtattttttttagtagagacggggtttcaccatgttagccaggatggtctcgatctcctgaccttgtgatccgccaacctcggtctcccaaagtgctgggattacaggcatgagccaccgtgcccggcctattattcccattttatagacaaggtagttgaagtctagagaggttaagcaacttgtccaatgtcaccccgctggctgaggcagaggcacaaagggagtccgcacactgttttccgggcagctgggcagctggagagcctggcctctgtccactggtccagggctttaggggatgagaccgggctgttccaggggtccagggagcccagcctgcctccatccctggtctcaggcttgcttgggaactgacgggggtgctccttgacctccatccaccgaaaggcccctgcccttctgtggagcagcattctttacgagtcatttctaggactgggcttatgactcctggtcttcagggattgagtcctgccttctcagtcatcccaggtcagggctagagttagtgactctgattctgtagtccctggcccacccttcctgagccttcctttggagccatcacttagcccagctggggccagtaactgctctctcccctgccccacccccagctgtggacatgtccccatggtctcagcctcttctcagccctgctccactcagcctccagccagaccatctctgccaggccttcatctccccatgcgtcagaggaggatgactgcccggcaccctcccactcccagcgtcagcctgggaattggggcgtgctcctgggctgggcctgatgtacacggtgtgcagctgtgggctccctcccaatcacggggtatctcaggaggtttctgaggttggggatgggggtggccctctcctttggatttgaggcagtggccccaggaccagcggggtcactcggctcagcactcccttccagttctttcccacagaacatcctggcttcagggattcccatcacgcggccagagttcatcggaagtccccctccctcatcccctggagggaggaaacagaccaggtcatctggctgagcgggaggagaaggctcgggttctggggaggggagcctgggtgcggcagggtccagggacagttggcatgggcgtaagtgcaggtatagaattccacatagggcctcacagctttgggggccatgagatgacagcgtcaccaatatcagtgatcatcacctcccatccagaggccgaagaagcagggccctgccacaggcagccaggctggctctgctgggggaacaggcagaagaattacaaggaaccagatgtggttcttttttttttttttttttttttttaagatgaagtcttgctcttgttgcccaggctggagtataatggcacacgatcttggctcactgcaacctctgactccctctgactcctgggttcaagcgattctcctgcctcagcctcccgagtagctgggattacaggcacccgccaccacacccagctaatttttgtatttttggtagagacggggttcgccacgttggccaggctggtctcgaactcctgacctcatgatccgcctgcctcggcctcctaaagtgctgggattacaggcatgagctgccgtgcccggctccagatgttgttctttagaagaggccccaaagccctcttctctctccttcctgtgactgcagctgaactgcccagggtctccagccagtgaaagccaatgtggtcatgctggcccctcctgaaggcctcactctatgggcaaaagcagccctctggtatcagtcatatgcagagccacctgccagctgtcaccaggaggatggggacatgtttcctaggctgggggcaggggcaatgctgaacacttgcagagcaagtaggaaggaaagagggagagtggaaggaaggaaggaagggagggagggagggaggggagagagagagggaaggagagagggaggaaagatggatagaagggtagaggggggaaggaataaaataaagaagggagaaaggagagaggaaggaaggaggaagtgggagaggagggaaggagagaggagggacagggcgccactttgtgaggggaagccgggctgagaagcgccacttgtgtatttgcttatttctttgctctccggtggaatttctctgtcgtccccccacgtgcccttatctgtctccttgccatctccctggctctggccccagatccagctgggattggcagccctgtgcccacaggcccggttgccttggcaacgcccctttgttaggcaccagcatctgaaaatgtcaaactgtttccagtgggtcagacctgcctccctccctttttttccccttctcctttttcagttccagttgccactgcccaagttgcaaacttcctctgtctccatggggatggaggagggctgtctctctttttccgtcccaaacatctgtctctataaacagttgtgtgtgcggcacctcctcctcctgggcccgggcttcggggaggaagtgctttgttgatctggagggggtcggtttccttgctcctctctcggggctggccccggtgctggacggctgcagccgtggactccgggagctccaggcatgtggccagtactcatggctcctctggggccagtgtctggagagaagggcagaggttctgctcagtcatctggtagacctcagctttgctttgcttgctaggttgccttagagaggttactgaaagtctctgatacccctctgtgcggcggggatttgttgagtgggtaatgagctgatctacgcagagtgtcaggagcaattcctgggtctttgcgtcagaacactcctggagttcacgctcccagtgattctgcaccctacggtgaagatgccatgatcatactgcgatgatcagccccctttgggagaatgttcagactcagagaggttaatcggcccagggcttacagggacttggtggcagagacaagattccaccccaggaggcaagcccagacattttccaatccactgggacctctatcagaaccctgggccctcagtttgcaaactgaaaagcttagattcagtgacctccttcccagcttgaaacttctttatttcagggaagagggtggggcgagctaagaagctagaagcgttttgccgtgagccaaggaccaaggacgggaatgcacgatgtacgagcgaggagtcagggacggggactccgatggccgatgactcagacctgctttgcctggctgggggaactgggccatgggaagaacacaggactggccccggcccaggcccaacccccgcttggccacggcggagagcctgccccaggcccacctggccgaagcaccagcatcattccaggggcctcaccctgcctaactcccaagtccatgtccaacaccttttcctgtgtccacaattctcatgtggttcaaagacgtagatccattactgtttccagatgatcaaagcagctacctaattaacaaccgagtgaatgtccaagttagagctttggcgttggaacaggaagaactggatttgaatccagctctactaattagtggctgacttggatgggttaatctctctgacacttgtttatatcatcagtgaaatgagtggcagggtaacaggacccactggagatgatgcctacaaagtgctaggggttttgcgtggcaagtggcttcagaaacaaggaaagtaccactgttgcgattattcagttggctcaggcaggcggaggctgtgcttccacatcccacagggccctgtgtccccagagagcaggacacgtaggaatttgccatctcagtgcagtgcacaaggacagaagcaagggcagcaggggcagtcaggctgccggggcaaggggcaagcttctgtccaaagcagaaacactggctgggccttctttggtccagcaaacctggaccttggcaggaaaatgggtataacaacgacctcagctggcgcttgcgggaacccacgataggtgcagaccctcagaggtgcatggggtgtgactctccctccacctctgtccagaccccaacaatgggagagggtggcaggttttctgggtgggggataggaagccagcatccgagaacctgcccctggatggcaggaggctaggccacgtgaaagccgaggctccaagccccctgtgctggctccattgtcccatcagactcgacttacaaatcacaagtttcaatttgaaattcaatttcaaattttttttttttttcagatggagtctcgctctgtcacccaggctggagtacagtggcatgatttcagctcactgcaacctccgcttcccaggttcaagcgcttctcctgcctcagcctccagagtagctgggattaccggtacctgccaccatgcctgtctagtttttgtatttttagtagagagggggtttcaccatgttagccaggctggtcttgaactcctgacctcaggtgatccgcccaccttggcctcccaaagcgctgggattacaggcatgagccaccacgcctggccatatttttctttctctttttttatttttgagatggagtctcgctctgtcacccaggctggaatgcagtggcccaatcttggctcactgcaacctcctggtttcaagcgatcctcctgcctcagcctccaagtagctgggattacaggtgcccgccaccatgcccagctaatttttatatttttagtagagacagggtttcaccatattggccaagctggtcttgaacttccaacctcaagtgatctacctgcctcggcctcccaaagtgctgggattacaggcgtgagccactgtgctcagccaatttcaaatttttcaagataaaattaagaatttcacggccgggcctggtggctcatgcctgtaatgccagcactttgggaggccgaggtgggtggatcacgaggtcaggagttcgagaccagcctgaccaacatggtgaaaccccatctctactaaaaatacaaaaattaagctgggcgtggtggctcacgcctataatcccagcactttgggaggctgaggtgggtggatcatgaggtcaggagatcaagaccatcctggctaacacggtgaaaccccgtctctactaaaaatacaaaaacaattagccagaagtggtggcaggcgcctgtagtcccagctactcgggaggctgaggcaggagaatggcgtgaacccgggaggcggagcttgcagtgagccgagatcacaccactgcactccagcctgggcgacagagggagactccgtctcaaaaaaaaaaaaaaaaaaaattagccaggcgtggtggcgggcacctgtaatcccagctactcaggaggctgaagcaggagacttgcctgaatctgggaggcagaggttgcagtgagccgagatcgcacgactgcactccagcctgggcgacagggagacactctgtctcaccaaaaaaataaataaataaataataatttcaaggtgactgtagagcattaaacgcccaagcactgagtgtggggccctgcgtgacagccctgcccctgagtatctaatgtgtgcgttgacagccctgcccctgagtatctaatgtgtgcgtgacagccctgcccctgagtatctaatgtgactggctgttgtctcccgggatatcttccaagagacagaataacctggatctgaggataaatgccaggaggaagggagaatgtatccatggttcccatctccattagtcaaaggtacctctacagtgccttcacagcccaggcctcactgcgcctagcggctcctcagcgtttcaggctcagcagcagcagggacaccacaagtggccaggtacagcctggaacccctcccagggctggccctagaggcaggtaaagtgaggagcaccttagatggtgcataaaaagtgtccaatgcaagtgcctttcctgaggctgatcactgtacagtgattctgtaagaaaatgcccttatttttaggaaatgcacactaaggccaggcgcggtggctcacgcctgtaatcccagcactttgggaggccgaggtgggtggatcacttgaggcccagagttcaagaccagcctggccaacatggtgaaactccatctctactaaaaatacaaaaattagccgggtatggtggtgggtacctgtaatctcagctacataggaggctgaggcaggagaatcgcttgaacccaagaggtgaagttgcagtgagctgagatcgtacactgcactccaggctggcgacagagtgagattccgtctcaaaaaaaaattagcttggcgtggtggcataagtctgtagtcccagctgctcaggaggctgaggtgagaggattgcttgagcctcggagatcgaaggtgcagtgggctgtgatagcaccaccgcacgccaccctgggcaacagggccagaccctgtctcaaaaaataaataaataaataagtaaagaaagaaagaaacaaacacacatggaagtatttcgaggtaaagaggcatcacgcctgtgacttatgctgaaatgtcttagaaaaaaattgggagagggtactgtggctcgcacctgtaatcccagcactttgaaaggctgaggcaggaggattgtttgaggccaggagtttgagaccagcctgggcagcatagtgagactctgcctctacacacaaaaaaattagctggctgtggtgattcacacctgtagtcccagctattaagaggctgaggtgggaggatcgcttgagcttgggaagtcgaggctgcagtgagccttgatcacacccactgcacttcagcctgcaagactctgtctcaaaacaaaaaacaaaaaagaaagaaaaaaatgaggatagagggagagagagaaaattaatacaaatgtggtaaaatgttcacatttggggaatctgggtgaaggttatatgaacattctttgtagtatttttgcaacttttctgtaagcctgaaatgatttcaaaataaaaagttgggggtttttttgttttgtttttaagggtatgatgcaaccattattgctgggggagaaagtaccagcaaagagccagtcctgctggcggtaggtggatgggtgctgctgggaggactctgggttccacaggaggaacgtagcccagggaaaagggagttacgggactgcagcgccagctccccactcctgccaccattgggctccagctttccggccttgtggccagtctttccctttggggggccggtgactcagccacgggttccatgtggcaggaagtgggcacagtgactcacggggtggcttggtcccctcctttgtggaggccgggatagcagctcaggccccaggccagtgatggcctgtaagagaggaggatttgcaccccacagtggcaagccccaaggagggctgccctagatggtggggggcctggagcactcagctggggtgggggccccgcctcgccctcttggggccggcaaaatctaccctctgccagctctgaccacagcctgcagagttttccagccacttgtgggcatgtgcacagtgctggacactctgtaagaattccccactgtctgcaaagccggcaacagctgccaaggtctcccaccctgctggctgcccccagccatgcaccttctccggggggccttgttagcactcagcaggcatgcagaccgccaaaggctcagttccctggggcccagccgcttccaggctgttcaggctcaagttccactggttggtgccagtgacttgtctactgtctcatcggtaggctcaaaactaacacctttagaactgttcgtgattgaggctagatgcggtggctcacgcctgtagtctcagcactttgggaggccgagacaggtggatcagttgagctcaggagttagagagcagcctgggcaacacagtgagaccccatctctacaaaaaatattttaaaaaattagctgggcatggtggcgggcgcctatagtcccagctacttgggaggctgaggcaggagaatggcgtgaacccgggaggtggagcttgcagtgagccgaggtcacaccactgcactccagcctgggagacagagcaagactccatctaaaaaaaaaaaaaagaacaggtagtgaatgaaccctgctgcttaggggacgagactatgtccctcctctaagacgtcctgacctctgcaacttctcttctgcagactccaggagcacttagggccggggttgctccctttaacgttaaggccgtgctcacatttggtgggaggatgacccagtgcttgtacatctgctgtttcacatcctcacaacagagaaggaaactaaggctcagagaggttcaggaacttgcctgaggtcacacagcatgaagtggtgaagtcgggatttgaactcaggccttcctgactcccacgttggtcctgcccatatcccacctcaggatggctgtgctgtgcattttgacagttaatgggcgttcacctcgctggatggcaaatctggcaggctggccaggactgcggcctcctcactttctaaagccgtcctggcagcccctgacatatcaggagtgttcaggcatgactcacaagtggactgagtgcccgatgggttcaaatcctctgcaggtggctctgggcaaagcaccagcctctgcagcaaaccctgccccatcccagtggagcctcctgcccctccctcttacccccacggctccttgtcaacaaacactgggcagatcccttcctccactaccacgtgccggctcctgtctcccggattctcccttgcaggcctcgccgtctctctctggcctcccttttcctgatctgttcataactttcctcctcctgtgtgtttccctttgctcctctctctctttcttttctttttttctttttgtttttgtttttgttttgttctgtttttgagaccgagtcttgctctgttgcccaggctggagtgcagtggtgccatctcgactcactgcaacctctgcctcccggattcaagcgattctcctgcctcagttccctgagtagctagctgagattacaggtgcacgtcaccatgcccagttaatttttttttttttttttttgtatttttgtagagatggagtttcgccatgttggccaggctaaacttgaactcctgacctcaagtgatccgcccacctaggcctcccaaagtgctaggattacaggcgtgaaccactgcacccagcctgtttttgtttgtttggttttgagacagtctcgctctgttgcccaggctggagagcagtggcgtgatctccgcttactgcaacctccgcctcccaggttcaagcaattctcctgcctcagcctcctgagtacctgggattacaggcacccgccagcatacctgactaatgtttttgttgtttggccgggcacggtggctcacgcctgtaatcccagcactttgggaggctgaggcgggcggatcacgaggtcaggagatcgagaccatctctggccaacacagtgaaagctcatctctactaaaaatacaaaataattagctgggcgtggtggtgggcgcctgttgtcccagctactcgggaggcagaggcaggagaatggcgtgaacccggaaggcagagcttgcagtgagctgagatcgcgccactgcactccagtctgggtgacagagcgagactccgtctcaaaaaaaaaaaaaaatgtttttgttgtttgaaacggatttgctttgtcacccaggctggagtgcagtggcatgatcttggctcactgcaacctccgcctgcgaggctcaagtgatcctcatcttgactctctcatcttggcctcagcagcctaaggagggaccgcagatgctgggattaccgcacccggccctctttctctctttcgagttccctttctgctcccccttggccttccctcgatccccttcctcctctgtgttgtcatcaggctgctgttacgagtccaatgtggtccccctcctgtgtgccagtgctgggtccacccctactgacggcacctgcaggacgagggtcaccactttgctgggtcacttcccatttcctctgtgcttccaatgagctggtggggatcctggggttgtcccatccagcgtccctagtggtacctcccgaagtctggtgtttttgagtggacggccccgggggttcagagtgactcttcctcacctggtctgtgtgatgaggcagtgaacaccccaggggagaggctctttggaggctggaaaagatgcccctctgagaatccggtacttggagggctcttggtgaatgatgtttttcttttccgtcactgtactgagttgaaatcggcctcctggaaagttatttccctgtgttctttgatctgggtgagggaagccatctccctgactagctgacagtcacttgatcgtcaactagctggtgaacctcgtcatagcttctctctctcctgtaaataacctgggttccatcagctgctcccacggctctgagcctcagacccctttccctgcctttctgtcctcctcgaaggccccccagtcctgagacatctgggtaacctgattgctggactcgattttcaatcctgttcaatttcatctgagtcgttcaacctgtgggtctagcctatcatccttctgggggttactctccagtgttatctgcaaatccaatcacatcatggtcttcattcaagtcattgataaaaacgttaactaggacatggtctaggtcacagccctgtggcacatctctggagacttacttctagatgagcactggtttacttatcaacggccttttgttttgtttttagtgaatctttctacctgccaccgccgcattaaactgttttctaggctactttgtttcctgtcttgtgtaaggctatcacaggaagttgaatgttctgtgaaatcaaggtattctatacccatagcatttccatgatctgaaaatcttgtcaaaggaaaaaggagttacttaggccagaggtgcaaatagggttttgttttgtttttacctttgaaaaaatgatgatttgtatattcctgcatttgttttatgaaaataccaaaatacagataaaggaaaaaagaatctgaaagcattctaaaaccctctatgcagagataagcacttcaaacattttggtatgtatttctggaagtttcttttttttttttttttttttttgagatggagtttcgctctttcgcccaggctggagtgaagtggcgcaatctcggctcactgcaacctctgccccccgggttcaagcgattctcctgcctcagcctcccgagtacctgggactacaggtgtgtgccatacacctggctaatttttgtatttttagtagagatgaggtttcataatgttggccaggttggtctcaaactcctgacctcaggtgatccacctgcctcggccacccagagtgctaggagtgagccactgcagactgccatttctggaaatttctaaaagcatctcgaactacatataccaaaaactcataaaaatgcaatcagtctctaaatactcttttgttatctgcttttctcatttactcatatttcatgactatcttcacatgtgattgaatatatatatgtacagctacataaactgtttctattagctgggtggtattgcattatgtggacatatcctattcaacagatcccatattactggattccatttttttgtctttataagcattgttatatatgcctgttatgaacatgtctggctccttccctgaaatacgttcagatgctatagtcagcctttttctaactattcaagacctatttctcccttgaatccctgtagctttttttttttatctgtgcttttttggtaagcatattttccactacaataattatgtcctgtcgctggccaggtgcagtagcacgcctgtaatcccatcactttgggaggctgaggcgggcagatcacgaggtcaggagatcaagaccatcctggctaacagggcgaaaccccatctctactaaaaaaaaatacaaaaaaattagccgggcatggtggcaggcgccaccagtagctcccagctactcgggaggctgaggcaagagaatggcgtcaacctgggaggaggagcttgcagtgagccgagatcatgctactgcactccagcctgggtgacagagcgagactccgtctcaaaaaaaataaataaatgaaataaataaaataaaattaattatgtcctgtcatctccctgcttgtagctactaagatcccttaggaaagatcccatcctgatttaagattgcatccctaatacctataacacaataacttgcacttacggacatgccatagatatttgttgactaagggcaagaatatatgaatttgtttagtgattcactgcagtgttttgtgggtgagtaacatagtcgtgagtttctagtttccccagtctagtttctggcccacagtggccttgtttgtcatctttctgtccctctcctcatctcaggccaagggtgaaagccagcaagagtccggggctggcatctacccagacagcgtctcactctgctgcccagcccactttcaagtcaatgtggagcttcccagctcgccctccccatcctggatttcagatccctcctaccctcaccctactttctctcggagtttgacaggggagcaggtagaacctggggcagatctgcattcccctgggagatgcttcaagcagtggcagggtcttagcctctgagctgctccctggtaggaaggaagcaactgcccctggtctgtgttgggagatggacagagctttaggatggacaggcgttggggatgcaccagtacacataggcgctcaataacggtggtctttattctctttcctcttctgtcatctgacacgattcggtcttctcagctaaggactgggtctgtccttcgctcgtccttgtagccgtgactacaaccttccaagccatttttgttttcttagaggttttattgggagctgagggttaatagcaccccagcccctcccatcaggctcaaggggctcttttgccttcacttgtggttgagagtcctccctccctcctgccctcttctctgtccttttgaaatatgagctcagctccctagaaggtatcagtgctttattttgtacccctaccaactttctttctctttttttttttttcgagacggagtttcactgttgtcgcccaggctagaatgcaatggcgtgatctcggctcactgcagcctccacctcctgggttcaagcaattctcctgcctcagcctcccgagtagctgggattacaggcgtgcaccaccatacccagctaattttttctatttttagtagagacggggtttctccaggttgctcaggctggtgtcgaactcctgacctcaggtgatccacccgcctgggcctcccaaagtgctgggattacaggcatgagccaccatgcctggcctctttctcatagaaatcttttgtgattgaattgtctgaattgtggattttttttggtctaccttaccattttcctttttagaacctacagctttctttttttggccagcatttctttttggagaaatttcccctaaagtatagggtacctatgtgataatttccagtatctcttcctgagctattataaactcacagggaatcatcctgtatgaagagtgaccccacaatgaaattcctttcctggggttcaaacaatagacttaaaaaaaaatttaagacacagggtcttaggtcgggcatggtggctcacgcctgtaatcccagctactagggaggctgaggcaggagaaccacttgatggaggttgcagtgagtagagatgaagccactgcactccagcctgggtgacaaagccagaccccatctggccagaccgccatcgggagatggaggttgtagtgagccgagatcctgccactgcactccagcctgggctacagagccagatcccatcccgccccacccccccaaaaaaagagagagaaagacagagagacagggtctggctctgtcacccaggctacagtggattgacttgatcgtagctcactcactgcagccttgaagtcctgggctcaagtgatcctcctgcctcggcctcctgagtacctggaactacaggcaccagccggtgtgccctgctcaagcagtagactttcccttggaataaagaccattataatcccctccaccaactctcgcaaagccatagtttgccagagccattactgaactttttgacaaggcaatcagctcaaatgcacccaaacaggttcgggattcctgaactcagcccaggcttcattgatgatacctaacacgcctgactctataagcggctgacttttaaaataataacttttttttttttctttttgagatggagtctcactctgttgctcaggctggagcgtaatggcatgatctcaggctcactgcaacctcctcctcttgggttcaagtgattctcctgcttcagcctcccaaatagctgggattacaggcgcccaccactatgcacagctaatcttttgtataaaataatgacttttaaaataatccaatacaataagatctattaagcacctagtacataactatgaaccagggattggggagagaaaggaggaaggagatttgatctcaccctcgaagggtttagaatctctccactaagatttttaggagttagagttggaaacttcacaatctaaagtgaagaaagacgaacagggtaaaactcaagacagtttttgtaaaaagaaatgtaaaactgtttgccttcctgtttcttcgtcagggataagtaatttccagtcatcccatccattaaacaaatatgtattaagaaagaaaaacagtccaggagcctactgcgggcacaaccggggtgcacagaacccatctcgggaggctggctctgccccttgagaaagttcaagatgaaggggatgccaaggccagaggcaaatgtccagccctcactagcggggatcacctcgagttccacgcgaggggctcagggttgggtaatcgagagtggaaagctctggaaaaaccctaatacccctgttgcaacattctaggaaaatggtctgtctattgaataagagtgagtcaccatgggaaagttggggcggtcaacactaccccgcactgctcatccccattctttggctcctagtgatgctccggtcaccctctgggggccatggggaggaggcagtgacgccgtgatccggaatttcaacgagacatatgcaaatggcccaatgggctgtgaaggaagttcagagacaggaggatgaggcagctcagtgtttctaacccacaaagcagaagtgagaatgggtgagaattcccagtcaccttccccttctcctttcccttctcactctaccccaaccctactccctgtgtgggccctctgccccttccctgttcagaaatgagatcactgggtgggtgcagtggctcatgcctgtaatcccagcacttcagaaggccgaagccggaggatcacttaaggccaggagttcaagaccagcctgggcaacatagtgagacccccgtctctgcaaaaaaattaaaatcagccaggcgtggtagtgcacacctgtggttctagctacttgagaggctgaggttgggggatcacttgaactcaggaggttgagactgcagtgagctatgatcacaccattgcactccagcctgggtgacaaagtgagaccctgtctcttttttgcttgagatggagtcttgctctgtcgcccaggctggagtgcagtggctcaatcttggctcactgcaacttccgcctcccgggttcaagcaattctcctgcctcagatctccccagtggctgggactacagatgcaagccaccacgcctggctaatttttgtaattttagtagagatggggtttcaccatgttggccaggctggtcttgaacaggtgatccacctgcctcagcctcccaaattcctgggattacaagcatgagccaccatgtccagctgaccctgtctcttaaaaaagaaattgagatctctgacttttacccaattacccaagtctgtcaaagtacccatctgtaaaagaaaccagccttgtaaggttcctttcaactccagaattgaggagtgggtttgggggcagtcagaggggggtgctggtgagcaggtgacaggagaaggaagaatctccagttgagcccccactatgtgtcaggccaggaacccagggacctcaccagagccctctgtagaggtcagcatcctcgttttacagatgacacaatgacagcctagtcggaggatgatgacaccaggatctgacccagtcttcccaggctcccccccccaactggaagccccccaagattgagcagacatattctttcaggaaacaccaccactctggtttatttcagctgcaggtctgatctccataacagaagcacacctgaaaaatactgccttagccgctgaattttgatagagcaattctatattcctggtaacttcctctgtaattaatcgtcaattgattactccgtcacttacatgtgagtgtgaaggcgctggcttctttgtcaggaagtgaactctctattgacgaatgagtcaaagcactgggcggctgttacttattcatgaaggagggcattggcgcgtttaggtttcccctcacctgtccagcacgccctgaaagattgtagtacagagtcctggggagaaagtggtttcctgcctctccctgggctcatatttgaatggtactttctttctctctctctcagcagactaggctcctctcagcagatttccatcccaagtttgggtagctcttgccaaaccttttaacccgtattctacagcaataatccaagttataaataaaactattcaattcagctatctagttaattaaagaattagtagccacttgtggataatatttatttttctgggcagtgaactgagttagttggactgggcatggggatgagttcaatattttattaattttccttgaggatagctatatatttagtacacatgtaatacaatgtattagtgtgataactttttttttttttttttttgagatggagtctcactctgtcacccaggctggagtgcagtggcacgatctcagcttactgcaacctctgcctcctgggttcaagcaattctcatgcctcagcctcctgagtagctgggactacaggtggaccccaccatgcctggctaatttttgtatttttagtagagatggggtttcaccatgttggccagactggtctcaaactcatggcttcatgtgatcctcccacctctgcctcccaaagtgctgaaattacaggcaacagccacctcgctcagtcaactttctttaaaaaggaaggatgactgggcacagtggctcatgcctgtaatcacagcactttaggaggctaaggcgggaggatggcttgagcccaggagttcgagaccagtgtaagcaacatagggagaccccccccccacccccaccgtctctacaaaaaaatagaaaaattagccaggtgtggtggcacatgcctgtagtcccagctattcaggaggttgcggcaggaggatccattgagcctagggggcaggggctgcaatgagctatgatcatgccactgcactccagcctgggtgacagaaggagaccctgcctcaaaaacaaaaggaagctaaggggtgtaaactgcctggggaagactctctggggtcatagagagtgggtttaggatctgggggacattctctgtggccagtcagtcagggtgctggcctgactgctcaacaagcttcttaatgactctaaacctcagattcttcgtttgaaaaccaggcagatgagctcagagaactgctgtgtggattccccctcccagttccagtgtggcagagtcctggcaagatagagtctacctagagctgctcagaaatgcagcatctcatggcccaccccagccagatgaatcagtctgcagtttaacaagatccaggtgattggtgctgacgtgaaagtttgagaggccaggctaaataacatgacatatgtaaaacacctggcagagagtgggcatggatgggcgtcagctgccctcctcctctcccccgagcatcctcagacaccatcccagggagatcttttgcttgggagggagagatgtgggttggattgtgggtgaaatgtgggcgacctgcattctcatggtgcagcacatattttgtctccttgcaatcattgatgtgggccagactgcaaagtgtggcccctaggagttcagcatatggtcctaaggttacagggtgaacccaaggcgaccagggccacgtatgcaagtacccacagcttcttccaccaagccgccaccacccgtggatgtggtcactcactctggtggggcaagggggcaagagggcagctggacctctagtcctcatatgggtttgctggttgtatgtaaaaagccccttaggggctggtgtccgcaatgtgatactgaatgtgatggtttaacagctttcatgacacacccattttggaagcagccatcctgtgctgggcactgcggattcaacacagaccaaatggacccatggcaggaaggtcgttagagttaggatgggcagagaagtagcacatggggacaagggctgaacccaggtcagcacagggtgttgggaagaccaccctagaaaggaagtgggggccgggcgcggtggctcatgcctgtaatcccagcactttgggaggccgaggcaggccgatcacttgaggtcaggagttcgaaaccaccctaccctggtcaacatggtgaaaccccatctctactaaaaatacaaaaactagccaggtatggtggcgcgtgcctgtagtcccagctacccgggaagctgaggcaggagaatcgcctgaaccggggaggtagaggttgcagtgagctgagatagtgccactgcactccagcctgggcaacagagcgaggccctgtctaaaaaaaaaataataaataaaataaaataaaataaatcaagaaaaagaaggaagtggggcccagggcggacaggctcagggcaaggcacctgcccggagggcactggggtagggcaccggatggccttagcctctggacattctcagcgacctggcactagggaatgttcctggcctaaggaaggacctgggtctggccaaaaaggcgagagagctaggcgcggcctgggaggaaggtgcggcgctggggagggaggggagccctgccctggtgtgccctcggtcccgcgccgcacaccctgccgggaagcccggggccgcagctgctcgggcggcccggcccagaatagcctcccttccgggcagggctgccccggcccgcagcgccagcgcccgaaatagggctcggccgggtggcgggcgccaggggccgccccagctgcaggactcgccggggagccggggcccgcgcgtggaccgggaggggctgcggggtgcgggcccggccctgggacgcgaggacccgggtgggcgggtccgcgggcggggtgggggcggggcgcggggccgggaccgggatcccgggcgcggggccagcccgaggcgggtggagccgggcgctgacctcacagcccgcgaggaagcccgtcggggccggcggggctgatggaaggcctgaggaattcgcagccggcggcgcggccgggcgcgttcccttcccctctctccgttgcccggcgagggagccacagcgcagcggttgccatggccacgggccgggcgtggggctgggggaccaggggccgctgagcctcgatcaccttgtcctgctcgagccaggttggcatggactggaagaaccccgcggcggcgggcgggaggtgctggggccaggggaggccccgagggaccccgccgcccggtctgcgccctgatcccgcagggtcctgtggaaatgcggtgtctgcctccccgcctcctgcgctcacacatgcaggcctggggcctgcgggtcccggggctctgagcctgcacagcccacgggccgcagccgcaggccccgcactggtagcttaggtggacacggaggctgagggggagtttccaaggggcctggcctcacgctctgcccgtcacagccgccacccctcaccggccctccacccacccctaactccttaacctctcccggcctcggtttcctcacctattaactagagattagtcatagctaccatccaggcttgttatattaaaatagaataattatgtaatgtgccgtgtgcactccaaacgcggtcctctttccctgtcccacacctccttcctcctgcatcaggcctggggaggggggcgtgccgatgtcacccccaacccccaggcctagagtcctggacacatggacgcccctgccagagctcccctccccgcgcttggggttactttgaaccccgcctcctacaagaggatggtccagcctattgtcggaacctgcaggaatcccaggctgcgacccaagaatattagcggaggcccagcctggctggggtgagtcagcctctcctcccaaattcagttgcggcttcagctgccctgtgcagctggggctgctaagttgccagcaagaggcagcctctgaaaatctctggaaagaccagcatgtccttggggtgggattcagagcacagtggggtgggggagggttgagaaggggtcttgatcccccttctcttcctctaggggagccgaggcttgggaccagggaagcagcggtaccccatgtggggaagggcgggcctgacttactgtaacttcctggcccaaagcctgattgtcctgtggttgggctgcccggccagagaggcccctggtgtagggaggactcagagagaacttgcctcccgttgccagggcccagtgtgtgtgtactggggggcggaggggctgtgctgtcactgatttcctgagacagctagtagaccagatgaggctgcctggaaggtggctcctcttccctaagcaggttgggccactacctaaatgccaggttatttacaagaaaaaaaaaaggctgtccaggggctcagccccttttggagggcatcagagccgccagtgttgactgagcactcaccatgtactacgccatatgggcgtttgctcactgaactgtcacaaccacccaagaaaacgggaactgttgttatccccattgtacagatggggagcggatttagagtcctgggatgcaaactgggtttccccgctggctcccgatccccactccatctggcctatgagcgtgggaaccagtgtggcccggaagagtggtggatggcccagctgactgcccaggtgcccccaccccccagccacatgggcatgcggcttgctcggtactcagctgacttcctgtccctggaagagcagctgccggtatgctggggcagggcggtccccttcctgtggttcaggtaagggcataaccccatgccttcttggcatcctccctctctcctttctcaggctctgcaagtccgacctgggtgccccagagagctgctccgggaaagacgtttacctgctgcccagagctgggactgcagaccctgattggcgagggcttggagagtagctgagaaccttcccttcagctactgaagaccagacagggctttctgtatcacgctgcctgacgatgatgagggtgcagtgactaagagtgcagatgaaaggcccagctctccaaccaggtggatggatttgcaaggagcttctatctgggcgtggtggctcatgcctgtaatcccagcactttgggaggctgaggcgagcgaaccacctgagggtgggagttcaagaccagcctgaccaacatggagaaaccccatctctactaaaaatacaaaattagccgggcatggtggcaggcacctgtaatcccagctactcgggaggctgaggcaggagaatcgcttgaacccgggaggcggaggttgcagtgagccaagatcgtgccattgcactccagcctgggcgacagagtgagactccatttcaaaaaaaaaaaaaaaaaagaaaggagcttctgagagatggggtctccacctccccatcagatactccagggctttggaaagagctggctggctcttgggcatcacctcaactttcccctaggtgacgctgccaaggaactgtggcactgtccctacttcccacatccagctccacggttccacctcccaccccccttgcctgtggaagctcaaaataagctttctagagcatgatgtttcttgtgtgaggggtcatctgaggttgtaaagactgaagctcttcaccagagaaacgcaggaagcatcccgcagctaagtgaggcaatgtctggggcacgccaggccacgccaggtagctcagaggggaggaacgcccctggctacacagcctgcgtctgagccctgctggtggccaggccatctgctgggctccatccctgggcgtctttccagcctgtcttcagtgctcagggcgtctttagcagagcataaagtggcatttcacttgtccctctacccaacagcaaggaagtggacctctcttaggcttttcttggaagacgaaaggaaagaaagaacgttctcaatgtgagatcctacaggaccactgtactgggtcgaatggcgtccccccccaccaaattcatgtctgcatggaacctacaaatgtgactttgtttggaaagagggtctttgcagatgtaattaagatgtactccacaggcctggggagatcaaggctaacagcatgttgtatgaggatggccccagtccaatgactgatgcccttatatgagggaaatctggacacagacacacagagaaggccacgcggtggtggaggcagagatgggagagatgtgtctacaagccaaggagcgagcaggaccgccggccaccaccaggagctggcaggggcaaggaagtcattcttccctgggggcttcagagggagcacggtcccagtacaccttgagtgttggccttctggcctccagagctgtgagagaatccattttggttgtttgaagctgctgagtttgtggcgttttgttacggctgtcccaggaaaggaatacaatcaccaaatgtcaaacacagggcagctgggaaaaacaagagggaaatgcatgaggcacgtaaagaaaagacttggaagagaccaaggagggacaggaaggaatgcttcctcaacttcctcctcgcacccggacaggaagccggagacctagtggctgagccttggaagaagcggctacctattcccccccacaagagcgggtgagcttggatgtcggatgaatgagaagggtctgaatcttgctgggtcccagggagaccctgttaataataacaaactcaagatatggtctcgtctcatcctcaccacagtgcctaaagcaggttttattgaaatccccgtgtatagattaggaacaaggcagggcggttgggtgcctgcccagggtcataggcagcagcagtgatctggaactggagcccagctttcccacaccctgcccttaccacttgtcctctcctgatccagggctccagtgcccatgtccagtgccttggtggggctgggccaagaggcacagcgagggccctggccacaggcaggggcgttggagccctgctgcctaggtttggatcccagctctactcctggtgagctgtgtgaccttgggcaagttacattacatccctgttttgcagtttcacccactgagaaaatagggacaagaatagtacgtaactcatggagttgctggagacctccatgggtcagtacgtttcaggtgcttagaatagtgcttggcacactggaagcacagccataaaagtgttgtgaaataaataaaacccgctgggcgagagaactctttctttcatagctggggccaaggagagggcttcaggatggtgacctgtcttattcttactccacagacatggagatatcaaggccaatagcattctcatgcagttctcttctatttcccatagaaccctcaagaccagcaagggggacacctgagagcagaaagcagagttgcacccacattctgggcaggctgactcagttgctagaatcctgcctctagggccaagattactgtttgatcctgatctgggccagctttgtcctactggaggaaagcttggaaccctgaatcctacttggttggtctcctgcttggctgttttgctcacagtgggaacctggtctggggtgattcactatcactcatcgctccacagaaggatggtgcccggtgcacatccccaggatagtgttaaccgtcacctttacgcatggcactcagaatgcgcagagtggtgtgtgcatgcagcaacgtgtatacaccctgtgcatctgggaggtcctccagtcatctctggccgcgtcctgcggagggtgctgcagcctctacctggcctctggctctttctttcctttcctttctttctttccttctttctcttcctttctcttcctttcctttctttcctttctttcctttctctttcctttctttccttcctttcttccttccttccttccctttcttctttcttttctttccttcctttccttcttccttcctttctttctttttcttctttctttctctctctctttctttctttctctctctctttctagagtcttgctctgtcaccacgctggagtgcagtggagtgatctcggctcattgcaacctctgcgacccagcttcaagcgattctcctgcctcagtctcccaagtagctgggactataggcatgcaccaccacaaacagttaattttttttgtatttttagtagagatggggtttcaccatgttggccaggctggtcttgaactcctgacctcaggtgatcccccccaccttggcctcccaaagtgctgggattacagaggtggctcttttaattgactcctctccaggcatctctccttccagccacagagcctggcctgatggtcccagggccccagggccccaggtgaaggcctctctcctcccccactcaggtctgaccagctctgtttccatcctggtgtgggcacaaggtctcttgctgcagctgggccagtttgctgaccttctcagctccttctcttagactggagaggcctggaagggtgcccgagggagggtctgggctgctctcctgggctcctcccctccactccaggactctggctggagcctggtcagggtccttactgagttctcagccaagcgccagccctgtgatggcctgaggggtctggtggggaagccccaaagtgagggctccatagccctcactgtccctcccccagcattgtgcagtgccggcggtctctgagttcttctgggtagcctttctaccacatcctcttgcctactttcaccaggtggccaagggacactaaaaaaggcagtgaatagctagaggaccactcttgaaaatcagcctgccttcctcctggtgccagctcctgtccctccggcctccttttcatagaattctacaacaggaggaaacagagaggtcatctcctccaccttcaccaagtttccagaacggatgggttagagggatctggcgttctctgaggcttcgggccaaaccttggacattgggctggccagagatcttgctggggttgccttgggaattgtatatccattgggagcactagccctgaacacctggggctccccacctgctaggagctgggaggactctggtgttccctgcaaccccccagggtctgggtggacggaatggcagcccaggactgttccccaggctgacctggactctgatgagagccaagagtggacctagctgtcatttagatccctgggggagccttcacagtagctgccaagcagaggtcctggcactggggagggttctcacacgtaggaggggcagtacttaagcaagtaacagtggagagggcactggatttgacatcagctgagaggtggtccgtttctgcttctctcactgcttatctgtgatctgaggcaagcctaaactcctctacagcttagtttactcatctggaaagtgtggtatattttattttacctgccttacatctgaggcatggaggaaggacggaatgagatcacctattaaaatgcattttgaaaaaacaaaagtgctatttatgcaaacacatggtactaaaaataaaagatgcctgtttgcttctggaagtaaaagttgtgaatgatgccgggcgctgtggctcacacctgtaatcccagcactttgggaggtcaaggcgggtggatcacaaggtcgagagatcgagaccaacctggccgacatggggaaaccccatctctactaaaaataccaaaaaaattagctgagcacggtggcacacgcctgtagtcccagctactcaggaggctgaggcaggagaatcacttgaacccgggaggcggaggttgcagtgagccgagattgcgccattgcactcctgcactccagcctggtgacagagcgagaccatccgtctcaaaaaaaaaaaaaaaaaaaagttatgaattaagtgatattttaatgatccaggaaccccattatttaaagaacattttgtcttttgtacagccacagagccagtgtttgatgagtttccagcaagcatcacccattctgctagattttgtgaggaacataaaaaagcagaagatatagggcctggtacggagttggcattcaattaataatcattgggcagggcacggtggctcagacctgtgttcccagcactttgggaggctgaggtgggtggatcacctgaggccaagagttcaagaccggcctggccaccatggtcaaaccccatctctactaaaagtacaaaaattagccgggcctggtggcacatggcggtagtcccagctactcgggaggctgaggcaggtgaattgcttgagcctgggaggcagaagttgcagtgagccaagatcatgccactgcactccagcctgggcgacacagtgagactctgtctcaaaatatatatatatattaataatcattggatgaataagagcgaatttcttccatctgagagttcacagtccagtttggacggggacagtcatgtgaccgggtgatgaatgagtggtgcaggctgtacatataatatgcatttggagggaggagaggtctccagggtgtgggaggcttcagggaggaggcaggaagggagaaatcctcagcagagagggagaactagaagagagaattggaggggctggctgggaagaagggctaaccccaacatgggctcctaatcccaagtgagcagggaagtgatgaatatggtgggcagggaagaagaccaccctgatgggaagaagtttgcctcctagcgtggggtggagtgggggcagagtaaacttcccactggggctacagttgaagggttttggaaacccagcttagtggaaaatgccagggggaaccagtatagatcctacagggatgggctgcctgtgtgcatgacatcatgaaagcaatatttttagaagatgagtctggcatggatgggcccatggggacataccaaacttcttgaagttccccaaagtttcccttttccgggctatttccctgtttctgagaatgccccattctcccaagcctgtggaaggaacacctgctgtttcaccttaacttacgcatcacctcttctgggaagccactagaggtcatttcctcctgggcacccccagctgtaccctgtctaccactttatttttacacccattcctttttaggatacttcttggttttcacatctggttcccctttcagactgtgagtctcttgaagcctggaatatttcctgattgttatttttgtccagcaacaggcatggtggccagagccgtgtttccacctatgttggtatcacctggggcacctgggtcccaggtgacacctgggtcaggcaaacatcaggtgctgctgatacaccctaaagtttaggaacactgcagctccacctctctcacatggcctcataggacaacatctacaaagagcatatcatgatataaacagcaccccctggagttgtgcagcacagacacctcctggaggacccaggtcctcatggattcagttttttttttttcactttattttctttctctctctttctccttccttcccttctcttcctcccttcttccttccttccttccttcctttctctctctctttctttcttggtgtgtcactctgtgactcaggctggagtgcagtggcaccatctgggctctctgcaacttctgccttctgggttcaagcgattctcctgcctcagcctcccgagtagctgggattacaggcgccgccaccacacccggctaatttttgtattttttgtagagatggggttttgccatgttggccaggctggtctcaaactcctgacctcgagtgatccgtccacctcggcctcccaaagtgctgggattacaggcgtgagccaccatgcccagccggatttaatttttcatgtctgtaccttcaacattctgtacattacaggcgctaaataacattttctgtaggaaaatactatgattggagatttgggggaggggaggtgaaagagaggaaatatatcgtcttgtgtaatgtaaataatgagcttgcattctgttttttattttttttgttatttttttttaaatttttttttttgagccgggcgcggtggctcacgcctggctgttttttatttatttttattttttatatctgggtttgcagtctcttcctgaggctgggcctgaatagtgctgtgaataccggcagtgatggtgttaactggaagagcccaacgtcttagcattcagaaccctaatttcttttctgaaaaaaagcctgaagcctacaacccagtgttccagcctgcagcgcagccttccttccaggctgcatcccagccttccagcctgcagcccagccttccaggccgctactgttgcttaaggctgtgctgcaatcagagcgctcaggagtgggaagtccagagttctacccgcttctgggaacagccccccatccccctcccggcaccagcttccacaggcaagtcctcatgacagtgggtcaggctcacccgaggatttcacaaacgcctggcctgttcccagcacagcacagctgggagggctcagtgccggggggaaggagcatcctcctcctcctcttcccttggccctgccgtcctccagctcagggagagggaagggctgcacttgtccatgcttgccgcctacaggcccgcgagctcggaaccttccctccctgctgatttcccagctttggcttagtcaaggtacaaagaggaaatgcgctgtctcacgacaaaaggagcatccaggcttgtctgccctgaaggcagctgcaagaggtctcagagtcacctgaggaggcggttattcagattccaaggctgtcttcaggctttggattcagaagagctgggtcacagtccgggagtcagcagtttcatgcacacctcgggggactggccgtaggtggtcctctgtgctttcagaggccttgaggggcagagaggtggagctccaggcaatgaaaagcgtttagctcatagaacccaggattctaagttagggccaccagctctttctctagctccatgacaaggaaagagctgtccttggatttggggcctcagtttctccatctctgaaatgggtgtgttcggacctgagggtacagagaccaactgtcctagtttgccagactttcagaactaaactgggacaagctggccaccctactgagggtggatgcatgctgtaatgggaatgtgatttgaagatgcgtcttcaaggcacaggctatatttatttaatttacatatttacccgttattgtctggttgctcccacttaacctctggagggcagggtgagcagggccttgtcttgctggatatagaacagtccttgaccgtgggatgtgttccacagagatttgctgaatgaatgaacgagtgaatgaatgagtgactagaaggggagagggctgaggctccaagaacaggctccctgaatagagcgtgtgttgggggtgggtttgctccgctgacctgaagggggttctcggctcccctgggacaagaaaacttgacccactcacggccgggaaagagtccaggctttctgagcagccgcccctgggaggggtcagtgacccccggtgacgaacgcctgactccccccttcccccacgcgcccagcgcggcctggtccaccctgtctcctccctctcccgccccccaccccagggaggtgcgcctggcagcctcccggccgaatttcctggcactgggctgagaataaacagcgctctccgcccgtaatcccgttgccccggcgaccgcgctccgcgggcgggggcgtggcgggggcgtggcgggggcgtggcgtggcggggccgtacccgaggcgcaagctctgcagggcgcagcggcggctgcggccgcggcgatgcgggcccgggaggtgccaccccccgtactcggcgcggacattcttcgcatagctccgccagggctcccgcggtgtccgggaagtgactcttcctggcagagggcggcctcgaggcgacgcgcctgcccgcccgccagcccggcggccgccagatctggaggggagtgggggcggggcgcaagaaggtgctcccagccctggggctcctgtcaccctcggcctcgatcatcccgccccgcgctcctgggaccggagtcccttactcccatagactctcgactgcctctccgcccaacccccgcccggtacccttgcggtgccccctcccaaacatccttactcattcctaagactaggacacatcgtgcaggctgattttccatcgctggctcccctgtctgaggcctccttccccccctcccccagagcaggacttagatttcccattcttggctctagcctcaggaggcctgccctaaaacagcaccaccggagagaggatagggcctcttggggtggagtcttacagctctagaagcaaggtaatagggcacagggctgggagcggggatttctcccctttctgttggccggggaccctcagccttgtttttaaccaggccgaggcacgagtgcctgcccaagccaggagaagctgcccactgcctgcaggacacttgtcagcacatctgggagccaggaatacccctcctcccccagccaggccagagggcccccgactaagtcccttagaggagggtgtcttcccttctgaggattgagaagtgcagaaagacttctgttatggggtatgggatgaggagagaagggagccggtgctgagcagagtcatctgggggagagattctttcctggccttcccagcagcttgttgtgtgggcttgagcatgttgcttcccttctctgggtctcggtttccttgtctgcaaacccaaagggttggtccagtctgatctgaaatggaaagacacaccaggcgcggtggctcacgcatgaaatcccagcgctttaagaggacgaggtgggcggattgcttgagcttgggagttagagaccagcctgggcaacatagcaagatcccatctctacaagtagtacaaaatttagccaggtgtggtggtgtgtgcctgtagtcccacctactcaagaggctgaggtgggaggatcgcttgtattctggcagttgaggctgcagtgagttgtgatcctgccactgcactccagcctgggtgacagagctagaccctatctgaaaaaaaaaaaaaaaaaaagaagaagaagaagaagtggaaagacagaggaaggttgggatgggcagtggtctggaggagggaaatgagtcttcttgcctttgcaactccacaaaaccaagtttcaacctccctggggtgggcagggagaactacttcctccctggccagagaagatcaaattcttttgctagcattctgtgaacactggacaacctggctaaacagctgccttctgggtcaagcacagggacccagtggctgggcacagtggctcatgcctgtaatcccagcactttgggaggctgaggctggcagattgcttgagttcaggagttcgagaccagcctgggcaacatggcgagaccctgtctctacgaaatatacaaaaaaaaaattaaaaattaaaaataactggccgtggtgataatgtgcctgtagtcccagctactcaggaggctgacgtgggaggattacccagacgtgggaggtttacccaaacccgggagttcaaacctgcagtgagctataatagcgccactgcactccaacctgggtgacagagtgagaccctgtctcaaaaaacaaaaaagtacaaggaccccaggttcacggttccctcatggctgttattccagtgaaaggggaactctgtgcagctgaaggcagtggtggctgaccagcagaccccagggcgaggaagactcatcatccttctggaaggcactggggagccacaccccactgggccccctcacctgcacttgtgctttgggaaggtggccctacctgggtttacattgccagtctggagttccttcatgatgcctgtggtgtggctcccatatgctctgtcccctcagccgcctcgtgcctggcctggccccttctcgtcacttcaggtcattttctccaaaagtcccaggaaataggaaagaaaaacgactttgtttatttactctctgttgccttttggaccccgattcctggagcagtatattgggtgcaagggggccaggaagaggctctggtatttgtgtcatctgagagagataagggcccctgacttggggttaacactcatttcccagctgtcaggtcacggggatcagagaaggaggcatgaaaggagaatacctcagagaaggtggttttgtttttgtttttggtttctgttttttaaatggagacagggtctcgctatattgcccaggctggtcttgaacttctgggctccagcccttagcccacctcgacctcccaaagtgctggattacaggagagaagacgttttttgctattagaagaaccctagtgctgaaaccccagagttggggggaagggtactaacctcttggcttttaaggagggactcactccgggggcaggtatatgctgagtgtatagagaggcagagaggcatgggctttggaaatcaaatgctcctgggttccaatcctgttttccccatattcccaagtggtgtgcccttggccaggttgcttaacctccctgaacctgagttgctgcccctacttagttgacaaatatttactgagcaccaatctaggcaccagaagtgaccagtccaagtcctggctcacatggggcacgtggccatgtctgagaacatggggatgagaatgcctgccttgtgggagcaggtgggatgcttaatccaggtaacctctaagtgccccttagtgtttaaatgagagtgactaaaaatagatgggctgaggggaggataccttcagcccgggagctggagaccagcctgggcaacatagcgaaccctgtttcaaaaaaagagagagatgaatagatgggtgctttttgggaggagggtgatcctgtccgctgctcaggttggggcccctaggaacggggaagggaagcaggcatggggagcagtggccaggaagcccctgaatgcctggggtcctgtggtgggggagggggtggggctccacctgcatgcaagatttgcttcaggaccacccctccccccacttccagtgaacctggctagactgaggtcataggtcaccactaggaccccatgtctgggctttctcggaacgactccctgccaaggaaccagagcgcctctaatagcctggagcctctaaa

SEQ ID NO: 44 - DNA, 150437 bp, Homo sapiens
ccttttggcctgcatggttttgtatgagaaatctgttgtttgaattgtttttttttcctacaggtaaatcatttctgtcttattgctttcaaatttttcattgtctttggttttccgaagtttgattataatgtgtcttggttatatttctttgtttttttctgtttaagcctcaattagcctgtgaaatttataagtttatgtcttaatgccaaatttaggaaaattttaggcatgagttttttgaacactttttcaatctcacactcttattcctctctgataatacaatttattggtttttgttaaggttccacaggtctctgaggttctattgatttttttcttcagtgtattttcttcatgttgttgaagttggttacattttattgatctgacttcagattaattgatttattcttttgtcttccttagtctattattgagcttatcctgtgagttttaatattttattgtatttttttcagttaaaggttttatttggctcttctttacatattctgtttcttcaccaaagctttctacttttcatttgtttcaagcatgttcaaaatttctcatcgagtcattgtatgatggctgctctaaaatccttgtcagacagttcaagtgtctgtgccgtctcagtgttgccatctgtgaattgtcttttctcattctagttaagatcttcttggttcttggaataatgaatgatttttaaaatgcaatcctggatactttggttattatgttgtgaggctctggatcttatttaagtctttggttttatcaggtttcctctgatactgcaccagtcaggggaaggttgatgcgccttgttactgccaagtggaagtgaaggttcaagcttttcatgtggtctcccccgaaaatgtggagaatggaggggcttgttactgcatgattagggtgacaatcctaggtgccccacctggtcttctctgacaccatcacagtgttgggggaggaggagaggaggaatacctcatgccagctgggtgagagtggaagtctacaagggtggggatggggacctcaatttttcctgtggcatttcactacagtaggacaattattgtctaagttttctctcttgctaggtttctcttgttctttcccttggtgagaaagaacaggcttttcttggacatttttccccttttatttatgtctgttggcatttctggttgccatatatatatatatatggttcagcctaatggctggcacatagtaagtgctcgatacagcattgagctattattatttacaacatagcataacctagatataaaccagattgtaccaacccatggatcagcaggctgtcacttcttgtttcaacgttttgcactatctaatatattgcagaagacagtatctcaagtccacttctgaataacccacacttgaatccaacctttcctgtttgccaccttatggtctcaattctcagcaccaaaactggccctttcctgctagtcaccatttcccatatcataactgccccaggtagttgcagccctctgcttcatcaagtgttcaaagatgtcttgcttcagtttcccccacagcacctcatatatcaggcttaccaaaagttttagcatattattagagtattgttatagaaaaaaataaaacattaaaactgtttaccaaggccaagtgcagtggcttacacctgtaaccccagcactttgggaggctgaggtgggaggattgcttgaggccaggagtttgggaccagcttgggcaacatagtgagaccctgtctctacaaaaaaataaaaaaattagctgggcatgctgatgtgcacgtgtagtcccttctaattgggaagctgagggggaggatggcttgagcccaggagtttgaggctgcagtgagccatgattgtgccactgctctccagcctgggtgacagagcgagaccctgtttcaaaaaataaaataaaggccgggagtgatggctcacgcctgtaatcccagcactttgggaggctgaggagggcagatcacaaggtcaggagatcgagaccatcctggctaacacggtgaaacctcatctctactaaaaaatggaaaaaattagctggtgcgtggtggtgggcacctgtagtcccagctactcgggaggctgaagcaggaggatggtgtgaacccgggaggcagagcttgcagtgagcctagatcacgccactgcactccagcctgggcgacagagagagaccctgtctcaaaaaaataaaataaaataaaataaaataaaaattgtatatcatcagtcatcattactcctaaatcatccatactgtaaaatgttgattattttgtatcaactaacactctttgctttatttttgtcttttgctttataggttgttagaactgtactgttttccctaataacctataaagcgaaagacaaaaattatggctataatttttcaaacagcaatattttttcttgtccctacaatactagaaacagcctacaacaagggagtattaaaaatatctttaaacaaatttttattttaggtttgggagtatatgtgaaggtttgttacatagataaacacatgtcatgggggtttgttgcagatattattatatcacccaggtattaagctcagtacccaatagttaccatttctgctcctcttccccctcccccctcccacctcaagtagacttcaatctgttgaaaaacatcttttaaagtatgtttttttctgtgtcattccaccatggatttaagcatcttaaggtaacatctaattaataacttcctaaaggcttaattaataaacagatgtaaacatcttaagacataactaataaataattatgtaactctaatttatataacttcatatcctccaaacagagacacattttctttttatgtggccaagaaatatttacaaggcatgatgaatataatagtccatataaaataatcaggctgggcattttggctcacgcctgaaagaaattgaagaggacaccaaaaaatggaaaaatattccaatgttcatagattggaagaataaatattgttaaaatatacatactactcaaagcaatctataaattcaatgcaatctctatcaaaatacaagtgacattccacatatgtttactgcagcactgttcacaatagcaaagacttggaaccaacccaaatgcccatcaatgatagactagataaagaaaatgtggcacatatacaccatgtaatactatgcagccataaaaaaggatgcattcatgtcctttgcaggtatgtggatgaagctggaaaccatcattctcagcaaattaacacaagaacagaaaaccaaataccgcatgttctcactcataagtgggagttgaacaatcagaacacatggacacagggaagggaacatcacacactggggcctgttggggggtgggaagctaggggaaggatagcattaggataaatacctaatgtagatgatgggttgatgggtgcagcaaactaccatggcacgtgtatacctatgtaacaaacctgcaggttctgcacatgtatcccagaacttaaagtatcatttataaaaagacaaaaagataaaaaataatttgtaaaatatgttaatggatacacaataaaaagcatgtaatttgtgacatcaaaaacaaaacaaaaaacaaaatacccagtgacattcttcacagaaagagaaaaaaaaaatcccaaaatttatatggaaccacaaaagacccagaacagcaaagctatcctaagcaaaaagaatgaaactggaggaataaaaagagctatagtaaccaaaacagcatggtactggaataaaaacagacacatagaccaatggaacagagtagagaactcagaaacaaatcaaaacacgtacagtgaactcatttttgacaaaggtgccaagaaaatacattgaggaaggcagtctcttcaataaatggtgttgggaaaactggatatccatatgcagagggatgaaattaaactcctatctcttgccatatgcaaaatgacataaaaatggattaaatgcttaaatctaagacctcaaagtatgaaactactacaagctaacattggggaaaatctccaggacattgatctgggcaaaaatttcttgagtggtaccccatgagtataggcaaccaaagcaaaaatggacataccatatatgatacatatgatatgtatcatatatgatataatatatattatattataaaacatatcatatgtttgcatatatatagtatcatatatatatgcaaactgcccatctgacaaagaattaataacctgaatgtataaggagctcaaacaactctataggaaaaaaatctaatattctgatcaaaatgggcaaaagattttaatagacatttctcaaaagaagacacacaaatggcaaacaggtatacaaaaaggtgctcaatatcactgatcatcagagaaatgcaaataaaaaatacaatgagatatcatctcactctagttaaaatgacttatatccaaaagacaggcaataccaaatgctggcaaggatatagagaaaagagaacccttgacatcattggtgggaatataagttagtacaaccaccactggaaaacagtttaggtatctcaaaaactaaaaaatgagctactatatgatcctgcaattccactgctgggtttataccccaaagaaaggaaatcagtatattgaagagagatacctgcactcccatgtttgttgcagcactgtttacaatggctaagatttggaagcaacctaagagtccataacagatgaatggataaggaaaatgtggtacttagacacagtggagtaccattcagccataaaaagaatgagatcctgtcatttacaacaacatggatggaactggagatcattatgttaagtgaaataagccaggcacagaaagacaaacatcacttgttctcacttatttgtgggatctaaaaatcaaaacagttgaactcatgaacatagagtgtagaaggatggttaccagatgctaggaagggtagtggggagctagggggaggtggggatggtaatgggtacaaaactagttagaaagaatgaataagacctattatttgatagcataacataacctatatgtccataattaagggaccaattaccttaatagctttggatattaagaatattcaacagcctttacaaaaggaacagcactatatgtactggttaggagctgtctccaagatacagtatcaaataaaaaggcaaaggaaagaatagtgacagtgtatgataccatttgtgtataaaacaaaaataaacccacaaaccacatatttaatatagttattatacatatatgtattatatgtgtatatttttatatttctggaagtttacccaagacactggcaaccttgattatcccctcttagtgaactgggtggctgaaggaaagacacaagaaggagtattacttttcactctatgtcctcatcttacatcagtttccctataattagagtctgagacagagattgttgagtctgtgctcttctaagaggagtgaggcaaggaggacagggcctggatcaaaaatcaagcaaggggccaggcgcggtggctcaggcctgtaatcccagcactttgggaggccgaggcggatggatcacgaggtcaggagatcgagaccgtcctggctaacacagtgaaaccccgtctctactaaaaatacaaaaaattagctgggcgtggtggcgggcgcctgtagtcccagctactcgggaggctgaggcaggagaatggcgtgaacccgggaggcggagcttgcagtgaggcgagatcatgccaccgcactccagcctgggcgacagagcgagactctgtctaaaaaaaaaaaaaaaaaaaatcaagcaaggttgtggttttagctggagcctagcttctacttgaaaccctgaagagctctggagtgtgaatagttccatcgagttggtcctacctggagacaaaggggccaggcttttgtacctttctcagtcagtcattggctgtgagctgcccgcaggaggaggagtaccctttcaggagaggtggctcctattggccgggacaattctctagaaaaggaggcagctctgagcaattagcaattcaccttcagagccgctaagggaccagattagaaaaagagatctgtgcctgatacgtgtctgatacaacctcactgtattttctgaaatctataaaatatgtgtttacctcctcaaaaaaaaatcagttaaaaaatcaatattacagaaggatctcttttggtggttttcatggattctaaattcagcatgtatgccaaaatttaaaacagtaaaagttagccttggaaatccttagcaatttttgggacccaaactggtcattttttccactggtattggaacagattatgtttctttggaccagcactacatttaatagttggcttgcatttaggtaaccttctgtttggaaaatctacaacattaaacattgagctcatattcatcgatctgagtccccaggatgcttagaggaactgaagacgagtagatattttaatcccttatctcaggctcaccccagaatggactggtagggagatcgagcatattatttgtctttatcccttatttttccatgtctaattatgtggttataaatgtagtacatgttatacaggaaaaattttccaaaaattgaacaaaaggcaaaaaaaataattctactaagtggccttctaaaatcacattagacattttctaatagacccacctgagggtgatattgctcaggaaatgtgactttatgaaagttattaatagacgttaacttgtaaaacctggtaaggtatcagtttttccttctctctggtggagaagttaacccaaaggttatagttttattgactggtcactttttttttttttttttgagacagagtcttgctctgttgcccaggctggagtgcagtggggcaatcttggcttactgcagcctccacctcctgggttcaagcaattctcctgcctcagcctcacaagttgctggggttacaggcacccgccatcacacctggctaattttttttttttttttgagatggaatcttgctttgtcacccaggctggagtgcagtgacaccatcttggctcactgcaacctccgcttctggggttcaagcagttctccgtctcagcctcctaagtagctgggattgcaggtgcccgccaccacgcctggctaatttttttgtattttgagtagagacgggggtttcaccatcttggtcaggctgttcttgaactcctgaccttgtgatctgcccaccttggcctcccaaagtgctgggattacaggcatgagccaccatgcccggccacatctggctaacttttgtatttttagtagagagggggtttccccacgttagtcaaactggtcttgacctcctaacctcaagtgaactatccaccactgtggcctctcaaagtgctgggattacaggtgtgagccaccatgcccagccttattgccttgtagcttataaccagttttatatctaattttttttttgagacagggtctcactctgtcacccaggatggagtgcagtagtgcagtctcagctcactgcagccttgatctctgaagctcaggtgatcctcccacctcggcctcttgagtagctgggactacaggcgtgcaccaccatgtccggataatttttgtattttttgcagagatggggttttgtcatgttgcccacactggttttgaactcctgagctcaagttatcctcctgccttggcctcccaaagtgctgggattacaggaatcagccatgtgcccagctcatatcttgtataacaatctgatttcagcatttctgttcccactgacacatatattccagtttctcatattctcatcaaactactgtctttttcttctggtttcttcattaattaaataaaactttgacatacactcactatatgagattcatacttttaacaatttgtgaaaatacgcttttcagtataaattagcacattgtaaatatatgtggttaaatggccataccatgtagcttgctataacataatacattacatgacggtgaatcctagtggaataaaacactaccagattcaatgtacaatatcttctctcttgaaggcaggattataggtgtttaaatctgagtttgtgactattggcttggctgctgaagtatttgacatacagacccaggtagtgctttgaaaaatggctataccaggaaagagaagaaaaaaataaaaggtattcatgaatttttttcaatgcatttcccccctcccccgaatcctcttggcagaactctggggctagggttgtcagatttagcaaataaaaatacaggatatcaaatcacatttgaatttcaaatgaataattaatttttagtgtaagtatgttccaaacattgtaagtatttttatttgaaaaccctacatggggcatctcaaagtctggatggggttgcaggaagcaggtgggggaagcaaggtagttgccagaagtgccagaaacacaaggggtcattggcagaatttgagtccagtgctgggcagtaacaaaggccaggtcgtggaatcctgttctcaattccaaggagtgaactgaggaccagagtgaaagttgaagtcttgaatcaagagctgggtgatggctcacgccagcattttgggaggccaaggtgggaggatctcttgagctaggagtttgagaccagccctggcaacatagtgagacttcatctctacaaaaaatttaaaaattagctgggtatggtggtgcatgcctgtagtcccagctactggggaggctgaggtgggaggatcgcttgagccagggaggtcaaggctgcagtgagacatggatgtgccactgcactccagcctgggcagcagagtgagacactgtctcaataaataaataaataaataaataaataaataaatacaaatggtcaatcagcacatgaaaagatgctcaacataattagtcaccaggaaaacacgaatcaaaaacaaagatacaacttcacatagtgcttggatggctataataaaaatgtctgatagaagttgcagctagaactgattggtggctgttggccatctgagttttcatagaactgctcaccatggagccagtctgcagccaacacatccaacagaaaccacagtgtgcccagcatcctggtgcaatgacagaatctaatcaagcaggactcacctgtccacactgaagagtatctatagcagtataatcaccacaattccaatgtggagattttcaaataccaaccaaataaattgagcaaagaattagcagagctggttctgtttatggcacagattgttcactgctacccggagcatccaagtaactttcctcaagagtgcaaagatcttctctcctaccatagccctatcttgggtccagattttctaatgacattttgcaaaactttgatcttgctaagaagaatctcactaatcttggtgacacacagcctccctgcttgggaagctgaggtgggaggattgcttgagcccaggagttcaagacctgcccaggcaacatagtgagaactcgtctctacaaaaaataaaaaattaactgggcagggtagagtgagcctgtagtcccagctactcaggaggctgaggtgggaggattgctggagcctgagaggttgaggttgcagtgagccatgattatgctactggactccattcagcctgggagacagagcaagaccctgtctcaaaaataaataaggttaaattaaaatttaaaaaagtagatagagagtagatttgcatacagaaagagagtagatttgcagttgccagagattgggagaagagggaagcaggagtgactatttaaaaatatagttttcttggctgggtgcagtgggctatgattgcaccactgcacttcagcctgggtgacagagcaagaccatgtctcctcaaaaaaaaaaaaaaaaagtgtattgatgaatatttgatagactactattattttttcataaactttaaaaaagtatcatattattggtatttagggattggaagtttcttaaaattttgagtaaggaataaaatttgttgagttaaaaatgacaatgtgtggaattgataaggatgtagaaaatacatactatcaatagtctgctgctaaggatacaaattggtactaaatttctggaaggcaacttggtagtatacatcaagattttaaaaatgtatgtaataattgacttaacagttttaattctagaaatatagcctaagaaaataattgaatccatgtgcaaagttctttgtttattgtatcactatttcttcatttagaaactatactgtaagcagtgtgaatttttgacagcattaagtttgacattcacacaaagacatacccggtggccataatgatattcattatcatggaaagatgtctaaaatatactattggtgaaaaaatcaggtatcaaacagcatttatggactaatcccactgaaatcatagagttcattctttccttattttttgcatttttgcagtgcacatgtgttatcacttctctgccttttggctaagatcaagtgcggtgcacatgtgttatatttataatcataaaaatcagtaaagctatttccatcttaaagaaaaagatccctcactttgcaataatgagtggttatgcctcccggccttgtcttctttaactactagacaagattcatgccttggaattcctctgaacttccctactacactacattacaaggaaggcaatgtgggtatctccctcctccgtgacaacttaagagatgcaaggtcagggcacaggtcacaacagagagggacactgatggccaattctggggcctctcatcagttgtcccattccaggtttttaggtagagggctgctttgctgcttcaaggttaagcttgcctaatactcctctaggagctttaacgagctaagcacaaatcactccactgaactcaccaaatgctatgcctccctcagccttgcagactttcccaatccactgacatcactctactaagccagtccatcccatcccccctgttctgggagaatcctacataagctttcttcaagtggtctctaaaaccatttttggcctcactttattagaggagaaggaggcgcttgctgatatcagtatttcttaccaactctgtttccatcacagtaagtatcaggtatgctaaaagcatgtgtttgcctggaaaaaagttccttttacttagctgctctagggtatctctatgattttgttctgcaaccttaaggatgatataactaaaaagtaggagtatagaacatccccaggtttaacataagctgcattaattattataaccttccctcctcccagccaaataaaaaatcagactcagaaaccccactgatcttatgcatgttggtactcccacatagtttacttttaatacatgtctattagatatcattatataaagttaacattgcagggaagcttaaatgtgtcatttgtacaccatggttggatcttgatatgctggatattttttaaaaaggctctactacaaccaaagttagatccaaatccataaacaggtagataacatttcttttttatttttttgagacagtctcactctgttgcccaggctagagtgcagtagcatgatctcagctcactgcatcctctgcttcctgggttcaagcgattctcctgtctcagcctcctgtgtagctgggattacaggcaagtgccaccatgcatgactaatttttgcatttttactagagatggggtttcaccatgttggctatgctgggctccaactcctgacctcaagtgatccacccacctcggccttccaaggtgctaggattagaggcatgggccaccacacctggccacataggtaaaatttcgatgtattaagagaaaaggctgggggcagtggctcatgcctgtaactttaggaggctaaggcgggtggattgtttgaggccaggagttcgagaccaacctgggcaacatggcaaaaccccgtctgtactaaaaatacaaagaagaaaatattagctggtcgtggtggtgtgcgcctatagtcccagctgttcgggaggctgtggcacaagaattgctggaacccaggtggtggaggttgcagtgagccgagacctcaccactgcactccagactgggtgacagagtgaggctctttcttaaaaaaaaaaaaagaagaaaaattgcattctacacagagcacttaagttcataattctgtgagagaagtatttatataagactaaaaaaattatagtaatcaggagaaaagaaaaaagtggaaaatttgtttgcctcaaaattgccaaccctgggcatatttcataaagcttctacaaaaaatggtttacgaagctgaaaataaatgtgactgaatcctagattataaaaattaggcaaatctcagtctttggaattatctattatgtgctttttcacactgactctgggacagtctgaagttggtagtgtctgttaagctcctctagcttgccaatccaggtgcctggtaccttcccagaactgcctttttcatgtgaccctgatattcattcctttcccagtgctcttcctgggtaacctgaaaaatagccccaggatagtgaaaagtagtcttctttctcatccagagattaagtgcattttaagcatggtcatcttctaaaggaatgaatcatcctaatcaggaaaatctgaggcaccagaacaagtagttatattttgctcggaaatgcttttagggatactgaatgaggtggtatgtacccataacgccagctactggggagcctgaggcaggaggattgcttaagtccaggtgtttgagaccaacctggacaacatagcgtcaaaaacatttttttgagaccctgtctcaaaaaaaaaaaaaaggaaaaaaaaaaaaggaaatgcctttaggtgctcctttatattgttgtgagttttgttcccatgagacaggctctatagtatctggctcttttcctaagcactgcaagaaagctaaacacaggtcactctgccaggcctaccaaagtatgtcctcagtcttccctaccgcaacatcactccctaccaagatagcccaccccaccatctcacactgggaagattctgtttaagttttcttgaatctttagaaacaattttggcctctctgctgggggaaggagtagagaatgctgttatctggggactgatacttccgtttgttcagaggaatagctcagtggactaccattcttggtaatggtatagttgacccttggaaaacatgaatgtgaactgcacagctctacttatatgtggatttctgccaccccaggaagagcaagaccaatccttcttctttctcctctttctcagctactcaaagtggaagatgaggagaataaagacctttatgatgatccacttccagttaatcaatagtaaatatattttctcttccttataattttactaacattttcttttctctaacttactttattgtaagaatacagtatatgtgttatatactgtatataatacatgttatatgaaatatgttttaatcaaccatttatgttatcagtaagtcaatagtaagctattagtcattaaaagtttagggagtcaaaagttataggcagattttccactgtgcaggaataagcgcctctaactctgtgttgttgaggggttaactgaaattcctacaaattttcatgaaaagtttaattactttttgtgtgtttctgaacataggctccctcttgtggttcataggatatatgatatataagagataggaaattttatctgcatttttgcagttgcaaagattacttgggcactggtagaaagatgattatagctgaaggcattgatgattttttttttttgagacggagtctcgctctgttgcccaggctggagtgcagtggtgcaatctcagctcactgcaacctccgcctcccgggttcaagcgattctcccgcctcagcctccccagtagctgggactacaggcgcatgccaccacgctcagctattttttgtatttttttagtagagacgggatctcaccgtgttagccaggatggtctcgatctcctgacctcgcgatccacctgcctcggcctcccaaagtgctgggattacaggcgtaagtcatcgtgcctggcctgcactgataatttttaaatgagtaatgtaaagacctaagttaacttatttaagaattatgcttgtatgaagacccagtaggcaagaaattatagcatttgaataaagaaaaatctgtttaaccagcattttaaaagtaataactggccgggtgcagtggctcacatgtctaatcctagcactttgggaggctgaggtgggcggatcacttgaggccaggagtttgagaccagcctggccaaaatggcgaaacccatctctactaaaaatacaaaaaattagttgggcatggtggcgcatgcctgtaatcccagctattcaggaggctgaggcaggagaatcgctggaacccaggaggcggaggttgcagtgagccaagatcacgccactgcactccggccaaagtgcgactctgtctcaaaagaaaaaacaagtaataactaatatttattgagttatttaatgttccaggtactattataaacactttatgtaaacaattatgtaactttttttttttgagatggagtctcgctctgtcactcaggtgagtgcagcggcatgagcttagctcactgcaacctccacttcccgggttccagcgattctgccgccttagcctctcgagtagctgggattacaggcatgtgccaccatgctgggtgaatttttttgtatttttagtagagagggggtttcaccatgttggcctggctggtctcgaactcctgacctcgagtcatcttcccgcctcagcttcccaaaatgctgggattacaggcataagctaccacgtccagcattatgtaactttttattatggagaatttcacacttaagaaatgaagaaaaaagcaaaaagagcttccatatgtgcattatccactttcaactatttatcaacgtttgaacattttgctatacctatttatctatcactatcattccccccgctcattctttttctggagtatttaaagcaaatatcagatgtcctataattcacctgtaaatatcataacattcaaagcttttaatatatattagctattttagtccttgacaaaaagtatatattattattcccattttatgtatgtataaactgaggcaaacagtattcagtgacccgcagggctcaggactcaaaccctggagtctgaatgcaaagctttataagtacgtcatttctgagattaggctgtggcttctgtctggggtgccctctctctctctctttcctggatcactagtacttgaggaagccagcttacatgtccagcagccccatgcagaggcctgcatggtgagaaacagggcctctagccaacagccagttaggaactgagggctaacaacaaccacatgagagagcttgggagcagattctccatcccttatatagcttatattttagtgggcaatatagacaatgaacaagtaaacaaataagcaaacaaacaaacaaaaaaatatatatataatgtagtttcaggtagtgattaaatcatataaagagaaataaagaaggataaaggagcagtgtgtgatgcggtgggagacactctttttgatggagcaataaaataaggtatatcagttcttttacttttggtacaaataagagaaaacccaactgaatgtggcccaaaccaaaaaagaaatttattatatcacataacaacaagtccagaggtaggagcgctcttagttagtaacaaggatatcatcagggaaccaggttctttctgctttgccatcgttggtatatcagttttgagttccaaacaaaagaaaaatagaaattctggggcagagtaagtttttagctgaaaagatataatttgaatacaattttagtgtaaagtcttgagtatttacgcgtttataggtatataaaaggaagcacagatttctgaagcctgtgtctccaaccaaaggcaaggatgggacctctaaaagcagaaatcacacattttcacaaggaaaaatgattgcttggtttaaacaaccccttggattgtcagctcaaagttggttggttacagtagagtttggcacagctgactgttatgccccaagtcagtttgttgaatccagatagtagaggcacaaatttatcatcaggcagctttcctactgactctgatgagctttctgaaaagtggttactttggttccatcttctggagctctgggttatacagtgtgcaaatctgaatgcacatactcaaagttcagcaaaaatttattttattcttctcttcatggatgtaagatggctgcagcagttctagatgtcagatccagatacacaatattaaagggctatcttgtattatgctgtaacacagtgatttattaagtcttcattaatccctctcagcagttatatactggatatatactggatataatgtactgaattaaaaatgtgacattcttttatcctctagcagtgaagcagtaaaatattggtcagaatgagaatcatgggtaggtctaatcatgcaggaacaggagattctaaataagttgccaaagaaattcatttcgcattagattatcttcttttctaggcgaatgttatttaggagctgtgtttacataccaaataatccctgaattcaaggctgttgtgtgattactgaacatgttaaagagcttacttccttgcactgcctccctacaagatccatgtcaagtcctgtctaactacctgtacaaaacttgaggaggaaagtgggctttcagcaagcacactcttgggataaaagtagaaaataaaggccagaaatcatggccgtttcctccagagaaaataccagaacatatttaaactcaggggtggtatgctgtttctggggaatgtgccctgaggctattttgatacacgaattaggagtatctttagtgataatttcaacatactacatatgttctttataatttggaaaagttacggggagagtggagaaaacaggaagggattgttagcctagaaaaaaggttgaaggagtgaggggggatctaggggccacacagatagaccaagccagtttcatgagcttacctggggccaggttgaaatggttcatttgaaccacatctctgcctcaggttttctgtaaatttcattcattattgcaactggcttgccatcacctaattcaattcttcttcaatgaatctggcagtgtacttcttagaaacaacatgaatgatggcttaaaccagttttatgtcaaatatcccttcctggtttagttcatgttttgggggctctttttaacataagcagcaatatataccttttaagatatttagaagctttatagtccagtttaaattttggttaactagttatacagtttagattggcaaagcagatacaatgccagcataacatttattcattcaagaaatgtttactgagtgcctgctgtgtgccataagtaagatagctgtctctttaaggttttaataatacctgtttagcaattattctttatcgctactgaagctgatagatgctatctgacacagtagattttaggaatatatacatattaatcatgtttctgacccataatgtaatagttcatgctcatcaacattcaaatatttttattcgaccagcctgggcaacatggtgaaatcctgtctctaccaaaattagctaggcatggtgacacatgcctgtagacccatctactggggaggctgaggtgggaggatcgcctgaacctggggaggtggaggctgcagtgtgccaagatcgcaccactacacttcagcctgggcaacagagagagatcctgtctcaaaaaacaaaaaacaaaaaacgaaaaacaaaaacaaaccaaaaaaaaacggctagagcgcagtggcgcaatctcagctcactgcagtctctgcctctccagggtcaggcagtcctcccacctcagcctcctgaggagctggaattacaggcacattccaccaaacctggctgatttttgtattattttggaaagacaaggtctcactatgttgtctaggctggtctagaactcctggactcaagtgatccgccctccttggcctcccaaagtcttaggattaaaggtgtgagccaccatgcctggccaaaaatttttttaaaaatttgaaaccagccaggcgcggtggctcacacctgtaatcccagcactttgggaggctgaggcagttggatcacaaggtcaggagatcgagaccatcttggccaacatggtgaaaccccgtctctattaagatacaaaaacttagctgggtgtggtggcatgtgcctgtaatcccagctacttgggaggctgagccaggggaatcgcttgaacctgggaggcggaggttgcagtgagctgagattgcgccactgcactccagcctggcgacagagcaagactccgtctcaaaaaaaacaaaacaaacaaacaaacaaacaaaaattgaaaccatacacacaggctcacacttacatagacaaaaccctcttttgacccactggtttctattctcctttccttaccatagagtttctattcctgccatctttactttccaccctcatactctcttgggcccacttagattaggctttcattccaccaaaattgctcctgaaggttgaccttaatgatagcaaatttaataatcaaatttcattcttcctaacagcactttgcgtgattgatcattctctcttttttgaaatattttctatactttggactccaggacaccattcttttatggttctcctcctatggttccagctgctctgtctcctttgctggttcctcttcgtttacctgacctctaaatattggaaggacctaggcttatatattggtgcttttttttttttagctgtctaccttatgatctcatccagtcctacagcttttttaatctttatttttcaattttaattttattttgttaaaataatacatacatatttaaaaagattaagtagtaccaaaaaggttatgataaaatgcagcatttcccttccccatccctctctactttcttccctccttcctagagacaactatttttttatgcttttagctctctctggcatttacacctctacctaatttgtaaataataggcatatactatctttagctattatctatcagcttcatattgtagtagatgagaatttatctgtcttacaatgtcattctgtcttctgctatccttaatattctcaatatagttatattacaatagttggtcaaatcaataatcaatgtttacattattacatatatgcgaatataattcccagcagtgtcgcagtgttttatgattgtattttcaatatatcttccagtttgctatctgctggaaacccattcactgatcttaaacttgatttatggtttctttccattgtcaaatccaatctgattctttttaaaacatgctctgttgcttgttatagtttccagtttcctgttgaaattttcaagcataatttttgtgtcctttaacatagtaaatatagttgttttattatttgtgtttaataattccaatatctggattctttcagggctgtttgacatcatttatttctgttggtttttgtttttgttatctagccttatgggttctagttagattctctgggtccttaatctgtctttctacatttagatttattccctatttggtgaagcatatccatcaagttaaaagtatgttacaatggcagaaacatggtaaggacagcggttgacatggctctctctcataccacactgccccaatcaggactgctgtgcagttgtcatttgaatatcacaacttcaccaccagcatggagagtcttttcctttttctgtgttgaatctcttattttctatattccgtattttcttatttctcagatgactctctcatcttagtacaggcaatgtgattgtgtgatgtagtagacagaatactggttccctaaaatgtccacattctaatctctaaaacttgtgaatatgttgccttaaatggcaaaagagactttgaagatgtgatcacattaagaatgtttaaattgggagattatcctggattatttgggtggtcacaggtagtaatgaaggtctatataataggatagtaggaggtatatgtgtgcatgtgtatgtatgcatgagagaaagacagacagagacagcgagagatagacagaagagagagatgtgctggttttaaatatggatgtaggaaggaagggaccacaagacaaggaatgcaagcagcctctggcagcgaggaaggtaaggaaatagattctcctctagagccgctggaagggaaacagtcctgctaacatcttgatttaggaattctgatctccagaactgtaagagaataaatttgtgttgtcttaagccactaagtttgtagcaattttttatagcagcaaagaaaatcaatataaatgataattttttcagttttttttttttttttttttttgagacggagtctctgtcgctcaggctggagtgcagaggcatgatcttggctcactgcaacctctgcctcctgggttcaagcaattctcctgcctcagcctcccaggtagctgggattacaagtgcccactatcacacctggctaattttcatatttttagtaaagacagggtttcaccatgttggccaggctggtctcgaactcctgacctcaagtgatctgcccgccttggcctcccaaagtgctgggtttacaggtgtgagccaccacgcctggcctaattttgttcagatgttacaagtgtctatagtcaatcttcacattgccagtttggttggttataggatttctaggttggaaggcattttccatcacattgaagacactcttccattgtcttcttccttcaaatgttgctgagaagcccagagtcatttttattatcattccttgtacatggcctgttttttctccctctccagacacttagaacattatctctttgtctctaatgttctgatatttcacaatgtatgggcctataagagtagaaaattccacatgtcagaaacctgatgctttaaaattccataaatataaccaaaacacaagcaaaaaattggggaaaatatttgcaacttgaaaaataaagggttattactcttataatagaaagcactcttagaagaaaaattctacaaaagaaatattcaaaatagccattttaaagagtacatctgtaggtctagaactgaaagggaaaaaaaggaaaaaagtacaaaagtgtacaaaaaatcagccaagaaacatatagaaaaatccatagacttactagaaataaaattaatgcaaattaaaactgtgaggaacaatttttcatctttttaattggtgaagactaaaaaaaaaactcaaaatagctaatgttggttaggtttcagtactttcatacactgttgttagaaatgcagtcaaccatctcttctagatgaggcaaaattccgtaagccagatcaaaagctttaaaaaatgtccatgttaggccaggtacagtggctcaggcctgtaatccgagcacgttgggactgaggtgggaggatcacttgagcccaggagttggagaccagcctgtgcaacatagtgagaccctgtctctacaaaaaataaaacaattagctaggcatggtggatgtgcctgtaagtcctagctgcttgggaggctgaggcaggaggatcatttgagcccaggagtttgaggctacagtgagctatgattgcaccattgcactctaccctgggtgacagagtgagactcttgtttcaaaaaaaaaaacaaatcagtacttagaataatcagtactttgttggaataatccaacaaaataataatgaatgacaaatgcacataaagagttaactaccatcttggccatgttgtttacaacatcaagaaagtggaaacaggtcaggtggggtgacacatctgtaaccccagtgctttaggagactgaagcagaaggattgtttgaggccaggagttaaagaccagcctgggcaacatagcgagaccccatctctacaaagagtttaaaaattagctggggatggtggtgtctgcctgtagtactggctactcaggaggctgaagcaggaggatcatctgagctcaggagtttgatgctacagtgagctatgattgcaccactgcattccaccctgggtgatggagtgagaccctgtctctcttaaaaaagaaaagaaaagaaaaaaagagtagaaacaacctaaatactcaaaaatagacaattggcttaagtcactcccatggcaatgggatgtttcagcagttttaaagcaaataagaaggccactagcctgaggttgtctctgcaccctgagcccttacataagcaagctgaagccttatttatttatttatttgtttatttatgtatttatgtatttttatgagatggagtctcactctgtcacccaggctggagtgcagtggcatgatctcagctcattgcaacctctggctcccgggtttaagcgattcttctgcctcagcctcccgagtagctgggattacaggcacgtgccaccacaccgggctaattttttatatttttggtagacagggtttcaccatgttggcctagctggtctcaaacttctgacctcaagtgatctgcccgcctcggcctcccaaagtgctgggattacaggtgtgagccaccgtgcccagcccaaagcctaatttagaggtatttcttataactgacttaaatagacaaacaaaaatacagccctaaccaatcacaaacagccactgagtgaattggctatataactaggtgtctcccatcagattatacccaaataaggcaaacacttagctgtagcaattcaggtaatttcttcactttgcttctgtgttcagcctataataggtaggtgcttccagagcagagcccataacctcttttggtcttggtgcttcccaattcatgaatcattcttttactcaaataaatgtgttaatttcatttaaacttttttttttaacagcaagatatcatattaaatttatcatataaaaagtggccgttattggtaagaggttgacttggggaagtgaaatgagatttggtgagaaaaaaaactctctgcactctgtccatcatttattaatagaatgttttctttctagagatgaactatttctacttctaaacattgaggagatacaaagaagggcttttggctagatatggtggctcatacctgtaatcccagcactttggcaggctaaggcaggagaatcacttgagtccaggagctcaagaccagcctgggcaaaaagcaagaccccattactattaaaaaaaaaaaaaaaaaaaaaaaaaaagaggctttcagcaatgatagtgataaaattacaaaaaaaaaaaaaaaaaaaaaaagcaacagtaactaacattgagtacttactgtgttctgggcagcctgtcaggtatttaatgtattttatttaactcccatgatagccctttggggtaggtagtattctttatcatctttaggtgtgaagactgaggcttagagacgttgagtgaacggcctagagtgagtgacacagctgataaatattgtagttagaatttaaactctggaagtcaggattccagacattcttatccactgggctgaactgcctcgaataagtaaagcatctccgttagtggagatcccctaatagccctctgttctgggagacataccgagggatcattttaattaggtagatgtaaggaaacacaggggaaggttgtagctggacatgtgggaattgacaatgaagctcttttcatcattttctttggtacatgaagttcaaaggctgctgggagaaagtcagcaaattttcccaaagactaagcttctgggaaggcagttactgagacccctgatcacttcctttaggagggttaatattgctatatcacctctggactggaatggccctgacctgacgtggcagcagcaaaagacaggagaaattcgccatggagaggggagcctggactgcttacctggacttaacaatcctggcagcaacaacaagtttctagctcagttcctacaaattttactctagcatcacacatgtgtcctaggaaaaaagccctttgtgtttgtaactttggaaccatagattgtcagagcatttacattttttttttcttggtgacagagtctcgctctgtcagccaggctggagggcagtgatgtgatctcggctcattgcaacctccgccacccggggtcaagcgattctcctgcctcaaccttccgagtagcgcgtgatctacctgccttggcctcccaaagtgctgggattacaggcacgagccaccgcgcccagcccagagcatttaaattttaatagctccatcctgcgaaaggtcgtgctgtagtagatattctgtgtctcaacagtgacaccttgtggggcagaggtagcagaggctgggggctgtttggactggagtagttttctatctttcttaaagtcagttataagcaggattgatcttttggactctgttcctgaacttaacatggaaggacaaaaacacgtagaaaacatgatgtactgtgtacacctaatcaatttgaatgttgagttttgatttcactcacaattcattcattaaagattaaaagtacaatgatacactacttttcatctaacaggttaataaatattaaaaagtaggacagaatttagtgtcagtgagggtataagaaaactatcaaaaactgttactggaaataaaaaatcgtgcaaaaaattggaagataatctatgataacatatacccaaatttaaaatgcacatattctataatccagtaatgccatcattaagaatttaggagtgttgctgggcacggtggctcatgcctgtaatcccagcattttgggaggctgaagtgggtggatcatgaggtcagcagttcaagaccagcctgaccaacatggtgaaaccccatctctactaagaatacaaaaattagccgggcatggtcgtgggcgcctgtaatcccagctacccgggaggctgaggcaggagaatcgcttgaacccaggaggcggaggttgcagtgagctgagatcgcaccattgattgcactccagcctgggcaacagagcaagactctgtctcaaaaaaaaaaaaaaaaaaaaaaaaggaatttaggagtgttttctaatgattttttgtttgtttaatgtatcaattaggatgcagtcatttgtaaagaacaacgatgaaaaaacccaattcaaacatgtttgaacaatggaggggatttattaggcaatggaccgagatcccagaaatagagtggacttcacctggggtttgactcagcatctcagagatatcatcgtccacctagtttctttctaactccgttttctggcttctgggacatcaaactaattccctatcaaagttataagatggctgacaacaactcccaaggtatagtggacatatgttttctttatggccacaaggcacccttgaaaacctttcctatggagagttctccatcttataagtccttattttctcaatgtgaaaatcagaaattgtttcccagtctcccttgcagctctgtgaaatctggtgacatgaagatgcaatcaccatgcagaaaccctcctggcaagagtggcagtactagctccagaagcagcagttgcagaagttcaggtgaaagtccctagggaccagcacccttgccagtggggtatttgtgctcattgggagcaatggtggtgttttctttggagcagttctacaataggataaattgttgtgtggccctgaagccggattctctggtcttccagagagtctatgaactcattgatatcctttaataaatttgctttctgcttaaattatccacagttcatttctattgtgtgcaagaaccctaatacacagagatactttttttcagccacatctagagagtggggtaactttcagaaattccctcaaaagagctaagaagcttccttctctgttatctctggcaaacctctttttacatctctatagtcagaattgggtcattttttttttttctgtactactggggcttgaggacgggattatgataatgatctaaggcctgagccacattcttatcccttaaggcttaagacaaagaacaaagagggagaggcgaggacacccagggtgagatcaggaggatactaacttcagagaggggtgaatgggtgaaagtatattggaggtagaagaaccacaatgcctaccagacagagcaacttacatcaaaccctttgaacttccaagcttgctcctcacatgtgtgaagaagtctgcataaaccactatattatgttgctgtttgtcaccacctggaacatctggacagagtccccaggataggatacaacttcctttccatggggccagtcacattctttgctgtcttgttccttcattctgcctttaatgagggtggggtcaataaagaaaatggcagtaaatttctctttagtttaatggaaaattcctctggaagttcacccctcattgatgtactccacttccttatttttctcccctattcttaggagccaatatctctgcaacaatgcttccttcttctcacctttcaaagcaagactttattcattctctgaacaacccaccccttccaaatagatcagactatacccctagcggtatatttctcaaaatttggagcctgttctgagtaatatgcttttcaagcgaattttacccttagtactagtgacatttagggctggataatatttttgctatgagagactgtcctgtgcattgtagaatgtttagaagcatctctagcttctatccactagaggctagtagcatcctctcccaccaagttgtgacaaccaaaaatgaccactggagagcaaaattacccatttaataacaagtaagctagaataatactctgggggagactgtgctgggtgagagtagaggagttctcttatattccaagttagggtggagaacgtggggaactttatccaggtttcaccaaaaagtaaaggacaggtgaaggaactcacttctcttgtgagtcatcaatgaacttctttgctctcctgactgtgctgcaggggactgctgaatcaccatctcccaaggacaaatattaattttcatagagtacagcctaaccacaaggtagaagatacatattttcccatctgtccttctgtcctgtaattttacaaggccatctctctctttctctcttttttatgagacggagtctcgctttgtcacccaggcagtagtgcacaatctcagctcactgcaacctctgcctcccgggttcaagtgattctcctgccccagcctcctcggtagctgggattacaggcgcctgccatcacgcccggctaatttttttgtatttttattagaattgggttttcaccatgttggccaggctggtttcaaactcctgacttcaagagatctgccctcctcggcctcccaaagtgttgggattacaggtgtgagccaccacgcctggccatggccacatctcttataatgaggtatgacaaattattattcagcacagacttaatccacctatcttgcttccaaatgtatcttctttggatcatccctgagtaacactttttaaaattcccttagctactcacagagttggccaaagataagaaattattacttggaaatgtaatcccatagtttcttttttatgatggtggttgctgtgttacttggtacacagatattttgggttagctgatacaaaagtttgatatttcaaactcttatctttattgtggcttttagctacatttttttttctggataattttagcctttagcattatgaaatgtccttaattacatttaagcctttttggtctgaattgtctgatatcaaaagaacgaccctgcactcctattgtttccatttgtctggtgttttagttagttcaagctgttatagattgggtggcttcaacaacatttatttcttacggttatggaggatgtgaagtctaagagcagggtaccagcatgattgggttttggtgagtgccctcttactgctttgcatatagacacctttttactgtatcctcacatagcagagtgagagaggaagcaagtgctgttgcgtctcttcttagaagggcactaatcctattcatgagggctctgtgctcacaatctaattaccttccaaaggtcccacctccaaataccatcgcatttggaactgaatttcaagaagtgactgttgggggtacacattcagtccacagcacctagtatgtctgtctattcctttctatttagcctttctgaatcattttgttttaggtatgttgcttgcatgtaccataatgatagtgtatcagttagcttctgttgcataacaaaccatgccaaaacttaaaaaccagccatttatttagctcataattctgtaggttggcttaacagttctggtctagattggctcagttgatctctcaggtgcttgcttctgtgtctgaggtcatctagggtgttgcctggttgttggatgatctaagatagccttgttcatatgtctgacaattagcagactgttggttagggctaggagagtgactcaaccacgtctctcataatccagcaggcaagacggtacacatggaggtcacggggttgcaagtgcagtaagagaggacaaaccctgatgactgaagtgtctgcttgcatcacaactgctaatgccccattggccaaagcagctcacatcaacgacctagacttaaagggtgcagaaaaagactccacttcctggtgggaagatctgcaatgtcacactgcaaaatcatgataaagggagaggaagagtttgtggccaattttataatctatcacattgggttttcttttgtgagtcattttaaaagtctttttctttacttccttttttctttacctccttctgctattcgattttttaactttaagtgacattcattgatatcatttaaatatcttttgactcccatcaattgcctatttaccaataaatttacttattttacttttcctttctgatgactgcaacttactatgaaatggatccaaaaagcaaggtagatttatgggtggatagagggaagattagatggacaaatgtgagataaagcatgcatagtaaaatgttaatgttagaatctaggtggtgggtaggtgagtgtttattgcaaaactctatgctgtggctgaaattttaaaaatgaattgtgaagttgaggcaggagaatccctggagtccaggagtttgagaccagcctcggcaacatagggatattccgtctttacaaaaaataaacaaataaattagccgggcatggtagtgtgcacctgtagtcctagctacttgggaggctgaggtaggataattgcttgagcctgggcctggaaggttgagggtgtagtgagccatgactgcaccactgcactccagcctgggcaaaagagccagaccctgtctcaaaaaaacaaaacaaaaaaacaaagaaaagaagagaaaagaaaagaaaagaaaatattggaagaaaaagaacacaggagccagcttgagggtgttcatatcagtcaaatcttggacaatctgagcgtcaaaataaataataataacagattataatctaccaaattaaataaaaatctatgggtccatgctggtataaacatataaatgaataaataagggagaaaagaaaattcttctttctagaataatgtcagctaatagatataggcagaataatggataagaaaattaccattttgcaatcatcacagaaatattagattcatggaagaatcatcgaagtatgctaaaactagtggaagaaagtttaatgtggaacagtatgtttaatagcctcgaattatattcccacaaattagttgttaattacaaagggaaaagaataatttttccaacgagaaccctggtggtttttattctatctaatcccttcaaccttttttttccctctattggatcttcctcctgcgcccctccaccctctccttattctgggctagttgtactttctgcttgctgcagagctgccattttaggactttccttaactgctttcctagacctcctcctatgaactgtttgctgaactaccttatataagggtggattaaagacctctgtaaatatatacaatagattaatagattggtcatagaattctcttgaactacattttgtttggcacacagtataagctcaaaaaatatctgctgaataacttagtctggtcatccaagtattaccaaaactttgtaccatgaagcttgtaggatttggttttcatttaatgtatggttataaatattaaataagtgaagacaaatgaaattacatacattttgtatatatgcttactttttctttttaaaaatttatttatcttattacagtgttccacacgttcagagaaacttctctattaacgaactacagacatgatatctgaaagtaatctttatgcatagttttcttctaagaaactcaaatgtgttttatatgaagaaccactaataaccatttacttactactctctgctactaagtcttgaacagagagctaatgtatgcctaagggaaaaccgattaaagaaacgttcttatatagcttcaaaaacgaattaacaacgatagtcagggtgaaaggggaaggtgctcctctttaacttgaagtgcttaaacaaatattggattttagtgaaaacaggagtcttgaaatgtatccttaatgtccagatactcacaagataactttcaattatccagaattattttttactctatagagcaattcttccaaaatagtgcatagatttattctcagaagttatcttattcaagtaaagtgactctcatccaagagagacactggtagcaaagggcagtagttagttaaatagcagtgaaactgatattagagaactgccaactgatggaaatttaatcagcagtatatggaattggaatgggcttatacagggagtaattctgaatataaggtgttcagcagttttcgtttctttaaaattttttgtacaaagtggaaaaaacttacacacccatatttgaaaaatgggtaatttttctttcattcattattattttttaaagttaaataaattaaggagacaaatagttctctatcgcatgttgtaaaaaatccagggcccctgtcccttaccattgccttttttccattccttacatgaagtgtgtcttcccaggtgacacgggagccatccttgatgttttttgtttcatcaagtctatttgggtgttcctattctatgcttcctcccctctagattcccgcctctacctcatactctaggtttatcctgagtgtggagtagggaagtgtgaataccacatttacattttccttttgttcttcaccttttctctcttagactgttccgctcagcaccaaaaggactttctttcttgcactgcaggaacttcccttacatcaaatccttatactgtttactctcatttattgtaaaaatactacagtcttctgaatctgacttctgtaagcctcttttctccttaataacaaagactcctccaaaaatcataagtgcttactttcaggctatcgtctccatgtggacttgaaacacactattttgaaactcaaagctgccttcagcagggttctctccattcgaagaggcaactatttccactggttcaatcagtggggttaatgataggcccagaaccaggaattttcaagaaggaaagtccactgacttaatattctccaaatgtactcgttatgctgagaatacacactaagaacatatggcatttcattacataaatgaaaaacatcatcataagcaagtttggaagcagtgaaacacacccttggaaggcattataaatgctccctaatatctgattctcccttcccagtcccattgcagtttggtggagccatgtgaaaggttctagctagtgaaatgcaagtggaagtaggagggctgaggtagtgacaagctgctgcatgatgctacagatttcctcttctgcagtgaaagtggaatctcatgttgggatggcagagttacaagatcaaagtggtctggattgctcagacactggttggaggacaactctaagcctgttccatattagactttgtgtgagcaaagaacaaatgtttattagtatctttgagtttaaaattgaaactgagattttgaaattgtttattgtcagaacataagctagccaatcttgactaatataccataattctttgcttattggcctattgcctaattagctggagtgcttgttgttggtgaaagtgtgttattttggaagtagagaatatattttatatatatatattttttttttttacaagggtgaaacttatttaatgatatttattgaatgcctgctataccaagtgctagagatgcatcagtatacaaaacacacaatttttgccctcatggagcttacattttagtggggaagtcagataaaaattatatcaacaaacaaaatacttgcaagttagggtaagtgttatgaaggaactaatggctgcgctagaggttaacaagggagggaatctactttagatagtatgatgatgaggagaggagacctttcaactgagatatgaagaaagggagaaaacattctaggtcacatgaggcaagaaagatcttggtgtgtttgagaaactaaaaagaccattgtgactcagtggtaacaaatgaggaacaagaggcaaaatatgaagttgcagagaaagatcatcatgttgtggcagggagtttggttttcattccaagccatcagatagtatcaccttaatcttcctttggtcaatgccacaaaactaaccacatctatgttaactttcttttctccgccatctgcctcaacaaatgtcatgtccctcatctttctgatggctaatcactccctttgtatcctccctcctctggttaccctttctcctcttttcatatactttgcttcttcgttatcttcccaatgggtcagtcctgtcaaccaacctacaagacaccacccatcccccaccctcttccatgggttatcaactggtaatgattctactaaccactcagatgttcaggccccaaaaccaggacctatcttgaccactctcttttctttactttcctatgcagttcattggtaaattcttcagttttaaactcaaagatattatcagtttggttcactcttgctaatgttagctttcctgatttcgtcttgatttctgaaatggtctcatgatttgcctccttgcctccattctttccttcctctaattttttctttatgcatcagccaagggtggctacttattttaacatagaatagcttaattaaaataaacaaaaatttttataaattgtggtaaaataggccgggtgcagtggctcacgcctgtaatcccagcactttgggaggctaaagcgggtggatcacttgaggccaggagttcgagaccagccgggccaacatcgcgaaatccagtctctattaaaaatacaaaaattagccaggcatgtggtgtgcacctgtagtcccagctactcagaaggctgaggcaggagaatagcttgaacctgggaggtggaggttgcagtgggctgagattgtgccactgcactccagcctgggtgacagagtgagactctttctaaaaaaaaaaaaattgtggtaaaataaacttttactataatgaaagtagtctatgtgctgcaaaagttacaatgaaaaagataggcaaacacaaagaaaaaaatacacatttccacttccaaagattaccaatactaacaccttagggtataagcccactatttttttagttgtacataaatacatatatgtgcatttttaaaccaaaatgagatgctgtaacatactatttcgtgacttgctcttttcagttaatgatcttttccatggcaatacagttctattttatccaatactcagtccatctacattcatatttctttaatggtcctgaaaatgcattttatagacagtctgttcaaaccaggatccaattcaaactgttatgtcccttaaatttcttttcataaagcagttgcttttatcatgacaaattgttgaagagatgggccagttatcctgcagaatgtttcaccttctggatctgtctagttacttcctctggcatcatttagtttgttcatctatctgttgtattttttataaactgtgttagatgcaaaggcttgacagattcaagttaaatatttttgcctggaatataccatgatgatactgtatactacatcccatcaaaagacaaactatccgattgagctacaacgtggcctttaaaaaatgtaaattataagtgtatatagcttcctctgcatttattatacaatactaaacaaattcttcaacttggacaacaagtttctgaatgatttgatgcctgcttactcatccaactttattccatcccattctatttgtttttaaaggtcttgtcacatgtttcgtttctagtcctgaaacatggttaagtgcttgcctcctagggcctctgccgcaggcttttggtttggaggctctcctttgccactccacccctctccactcttctcctcttctgatatcaagcatcttctcaaattacaggtgtcgtttttaatttatttaaaattttgttctttctacaaaacagcaaccagagacacaggttcattttcagttaacctactcggagaaaacctactttatcttatttaaattagggtcctccaagcgatcttaacatctcctaagtcccaagcaccctgtttttttcctgatactttttccgtttaccttaaggtctgtgtcaacctgacagtaagctgcacgatggcaggggtcttgcctactaggttccctgtgcacagcagcccgtcaacagtagttgaataaacatcataggtcacaataaccctgggactgcctcttggggaggtagccgcaaactctcgcaggtggcagtgacaccagtacttctccggggggttgttcgagtggaggaatactcttacgtgaaagtgctcagtacaccactgcggcaggaaggaggaagggaagaattccagatggggagaaagtaatattttgcagcacagtacagggtaaactgggtccaggtgggcgtagccgccgcgacaccttcacgtgaccgcggacagcttaaggaccccgcatccagtgcgcctgcgctggagctcccggaagttgccggacccggaacgcaggcggagcgcaagtctgtcagccagtcagtccgccagtccgccagcccagtacctctctctcctcggccctcgtaagctgtccgcggtctgtttggcccgaacggcggcggaggcgctgatcatggcgacattcatctcggtgcagctgaaaaagacctcagaggtggacctggccaagccgctggtgaagttcatccagcagacttacccaagcggcggggaagagcaggcccagtactgccgcgcggcggaggagctcagcaagctgcgccgcgccgcagtcggtcgtccgctggacaagcacgagggcgcgctcgagacgctcctgaggtgggcgcggggctgggagtgggtaggttgtctgccagccgtcgctcgccgctcctcttcccgtctccccccttccttcaatcctgtaacctgggcggagccgccccgtcccggcctgaccaggcgcgtaggtgtggtctgcattctttgctggtgagcaggacccgccctgcaggcccgctgtgactgcccgcttgtcctgcctgcacgtctgctctagcccttggtcggcgagggctccgtggatcagatacctgggagcagcagtctgccctgtactgatctcttttgccacatttacttagaactagtcttcacttttttgggtctctaactgaagcttcccctttcgccccatttttccatcactgtctttcttgggccacattttgatttcataatagtagttgcttgaaggcagtgggggaagtgggggaattgggacactggaccaaatgtctgatcagctcatcacattgtccacatgaaatggaccgtcttcctcagttcaaaataatcaaatgatagatggagaattctgaaagttaggagctacaactatttgaaataaaactctagttacatagttgaaccgttcaaggtaggttgtttaaaagcagtttgttcacaaacagatatatacacagtagagtaaatttgttattttagcaaacgcttatttagctcatgctgatttaatgagggttcctttcatgatacttaatagttataagaacattttttacgattttatagttaaacatttcttttgcataccttgttaatctcgttttctccgtatagtatattctacttgtttcacaggagaatcacaattgtattccaatccaagtagcagaaacccaggctaaactagcttgagctaagaaaagacttattctgccgggcgcggtggctcacgcctgtaatcccagcactttgggaggccgaggcgggcggatcacgaggtcaggagatcgacaccatcctggctagcacggtgaaaccccatctctactaaaaatacaacaaattagccgggcgtggtggcgggtgcctgtagtcccagctactcgggaggctgaggcaggagaatggtgtgaacctgggagacggagcttgcagtgagccgagatcgcgccactgcactccagcctgggcgacagagtgagactccatctcaaaaaaaaaaaaaaaaaaaaaaaaaagtaagacttattctgctaactgaaaagtctagggatattccttccttagctttaggtatcactggagatcgtcttgcctccgtgatgcttccctcgaaagctttgttcatgtattgagagggatggctgtagtgtaataacaatcgtccgcaacactcagtatcttacagaagggagtgcttttctccttagctctggtggaagtccatgggaggctcctgggtttgtttgcacccatttatgatggtgggaaatgggctaagttaattgcccttatctgagtcatccagccggtttaatttctccttaccccatggatcaaagcaagatgagtccggactggggaagggttggttctccgaaggaaggggtactgaatagattgctcagaggaattaagaccccttggtgtcaaattttagagctacaactgttgggctgcaaggatcattagtctaatagcataagcattttttttaaagttaacctagaaatacttagccattctttagaattaacataattaaacaatttcaaggtaatttttatgtaggcatgaatagcattcagtgaggattttccattagtaatattaagaaaacatagttgtggtataatgagccctgtgataaaaatcttgttgaatatatcaaatttggttccagccctcagatttggggtcttcagaagcacttggtgcatgggttttaagctaacagacatgggaggttggtggataatggtttggatacggttctcctgtcaactttaaaacttaattcatttgttccttcctttattctttttaccagacttaaatgtgtgaactgttcctaggtagtggacctgttgtagatatagtctctttgaaactaaccatgtttctttagtcacctctgtataatcccctcctgccacattaattcaacaaatattaagtattttcactttttgggcttctagaggggttagggtaagcttggagatattactaaagtttataatggaggtaggtacaaaagttttgtaggtatatacgctgtaaaattagatgtgaatcagttgtgtgatgttcattcaaatccggcagaatatcttatttttaataattatgtttggataattgtgtaaacttaacattaattttttaacttaatgaactttttaaactaatgaactttgaaaaacagagtttaaactaattcctaaataattgaagccagcttgataagtcctgatatgcagctccatatattgctccagtgatagacttgttttcttattactaacttgtaggtgttctattaaaatttcctaaaatatacatttatgcatattataataatgagaatgagtacttaaaaactcatttgttctgggtgtggtagcatgcactcataattccagctgaggcagaaggatcactagagcccacgagttggagaccagcctgaactacatactgagacgctgtctcaaaacaaaacaaaacaacaacaacaaaaaacccttttatatgatacttcttcctttataaagtggcttttactaaaaattgattagaccttggtaaatggtgacctagggtgatcaaatgggaaccctgctggttttttatttttattttgtattttatttgaagctccagatataccatttaccagcattgtgtaatttcttttgtggtgatcagtttctttagagagaaagcttctagtcttccatgaaaaagtctgcttatcagctttctaaattttatcctggggaatggaggttggggatcttaacaatcatgtatgcagtctatcaggtacatctatttttagtatgacacctgcattagggttaggttcatttctgtgtggtagatcccaaattatctgagttaagattttattttgtaaaaagttggcaggtaggtagttctggtagcccagggctggtgtagtgtttctgtggagttaattggggctcagattcctttcagctttctgctgtttgaaacctagaatattgttctcaggtccaggttgcaatcatatccaagttccaggtagtaggatggagaaaggcacggggctcgccctttagggtgtttcctggcaactgttccacaacaccctgcctatatgttaccggccattttgtgtgtccttctgataggatgctaggaaaaggaattttcattatgagcagctgtatactcagctaaagggacacagttttgttaataaggaataggatagactgataatgatgtagtcaattagcactccctaccccacttagcagtgcttgatctccaccttagttatatttgatatctctgacatttttttcttttttcttttttttttttttgaggtggagttttgctcttgttacccaggctggagtgcagtggcatgatctcggctcaccacaacctccgcctctcgggttcaaacgattctcctgcctcagcctcctgagtagctgggatttacaggcatgaaccactctgcctggctaattttgtatttttggtagagacgggctttctccatgttggtcaggctggtctggaactcctgacctcgggtgatccacccgcctcggcctcccaaagtgctgggattacaggcgtgagccactgtgcccggccaatctctgacgtttttttgagagtgaacctaccttcagagtagaggatctgggagcctgaagttttctttgaaggattttcaaccataccttctcgttccagcctcacattgaactaccttcagaggtacctcatgtttcttaattcagatccttttctggcttctctggcatgatttggcttctgctttggctcccttccctcttagccagttagattttggctttctctttttcattcacttttcaccttttagtaaattttgttgaaacctcttatatcctgtgtgtcatttcccgttctttttgtccatgttcatgtacatcttttacatttttaaattcttgttttagtgggttttggcggggagcaaagaaggatgtttattcagatttatttgtttaactgtaagaggaacttgtttgcattttcagctctccacagtgcttgtaacaatttacattctcatcagcaggtatatgggagtactttattcttccatatccttgctaatacgtactgattaataatttaatttattgctttttgctaaactgatgggtgagagatagtacctttagtttgcattcctcttattttactgaggttgaacagtttttgtttactggccactttgtttctttttctgtgattgcttgttcttttcttttgcccattttctattgagttgttttttccttactaatttgtaggagttgtagcattttctggatatttatacttttttcattaggtatgttgcaaaaatcttccaatctgtttcttgtctctcaactgtgtttattctatcttttgtcacatggaagttctcccaaaagtgttgtcatctcataatctgtagttaacattttttttcttattcctaatgttgtgcatgtgttatgtgtgattttcctccctcagatttgccaaaggtttggagccaccttttctttgtttaaaaccaaggctttttggttggttttctgcccttgtcattcatttttttaaaaaatgttctttgttccttttttctatctttttgtattgattggttagttttccatctttttggtttttctaatatattttaggactgtgtatttttttctcagtctgtattggttgcatcctactgactttttcatttgtaaaatgaagttgatggaatactcttttaatttctgaaatattttctacatggtagtgttttatagatcagtaaagaaaatgttctgttttacttcataactgttgtttggattctcgttgttggtttggtggtgaacatactctttgcagaacttttccttgtcccacggccatgaaaatttaggcttgcaaacggtttgaagggtgagtaaagcagggttttattgggtgaaaaggaagaaaagggggaaacaggaactctcacaaagctagagtcccagttagagcacatcccgcctgcagcttgaatctcaggttccgcacaggaagaggaggggccagtctcctccctatggaatttcccaaggctccaccttagtgaacaggctggttggaatttctccagggaccccctcccacctggctgtctcaatattgagataatattagcacaatgacgttgctacaatttgttaaccaaatactaatggagagtctgtgtgaaccatactgtaggagacaatgtggaggatataaagatatacttggtccctggtctcaaggaatatctgtaattggcagacctttttggctccgtaattttattccacataggtgaataaacatatgggaagatttaaaatctgatttgtttttctgtgttttgacttttctggtgtttagtaaatcttatcaggactatcatcattctgtgtatctgtaagaagaatcttctgaggtgctttacacaggagatttaagcccacaaagctatctttatggcagaactggactaagatcctgacctcttgattccccagctagttactttttgccatactctctgctgcagtagtgcttgattaatgatttttcatgtgttaaattgggtgaagaaagaagtgtgaaaataaagttcacaaagaatctatgaactccagccaatatctctggcccagcttttctgattctcttgtttcatcctctagttggtggtctggagttgcacatccctaaatacagattgcagctgaatagggttgtgtgaattagcattgcagtattattttggccatgtggattggttgttcttgatccccacaccttccccttaaattaaaaaattcttttccggccgggtgtggtggctcatgcctgtaatcccagcactttgggaggctgaggcgggtggatcacgaggtcaggagttcgagattagcctggccaaaatggtgaaacactgtctctactaaaaatacaaaaagttagccggtcatggtggcgggtgcctgtaatcgcagctgctcgggaggctgaggcagagaattgcttgaacccggaaggtggaggttgcagtgagccgagatcacaccactgcactgtagcctgggcgacagagtgagattctgtctcaaaaaaaaaaaaaaaatttttttttcctttttaaaaattaaatatagaatttaatctttatttaaaaattttaacatttttgtttttttaagacagggccttggctcagttgctcagctgcccaggctggagtacagtggcgccacaatagcctactgcagcctcgatctcctgggctcaagcaatcctacttcaacctcccaagtgggtgcatactaccatacctggctaattattaaatttttagtagagaggaggtcttgctgtgttgtccaggctggtcttgaactcctgaactcaagcagtcctcctgtcttggcctcccaagtgctgggattacaggtgtgagccaccatacctggccaatttttttttttttttaaactagaatttctttttttgttttttgagatggagtctcactcggtcgcccaggctagagtgcagtggcgcgatcttggctcactgcaagctccacctcccaggttcacgccattctcctgcctcagcctaccatgtagctgggactacaggcgcccaccactacgcccggctaatttttttgtgtttttagtagagacggggtttcaccgtgttagccaggatggtgtcgatctcctgaccttgtgatccgcctgtctcgacctcccaaagtgctgggattacaggcgtgtgccaccgtgcccagcctaaactagaatttctaatgggaatttgtcctgtacctatttgtggtatttcaaagaaatgtatttatttcctagtttctttttccccatgagatttttaagttgagttattatatatttgtgccaaagtggttgagttttataaaatactggagaacatatataagtacttctccattgttgcaaaacagtaatctgtaactaccatttgtcatacatgtactcctgtgtgtccaggaactattttaagcacttcatatacagtaccatttattcctcacgcttaaaggaggtattattactctttaggaaaggttcagagaaattgaataattttttcatgatcacatagctaagagttgggattcaaactcagggctatctgacttgaaagactgtgacattataccttttaaatatatttgggattttatagttttggttaaaaaaattcgcttatttctaaaatagaatctatgaagacaccaatttttttgcaccattattttccacaatgtgctagtttttgccaactcctggcttagcatactggctttccctgtgcctacttatacaaaacttgcagcctaggtctactttgttagagatacatcctaggctagagtctgctgctatagtaaagtgtacttaaatgttaaagagaagggtgtggtagattctcttgtttctgtggattccctatctagagaactttgatgcttgtgatctgggctgaactatgagggataataccttgtggaattatattgaaggagtagcttatggtagttggatctcctggaacagattttgctcatggtaactgcagttagcaatggctgctttcttttgtaaagcatttgttgatctctctcattttgttggggttttctccatgctgatcagacattgttgatttccagtgattgccctcctgttgtacttttatttcaacttctataatctgtcctaagatagccattttactttgagggtttcatcacatagcttctaatcattcagttacaggatataaatgccctgttccccccatacagctcaggttttgttagttggcctcaaaaactttggggtgaagagaatgggtataaaaattttagtgcattcagtttagccattcttcttttcctcacccatttgcagaggaagtaacctcatttcctactactcccttccttgtttactttatagcaagggtcagcaaaataaggcctgctcagctgcctgtttttgtatggcctgtgagcaccactccagtgggttagcattgtgagtgttggagaactagcttagctgtttgcctctgttccattctcccctttgcttctagctcctgtcaccctggccagtggccatgctttattgctgcccagacttactgtggtgctgcctacaccagagtaaatattctgcttggcgttggcttggcactaaatggtataatctcagtctggaaattggtgactcagcaaattatctcacctacggccccctggggcaggtgcccacagtagactctccctgagaattttgatctcattggggtagagtaaaactgaccatgttggtcactcctcctgtctccctatggctcctttccatcagacaggtactttttctttggagaatgtctccaggatggcacctgggcagccgtgtgccacaattttgggatggcccaacctaggcaaaaaaggtacagggcagggcaggggtttttcctcttgttatataagtagttacatacttattatatgcttgatttagcctttttcccagcagagtctagaatatcactgttcagaaaaagtttgccagtcctggctttatagccatattggcctccttgctgtgccaagcacacctttaggcgttgttgcctcagacctttagcacttgctgttcccttcttatgggcttgttctttgatagctcctgttcattcacaaaccagaattttaggttttatttttcagagatagaagaaaactttgcattttaccgattcatttgcttggggctagcaacaaaacagagagcaaatagatctagtctttgctttcatggaatttagaatcctttgagagaaaagacaataaacataatcccaccaataatatatcacaaattgtgttaaatcctatgaagaaaatgttcagggacctgagagattataaatggaggggcaactaattttaaaaaggggttacattgactgtatttttttgagacaagatttcacgccatggcccatcctggagtacagtggtgggatcacagctcacttcagccttgacctcctgggctcaagtgatcctcccaccttatcccgctgcatagtccctttgggggactgtaggcccaccaccacacctggctgacgtgtgtatgtatgtgtaaagatgaggtctcactatgtgcccagggtggtctcaaacccctaggctcaggtgatcctcctacctcagcctcccaaagtgttgggattacaggcatgagccacagcgcctggcctagattaactttatcacttctgctgccaccgtggactccattgatccgtgctagcatcatctcttgactggattactacggtagcttcctaactgatctctctacttctgctcgtgcacacctgcagtcagttttctacacaacagtcatggtgactgtatgaaaataagtcatattgctgttttgtccaaaccttttgatgattcacactcttacactatatagtaaaactcagaagtcttacagttgcactcaaggcatcattacttctttgacttcatcacttactattttctcccttgctcactctatgatcatattggtctccttgccatgccagatacattcttaagtaccctcttgtcccagggtattggcacttgattttccctagattggaaattctcagatatctgcttggctcacctcatcacctttttcatgccttttatggtcatgctgttttagagttaaaactttttttcatgtagtcaaatgaccatgttatttaaaacgacaaccttcttacctctcctcatatattcactttattcctcttgtctctttattctccatggcacttaccactgtcttctatataatatttttgcttttttgtcttcccctctaaaagcttcacaagagcacagatttttagatgtttactgctaaattcttaatgtcctaaaactggtgcatagtaagctcttagtatatatttgttgaatgaatgaatgaggaaaactttctttgataacaatgtcagcctagacaatagtgagaaatggtggtaaaaagagtgaaggccctgagcaaggagagcctataatttagtgactcgaatgtatagtgaatatcctgagatgaggctggagagttggatgatagccatatcctgtaagaccttcaacatttttggatgtaattttaagtgtaatgggaatccaccaaagggtttcagtacttaatacttcagagtttatttcctgagtacaaagatattctcctgtataaccatagtacaactttcaaagtcaggaagttggcattgattcattattaccatttaatctgtagaattcattcaaatattgctgattttcctaatattatttacaggttcaggatctaatctagaatcatgcagtgcatttaattgttacgtctctttaatctccttcaatctggaccagttcttcagtttttctcgtctttcatgaccttgacatttttgaagagtacaggctaattactttttagaattttcctcaataaaggcttgtctcattttcttgtgatttctgcatttttgcataggagtaccagcgaagtgatgctgtgttctttctagtgcatatcaggaaaaataagatgtggatttgttctgtagtggtaatgtttatttttatcgcttggttaagatggtgtttgccaggtttcttgaccttacagttaataagcttgttgtactaattagtaaatattttgtggggagatactttgggactatgtaatatcctgtttcattacacacttttcattattttatcatttattgatgaatcttaccagaattagatattatactctgaaaggtaccaaatggtaatttttctaatttcatctagactatggtaccgtaggatagagttttccctattcacctgtttatttacctccgaatggtggtcttttcctcaatgggctcttattttttactgttattttatttagattggttcagtgcttagccattgggagccccttaaagctacctcctgtgcccttttgacatgtcctcatcattttttgagtacttccttaactttctggcatagcaagatgttttagacttgaatattgaattttttcagtctcagcccttgagtcagccatttctctaaggagcacttggctcattttaatgcaaaagattatctgggcagtaggtgtgcttattgctactgtgaagtgttactgcttataggccctcttagcatatacatttaggaaatacatagttacacatttatacttgtttttatttctctctgctacctttaaaaaatgagttaaaaactagctgggtgtggtgacatgcacctgtagtcctggcagctcaggggctaaagtgggcagattgcttgagcctgggagttcaaggttaccgtgtactgtgattgtgctactgtactgcagcctgggcaacagaatgataccctgtctgtaaacaaacaaaaaaagttcacattgatatctccagttccagtttaaaactgtggagttattctaaccttctgccttctcatgtttgtggatttttttttttttttttgagacaggttcttgcccaggctggagtacagtggcgctgtcttggcccactgcagccatgacctccagatcaagtgatcctcccacctcagcctcatgagtagctgggaccacaggtgtgcgccaccatgcctggctaatgtttgtatttttagtagagacagggttttgctgtgtttcctaggctggtctcgaactctgggctcaagtgatccacctgcctcagcctcccagagtgctaggattacaggcgtgatctgctgtgcctggccctttcaggtatttgtatctctgaccttgggaaacttggcttccattatcttcaatgtatttacttaattggatagtttttcctgtttataaccaaactcatagccatgccagccaaaagcttggtctcagatatgttgcccactcctgctgaaaatttgcccccagaaataatcattacaaaaatacccctgatgaaggggtgggggaagtataagggaaaaaggaaaggaggaaagattagaggccagttagaaagcttggcctgacccttttctcctcctttccctgccagacttgctgactgacagctcaccctgatggggggaagtctgctttatattttgtgatcattctggctgctatgcagaaaacaggtcggaaagaatgagaaaggagatggagaggttgtctaggaaacttttggatttctagctgaaagacagtggtagctttgatgtgctgtgtggcagtgctggagacagatagagatgggcttacccaaaacatttaaaagtcggtaaacctgtttttaattggcagtttaccagagatactaatttgtctaatggatacaaacttatttattttagtaagaaatagtatttttaagaaatattttggttttcagagcagatgttagtttgcttttagccaataacagttgataaatatttttctgtggtggtgggtatgactttttgttcatagtttttcactgcatatattttttaagcttctggtttacgtattaaaaaactttttttcatataaaatagctgctcaaagtaagcatgaataatttttgtatcattttaaaccagttgtaattacataaatgcatgtaatatttagctctggtaattattaattctgctctattttttagatattatgatcagatttgttctattgaacccaaattcccattttctgaaaatcaggtaagtcattaattctgtcttaaaattatatggtaatagcacccatttccttctgccaatatcttcactgtctttagagttttatgagatagtgttataaaaataggagcttttagatctgtctaatgcgaatatatgtgcttctgaagaaagaatctcctggaattctgttcatgtcattcttcagtcacttctggggctcatgtagagcaatggtttgtttttctttggacttcattttatgtcagtaggatctgttgactgattaatctgctgtgtcctttcctttgactttttcagaattaggaaggaaactgcacaattcaggaattattagtctcagtttatgtgctttaaaaattattcgcacaagttacatttgcatgtaaaagttgcaaatgctgttttgattaaatgttaattacatgaatgtcaactattttctccttaaaggctagatgttgaaaatgctgataatttcttatagttttattttggagattggataaagattttaaaattagtgatacttttaaattttaaaatagttataagaaaagtactttaaacattcttgtactaaagtttttacaggtgaaataattatatgttgagatttcctttaatatattcctggaaaaaaagtgtaggtggctggaggcagggcaaattgggaggtagatgaaccaagaagggcaaaagactaaagctgctgatggatgtactggagttcattctctttattctctttagtttttctgtatgtttgaaaatttccctaatcaagagtttagaaatttttgtattagattgcaataaataatttaaatgaggtttatttctttctaatctttgtatgtgataatacatatttcaggagcagagagagagttttttaataaacatttaattttcatgtagcatatggaaaagtgaacaaatcacgggtatagcttgaatcttacaaagtgaatatgtctgtataaccaccacctagataaataaataaaatattaacctattccccaaaataaccattctcctacttttgtcatcatggaatagtttttaatttcatcttctaggaaacctgtagtacttacttttatttcccttgcttcacttagcttatttgacaaggatctactacttattttgttccgttgaagtcattgtgtgtttataaagatgaataagatagtgtttatgattaccaaggcagaatgaccatttgaaatatcccagtgccagtattttactttttttagatttcaatttaaaaggagaaggaaaggaagttgggtggttataggagataatattttgagcttttgtcctttttttcatggtggatttttcttcaaagaagacttaatatttaatgagattcaggaaggttacctaattttctgttttctttcattctatccagatctgcttgacatttacctggaaggatgctttcgataaaggttcactttttggaggctctgtaaaactgggtatgtaatttttaataaaagtgataggaaaattggtctaactactttgcattgtttttagtttttaaaattgttatcctaatgactctttgtaaatactaaagttttttacatttcattctctttttagcttcaacttttaatgcaattttgaaatatttgtagagagcccatgccttgccaggcactgtcctagttataaaaatgaataaaaccgatgtacttagtttttgggaagatagttgatcatttaaaagtgtaatatgtaatagcctatgaacaaactcatggaagcatatatgaggaagaaagtaattctaccttttgaaagcagacaatgtttgagttaggccttgaaggatggatttgtagaaaataatattacagatacaaaatcataaccataggtcagaagggtgaggacatttgatctaccagctccagcaagataacctctctgtgccttaattttcttatctgtgaaatggagataatactatttctctcattggattctttttttttttttttttgagacagagttttgctcttgttgcccaggatggagtgcagtggcacgatcttggctcactgcaacctctgcctactgggttcaagtgattctcctattcttctacctcagctgggattacaagcacccgccaccacacctgggtaatttttttagtagagacggggtttcaccatgttggccaggctggtctcaaactcccgacctcaggtgatccacccatctcggcctcccaaagtgctgggattacaggtgtgagcccctggcctattccattagattcttatgtggattaaatgagtgaatacatgtaaagtcctaagaacagtgctttattagctgcaatgaataattatattattatataacattgtaatgtatatgtgatatatgtatatttcatgtatatatgtatatttcatgtatattatatgtatatatgtattatatatgcacatataatgtgtattatatgtgcatatataatgtgtattatatatgcatgtatgtatatatgtgtatataatgtgtattatatatatgtatgtatatatgtaagtatataatgtattatatacatatatgtatatatacttacatatacacacatatatagtatatttgtatacatatatacatttatgtgtatgtatagtatatataatatgtatactatatgcatgtattattcatatacatatatgtatatacatatatacatatatattcatgtacacatatacatatatgtatatattatatataagaaatatgtatatatacacatgcattatatataagtatgtataatatgccttatggtatatcctttttatagtatacatatacattaagatatgctataatatatactatataccttctaagatatagatgtataatatgtattatatagtatgtgcataccatatacatacatgtatctatatatcttatataaggtttatacttatatataggtgaggaaatggaaatatatattttatagtagatattatatataatgttaatttaataataattattgttatggcttgtaaccataggttgaattggggattatggagggtgatgatattagaaagcagattgtggagagttgcaaatattatgctcctgactttgtacttttccctcttatataataatagtgcatgtttattgggcatttattttacccaggtactctggaagggacttcataaatagtcttactgaattctccaatagcttaatgaggaaaaggcactattattgccagttgaacaaactggtttagaaagattacgtgattttctgaagtcatatggttaggatttaatgaagctgggatatgaatctagaaggcctaactcccgggactagagagaaacagaccagtgaggagactgatgagagatgatgaggttagacaagctagtgtgtgcaagttacagaagagagggatttcagacttttcagaggtgaagttgactgaatttgctgactaccagtcagaaggaagagtaagagttgaggcttgactctgagatttaataagttggtttgacctgttggatatttattcctctttagtagaaaggttgactctgatttttctgtgttatgtctgggtagacatttctctggcattttgaaataaaggatttaaagctcagaagagaaagatatacattcgggaacaattattaggtgataataaatttattccttctggcagataattgactgagaaaagtatcaaagtcagagctaagtaatataacattcaggggaaatagaggaagaggttctgggaatgaggttgagaaaaagctttcatatcttacaggaaccagggtaaaatagagatgtgaaggaatgccagaagagtttcaaaggtgatgtggtccagtggttcccaaacctggctgcgtattagtattacctgggaaaaatgttaaaggtttatctttaaagatgaagatacagagtgccagatgtgataggagaaagttttggagtagggcactggaattagtatctttggaaatatctccgggtggccgggtgcggtggctcacgcctgtaatcccagcagtttgggaggccgaggtgggtggatcacgaggtcaggagtttgagattatcctgaccaacatggtgaaatcctgtctctactaaaaatacaaaattagccaggtatagtggcgcacgccttgtaatcccagctactcaggaggctgaggcaggagactcacttgaacctgagaggcagaggttgcagtgagctgagattgtgccattgcactccagcctgggtgacagagcaagattctgtctaaaaaaaaaaaaaaaaaaaaaaaaagaaaatatctccaggtgattctgatgatcatcccaggtccaggctggaacatccttgacagagtcattgtggcagaactcaagtcatgtaaggttggagaagtcactggatttagcagagagaagtttctcttggagtatcctgaataagcatcagattgaggggtgaatgggaggtgagggaatggaaacagtaaatgtgggttgctcatttcaggaaatctacagtaaagatttggggacaaagggagcatcattctgagagggagccaaggtgcagaaaaggatttttagtattgttatgacttaagaaatttggtaggctgagaataaggagcagatggcaggagaactaggagacacttgagtgatgaactcaagtatccagaagaactgggaagcaaaaaattagatcataaacaggaggtggttcatcaaggcatttctagtagcaaaaattggtaattaaatgtccttcagtaatgtcttggttaaataaaaggctactcattcatttgaatattgtgtacttttggaatactaagaataaaaatgcatatatgtatttgttgatatgtaaagttatatcaatggaatattgaataaaaggcctgccttagttcagagttgttgcattgtacaactctagggtccccggaattgggctccttgggacactcctcatacagaactcagagtaattcctcctccctcgagttgtgcactccaggcaactcgagtgtggtatagtatccactttgtgaaaagttatgtgtgtgaatgtttatgtagttatttgtgagataccaaaaaataaattctggttaactctggaagatgagatgttgggtgatttttaattatttttttgtagtttagaaaaattgtttgaattttagaaagctgttattttcatgagttattttcgttttgaaaaacttagaggctggaagtggtggctcgtgcctgtaatcccagtacttggggaggccaagacaggtggatcacttgagcccaggagtacaagaccagcttggggaacagacgaaactctgtctctacaaaaaataaaaaaattagccagacatggtggtgtgtgcctgtagtcctagctgtttagggggttgaggtgagaggattgcttgagcctgggaggttgaggctgcaataagccatgatcacgccactgtacttcagcctgggtgacagagtgacaccttgtctcaaaagaaaaaaaaaagataaaagaaaaacttaaaagagagcaagtaagaaacaagaatacagttaaatacttagaaaggcatctttgaaaaaaaggaaaattaaatattgttttgaaaacctggtttaagtttagatggatagaaaaaaataaaggaaaaaaagataaaatagctcttatatgtaaaatctcataaaagctcttatacatgacaaattgtcaaaataaaatgagagactacagtctggtatgataatatttatgggcaacataatagactgagatatgtatccaatatataaacagtttacttttatttcttgtttggaatatatttcattcttgttttttttttttttttttttttttggagaacagtcttgctctgttgcccagggtggatggagggcagtggcatgatctcggcttactgcaacctctgcctctgaggttcaagtgattctcgtgccacagcctcctgagtagctgggattacaagcatgcaccaccacgcctggcgaatttttgtatttttagtagagacggggtttcaccatgttggccaggctggtctcgaactcctgacctcaagagctccgcccaccttgccttcccaaagtgctgggattacaggtgtgagccaccacgcctggctgatatttaattttgttccttgctctctcctgccacactggcctaatgtatatatttattgaattaattaaaattatattcagaacttgaagatattgatcccttgcttttttttttttttttttttttttgatagggagtctcactctgacgctaggctggagtgcagtggcacgatctcggctcactgcaacctccgcctccaaggttcaagcgattatcctgcgtcagctttccgagtagctgggactacaggtgtgcgccaccacgtccagctaatttttgtacttttaatagagacagggtttcaccatgttggccagaatggtcttgttctcttgacctcgtgatctgtccgcctcagcctcccaaagtgctgagattacaggcgtgagccactgcacctggccaatcccttgccttttagtatctagtgttactgatgaaaagtctgatttttgttattttataagtgatctgtttctttgctcttgggaatatttttacagtcttctctttatctttcatgtttagaaatctcaaaagacttaatgggatttcattttattcgtgtgtagggcatttctttttggcccttttagtttgaacacttatatctcccttaagctctgggaagttttcttatatttctttgataattttcttgtctcttttgtctctctttctttggaatactttattagatgttggttgttctgagttgttcactcgtaatttttatattttttcttgactttctgttctttctgagattgcctagatattaattttaaaacttgaaaaaaaattttttttccttcctccgcccttaaaacttttgaaaaaaatttaacaatcaagtttttaatttttaggagctttgtcttattaatttaaaaaatccttttcttttatggatgtactgtctttgaatctctttaaggaatgctaattgtgatatttggaatataatcttttatgactggaattgtctttatttattttgggcttagtttttcagttcgcattgctcttcctttattttgctgcaggcttttttcacaacctggttattttggattttccatatgtttaataaagtaggttagagtagctggtgtttatgtctgctttagtttagaatgaggagactagaactggtttggaagcaagttgaaaactggcctttattacctaggaggccaccaaagtactgtaacaaggagggctttactttatggtacaactctgtggcacaaacatacaaatgtagtgttgttctgattctcctagattggtttgttcagtgttttttgtaaggagccttattttgcctagtggtcaatgccttgcacattatgcaagatcttgaattccaaactgattgaattctgtgagtaatagggagctattgtagattcttttttaaaagttatttttcaattgtgatacaatatacacaatatgccttcttaaccattttaagtgtacacttcagtggtattaagtacatttacattattgtgcaaacatcatctcgagaactctttttcatcttacaaaacaaactctgcccagtaaatgataacttcacagactgggggcggtggcttatgcctgtaatcccagcattttgggaggccgaggtgggaggattgcttgaaccaacgagttcaagaccagcctaggcaacatagtgagtccctgtctctacaaaagatacaaaaattagccgggtatggtggcctgtgcctgtagtcccagctactcaggaggctgaggcaggaggattgattgagtccaagaggtagaggctgcaatgggtgtgattgcactagtgcactccagcctgggtgagagaatgagaccctgtctcaaaagaaaaaaacaattataatgtcccattcttccctcccccctcaacccttggcaactagcattctttcagtctctgaattaaactgtaggtacctcatacaagtagagtcgtagactgcatttaaaaaaaatttcacaacatgaaatttattatcttaatcatttttaagtatacagttcactagtgttgggtgtatttcatattgttgtaaaatacatctccagaactttttcatctagcaaatctgaaatattgtactaattgaacaacaatccccctccccctaccaccatccctgataaccatcattctgatttctgtctctatgaatttgattactctaggtaactcatataagtggaatcatacaatatttgtctttttgtgactgacatttcatttagcttaatgtcctcaagattcatccgtgttatagcatatgatttccttcttgttcaaggctcactaatattccattgtatgtatataccacattttgtttatatattcatcagatcacagacacttgggttgctttcatgtttggctttgtgaataatgctgctatgaacatgggcatacgtatatctctttgagactctgctttcatttttttgggggtgtatactcaaaagtggaattgctggataaaatagcaattctatttttaatattttgaggacctgccatattgttttccacagcagttgtactttttctaatttttattttttattttgagacagggtcttgctctgacgctcagggtgaagtgtagtggcatgatcatagctcactgcagccttgaactcctgggccctagtggtcctcccgcctccgagtagctaggactatagacatgcaccaccatacctggctgtttaaaaacaattttttttttttttgttgagatggggtcttgctgtgttgctcaggctgacctcaaactcttggcttcaagagatcctcctgcctcagcctactaaagtgctgagattacaggagtgagccaccatgcccaaccacgagtttgcgttcctgccaacagtacaggaaagttccagtttgtctatatcttcatcaatgcttattttctgtttgttttttaataggagctatcctaagtggatgtgaggtgtgtagattttttttttttaatcagagttgggttttagcccagctaacctgctagccctttgagaaatgtatttgcatgagggagtaaagcataaggccagctaggaggtaattgcattgacttagatttgtggtaatgaggaattggtttgattgtggtgggacaatgtgattttgagaggtgacagaaaaatggaaataatttattcaaatttaagaaactgagagaaatgacatgaaaatgacttttacatttgaatttgattgtaatagaaatgtggaagtaaagggaaggagagaaagaataacttactgttcttcagcgttttgggtgatgggaatattgttgtggaaataaatgcctgtaagggcagcttgaaatatgggagcatatgacagcaagaaaacaggtctggaaacttgtttttgtgagagtcagcgggatgagagaggtcatagtatttctctttgaaacatttgttttctttagaaaaaataatctgatgaatttttccttctcaattttttacagctcttgcaagcttaggatatgaaaagagctgtgtgttgttcaattgtgcagccttagctagccaaattgcagcagaacagaacctggataatgatgaaggattgaaaatcgctgctaaacattaccaggtatgctgaaaagtagttactacaataatggtcaacactaaattggattaagtggaaaataatttgcatttaggtttatagatacttcttacgcaacagatgttttctaaaacgaatgcacttttaaaatgaatttattcttactgttaaagcccttagataaactgtctatagaccaggtctgttattcctcattgttttataccgagcacctagcacagtgcctggcacataatagaggctcaataattgttggttgaagaaattatgaaatgtctgagatttcatctcaggcatttagggtaaatccattttaaataaattacctaattaaaaaaaatttgtacattattttcatatgttttcttagagtgagacacacttgaaatttcactgttgttacaaaaataaagacaagaaattggcaagaaaataaaattttaactttgagacttgtggagaggtcatatttaaatatggtcagacacataatgttcataagttgcctaatctgttttacgtactgatcatttactaatatggcatgttattttgtggcagtttattttattttatttatttatttattttgagacggagtcttgttctgttgcccaggctggagtgcagtggcacaatctcggctcactgcaagctccgcctcctgggttcacgccattctcctgtctcagcctcctgaatagctaggactataggcatccgccacctcgcctggctaattttttttgtatttttagtagagatggggtttcactgtgttagccaggatggtcttgatctcctgacatcatgatccacccacctcggcctcccaaagtgctgggattacagatgtgagccaccatgcccggccagcagttgtttattatttattcagcttttttttgttttggttaaaagaacagtaaatgattactgttaaataatatatatataatcatgttgtcattttatattactttctaatttacaaagtgttttcatgtacattatttgactctcagataaaccttgtgatgtatgtcatataatgtcattccgattttacatacgaggaggctaaaggtccgaagtcttaataaagcagtctatttgggtttcaatagttctgattccaaatttcatgtaattccaaatgtccttccactgtttcactcccaaacctcccatgaaatttgcttgtctcagaggtagtctgctttttcccgttgtttatgtttagggaagaggtgagtgatgctgttctgagaaagtaaaaggaaaatataccgtaagcaaacaacacgctccaaattgtggcttgccttacagttttgaatgggcatagatgacaaacataatgcatacgctatttctttttgaggctatacatggcaaatattttaaaatgtgaaaacgagctgggcgtggtggctcacgcctgtaatcccagcactgtgggaggctgtggtgtgcggatcacgaggtcaggagttccagaccagcctggccaacatggtgaaaccctgtctgtactaaaaatagaaaaattagctgggtgtgatggtgggcgcctgtagtctgagctactcgggaggctgaggcaggagaatctcttgaaccgaggaggcggaggttgcagagagctgaggttgtgccattgcactctagtctgggcgacaagagcaagactctgtctcaaaataaataaaataaaatacagtagtgaaaacgaagtaaaattttatttagcttttggttaactgtaactcagttagttagtatatgagattttagaaaggtcattctgaattatgaaagaaacattccattctgtgagggttcacagcagggcacctggtatcatggaaagataactggtggtattagacctaggtccttgtctaggctgcttgccacccagaagctttgtgccgttgggcaagttctttaacctctctagtacctccagttccttatctgtaaatgagagactcagacactttgctgttgtagactttgattcactagtttactgaacaagttcagttgttcattcctagcagatactctagtgttataatacttactgactgcagaaacatgctgttcattttaatacatttgactttgagttttctctgtgttgtctatttatctaactcatgacacctttttttttttttcttttttgagatggagtctcgctctgttgcccaggcaggagtacaatggcgtgatcttggctcactgcaacctccgcctcctgggttcaagtgattctcctgcctcagcctcccgagcagctgggattacaagtgtgtgccatcatgcccagctaatttttgtatttttagtagagacggggtttcatcatgttggccaggctggtcttgaactcctgacctcaggtaatctgcccacctcagcctcccaaagtgccgggattaacaggcgtgagccaccgcacccggccaactcatgacaccttttaatcccagactgatttatttctttttcttagtataatttgtttcatgaaagcaaagttattttagtattaacaaaatataattgagatgaaaaatctgatggggaacatttcactagtgagctctgaaggccagacagaaatcactggcaatgggtagtaatgctgttcctcagaggactaggtgtatgtactacctggggtgtcccctaactacggcatgtttaattatttgaaagatgaatttgtttgggaccaaagcaagagcattgcagtactaaaaatattttaatgtttatccccgcctctattctcatgttaattttgaggaagtatatctaaaaatagtttaatcagattgttccattagtttactttgtttttccttgtaatttacttttaatctttgttaaatctcttgttacgctatagagttttagaaagataaccttattgtctgtaggtcagatgttttagattggttttgcataatataaaaatttaaatatattaactgttcactgagttaacatttgaaatgacttttatatgtaacagtaggaaattaagtcttgctgagttcctataaagaaattctttttcccccctttagtttgctagtggtgcctttttacatattaaagagacggttttatctgccttaagtcgagagccgaccgtggacatatctccagatactgttgggaccctcagtcttattatgctggcacaggctcaagaagtattttttttaaaagccacaagaggtaactccaatttatctttttgttgcatgtgaaaaaaagtgataaggcttttaaattaagaaagtgattagaatataatatgttcaatgtcgagctgtccttcttgaacttgatacatgaattatggaaaattttcagctatccttttctgaatttgtggcacaaatttacatttaagaatgtaggctgtgtttgaagtcatgaaatagatctttagtaattgtctttaaacactccattctggaatagtatttatgtatgtttttaacatgtcagacatttattcgcaaatatttattggatacttactctgtgccagtcactgttctagtttctagataaacggagttagaaaacaacttaggttttggcgacgggagagatgataagcaagaattaagtagacaggataatttcataaataattgctataagatttcagaaataattgctataaaaaataagagaattatatgatagtggctggtggtatggttatgggatagggatataggggaagctgggctaattttagattcattagtcaagaaggctttctttcaggaggtcctctttaaagtagacctaaatgacaagaaggagtcatccaggcacagtccctagccctgggaatgagggaataagaataattcttataaggcatataagttagcatgagagattgaaaatgggctgaatatgtaatatgggctgaaactgaaaataagagataagtcatcatgtggaagaaataggaattggaatacttttttcttttaaaataacagcttatattgagatagaatttatatacactcaagttcaccctttctaagtatacaacataagatttttagtatattcatagagttttgattaccactatcttattttagaacattaccatcatcccagaaagaagccatgtacccattagcagtcactcctcactcccctttcccccactgctggcaaccactaatctattttgtctgttctaaattttgtgcagaaaatgtgatttcatcaagaaagatgttttcagatgcgtgtacaaacttgtgacctcagtgtttatactgagacatgtcagattagctcatatttattttaattataatggtcatattgtattccagataaaatgaaagatgccatcatagctaaattggctaatcaggctgcagattattttggtgatgctttcaaacagtgtcaatacaaagatactctccccaaggtcagttattgtttttataaacacttgcttactttgcatgtgaaatatttagacttttttgtgtataagaagcaagttgaaacttataaagaaatttgaagttttaatagagttatctgaagtatatagtagaaatagtttttttttttttttaatttaagatgcatgaacaattcttttatgtttaggggatgcctttgtctttaccttttactaaacttgtttttccaagctagaactctttctggaaaatgttgaccatctgttttcaatacttttatcaaatcaaggcattgtgtagttctgaatcattggtgatttggtacaagcatgtatacttgagcatgttgatgattcacacttttaattattgtcctgttttcttaaagatgagccttaaagcgcaaaaacagacataaagaaaaaaggaaaagaaaacttaacaaattcatctgatactttgattagaattcagttttgccaacagggataaaaaattgggctgctaatggacagctaaggaaagcaaccatcttaaaccacatatcacaggaagtataatgttttaatgtaaacctttctgaagtgacaattgtaaagactattcagtgatgatcatttgttaatgacaaagcaaatcactagtaaatttggaatgattaataaagaaaacttaaagattgagtgaaatatatgtttcaactacttccttcagaaatgttcaaggaattagtttcatcatatggtatctgttacatgattttttttggtaggggaatttattgatttgtaagtcatattcaggaatctttgtacattaaaaaattgcagacaacttgggggtgaagtaaaaatgcacataagtgcattaacagtacttattactcagaaaatgatcaataaggaattaatgtgacgattcctggggatttaagatacaccaagagcctagtagaaatttgcccaggattcttgggtattaacagccttcctcttaaaaagagacttgggatctcctctcatgtttttttcatctgaaagacctcatgttcagctgcacagtgttccgttacatcctgttgggccattagttcagtcctgtcatggagagaagaaagtcacctacaaagacttggaagctacctctgcagcattcctggtattccttgaaaatctcctgtttcagaaccaagttgctccagccttaccttgagaactggcatgagtgtagtttgaaatttagatgtcttttattttttcctttttactaataaagctcataaggtattttcatattctagttataaaactgaaaagtctgcaagtagtgatccaggaaggtaggaaattattccctgggagacaggaaagcacacaaggtagtaattcagtttttgattctcttacattttttgtttagatagtgattgtctagcctaattccttggatttttttaatatcatatacttcctaaaagcagtgaggttacaggttagattttgacgttttggaagagccaccactagtataattgctttcctgctttatgtctttggatcttttgaaattaattttgactggaattattttcaaaacaaataggcaaaataacactttatcattatcattggtcatatacttagtgcatttgtctatgatatgtttttgagtatatgacactgaaatattagtgtatctatgatactaaatcatttttatatggctaaaatcatcttcagtaagaactctcttaggatatgaatttaagtgaaaatttactgtcttttttttaaaacatgatgaaacagtaatctatagagcaatttcattagtatatgtgagtaatgatggtttagttaactctacaggctgggtaagggctcataagaaagcttctaaagctctgtgctttgtgttcctctgtgaatgtccattctacttctctttctaataatgcatgcttttctttttgtaaacaaaatgttgacttcatggatcaattaaagagaattgtaaaaacctaaattggcttcagttaacagttaaaaaaaaccccttcaattggaagaaaaaaaatttaattcatagatttcaatccacacaaaatcatgtcgtcttctctgtttacacctaatgactaaccttaatctctaaaccattaatggggtgattctaatttctgtcttcttttcctttttcttcctgcatcccatgttgtctgtggtggtttgtgtggttggactctcccctggtcagtatttttatttccaggaggtgttccctgtcttggctgcaaagcactgtatcatgcaggccaatgctgagtaccatcagtctatcctggcaaaacagcagaagaaatttggagaagaaattgcaaggttacaggtgagtctcttggtaataaatatttaagtaactaacttggatctctcttttttttcctagtgagatttccaagtttgcccataaaaacctttcccgttcatcacccctatcagcagggacaagtgattgtttttatctttagactttactgcatgtttttttgaggtctcatattttatctaaaaaatagatgcaaaatttgcattcaattctcttttttatccatgtttattttaatgtaaaaataattctaaattaattgccatctccagattgtttttgtctttagactttactgcatggttttttgaggtctcatattttatctgaaaaattcatgcagaatttgcattcagttctcttttttggtcatgtttattttagtgtaaaaataattctaaattaattgccatgctccaggagtatgtgtagtgtttaacttgtggcctggtctttgtctaaactggggcatatacttccacaacttgaggacgacagtggagagatgtgtgtgcatatatatatatatacacacatatatctcttgtgaacagcagagtaccttctatgcagttgtgttcatactgttggcattggggttgtcagaaacttgctgtgacattatggcacctgaggcaacttgccagcaggagcaagagctgtttgtatgagttgtttgtgttttgagtattggtagacagaggatagaaagatgacttatggcatttgagttagggaagtttaaatatgtactgatttttagaagatactatggatgtcttggttcattttgtgctgttatagcagaataccacagactgggtaattgataaagaacagaaatttgtcacaattctgaaggctgagaagtcgaatatcaaggtgctggcatctggtgagggcctttgtgttgtgttacctgtggtgaaaggtagaaaggcaagagagtgctagtgagtgagagagagcaagagggagccaaactgctcaatgaagcccctctcttggtaactaaccctctcccatgataatgacattaatctattcatgagggcagagccctcttgacctaatcacctcttattatgcccccacgtcccaacactttgggattgggaacacatgaactttgggggacacattcagaccataacaatggaaatgttgtttaggaggttcagattaattaattagccttttcatgggaaaggatctcacagtgaccaaatcagagaaagtctttttaaaaaagtcagacccagatgtgtctggggcttcactttgattacagtaacttagatttatatataaaaatgattctgaacaaggaatttgtgggaaggattctttttttaaggctagcatatttaaattgtaagtttagtttctttattttctggtttctgggactattagatttaagtaagcccatatttagtctctataaatcagtcagagaaagaactccttttgaaatttaatctcatttttaagtacccctgaaaaaggaaactatttcagattcacacaatgggagggaggtaaatacttttcctcagttatagacacatagattttgcagctttagttttacagctttagttataggttaaagttaagacagaagttgggtgtgatggcacctgcctgtagtccagctacttgggaggttgaggtgggaggatcgtttgaagctagtagtttgaggccagcctggacaatatagtgacaccccttctcaaaaaaaagttaacacagaacacactcactgatccatatttcagaggacagttattctttccggtaggcatgaaatattttttaattgatttgcactcccaagaagacaaacagaacagacaagaagttgaccaataaaccatattcgctgtagtttctcacttagtagagaataataccccatgattctgacggagatcttaggaggtcacactattaaaccaactttctagttatggctactagcaaagagaaataacttattggtcctgtgcaaaccagaaatgaaaataaaatcacaatcaggaaaatcaaaacaatagataaaatggcagcaaaggtaaaataactgcttggaatcaatcacttctggggccaagaaaaattgtacctgagcttaatacagctcatgagttgcacttcttgaacagtgcagtttatgtggccccagaagatggatcttcttggtcatcttggtggatcttcaaagatgatgaaatacagttttcaaaaagatacagaaacacacacacacacacacacagatataaaaacatgactcacatagaatgactacatgtcaaagatttatttgactcattaatgagggacctagcaagattgtaaatctgattttgtgcaagtattgttttcttagttatggtactaggttgtaggtattaaggagattgtcattatagaatacttgctgatgtgtttagggatgagggcttataacatctaacttcagtttcatgtagttctgcaataaaagaaaaaatagtacttaattatgtgtttgtatgggaaaggaatagataaagcaaatgtggcaaaatggtaattgttgaacctagctaattattttgtgggcttgaaatttttcaaaattgggaaaataggtatatataaggttatatagttcaattcctgttcctctttttccctctatcctgttccctccatccattattcctactgccccatagttaatttccattaatttcttgttttttttctttctttgaaatagaagcaaatatatacatagacagcacacacacacacacacattgcacattctcacttgtcattcttactgaagtggtagtatgctattaatatatacagtgttgtgtaccttcttttctcatataacaatgtatcctgaagatctcttcatcttaattcagcaacagggagaccatccttagagctgcattgtacttcactgtgtaagccacagtttattgctgtctcctgttgctggatacttgaatgtttccaagatttcactgttataaacaatgctacagtaaaaaatcacgtacacaagttatcttgtacttcagcaggtgtcttagcttaggctgccataagaacaccataaactgggtggtttaaacaacagaaatttattttctgatagttctggagcctggaaatccaaggtcagggtgccagtatggtcatattctggtgagatttacagatggccttctctctgtgtcctcatatggtgaacagcaggaggaagccctctggtgtctcttcttgtacgggaactaatcccctatgaggccccaccttcatgacctcatctaaaccccattattttccaaaggtcccatgttcaaataccatcacattaggagttagggattcaaaatacgaaatttggggagcacagtcccgtacatagcagcaggtatatcttaaataaattaatagaaatgggattgccaatagcaaaatataaatatgtctgtaatttgttacatatttggattgttgatccacttggaatttatcctgatgtgtggtgctagatatggatccagtttttaaagtcttcttccaaatggctagcccattgtccccaaaccatttattttataatagccttgtttacctcactgatctgacattctgactttatcacacattagattcacggtatatattgggatctatttctgcttttattgtttcattgacttgtttatctgttcatactccagttccatatcattttagttatttatacttgagactgttttaatgtctgataggtattatctctcattttttgaatttttctgcctgtccttgcttgtttcctaaattttgtcattttctgggttttcctgactattcttgcatgtgtttcttcatatgaattttcttttgtttaactatgatggaaaacatatataaaagtgtagttgtgtaactatgatggtcaaacatatataaaagtatgaatcattgaacttctgttacccaacttaagtgattatcagtatttcgctattttgtgttttagttatttctcctttcctcatttttttggagtattttacaactatctcacgtatcatttcattcttaagttttttagcctgtgtctctaagagataaagatttaaaaaaattaaaaaacaaaaatttaaaaaattaagaaattttgctagatgggtcattatcccaatctagcaaaattaatattaatattaattagtagttaatagtcataatccagtattatccacatctagtttagttttccctgatttttttctcaggggtcttggtttgttcaaatcaggatccacacaaagtcctcactttgcatttgattgatatgccctctaaatctttaatttgtaacagcctcctccttcccaacttctgtgttgttttcttcactttttcttgttctgtatgttttttactatgatttctgtgatgtctgttttcccttttgctccttgtataaatgtctcagtcttgctttcttaaataaatttgtatttttctttacttttgtgagttctgtcacttcctgtttcatattcttttgctatttggctatcactcactctggtttgggccatccagtcctctgttcttttggtactgtcattgtgttcttaagtgttttagtttagtttagtttttagcatgctgttttcatctgctttgcggcaatatttctttggtgagctttcattatctactggaaagatatactgcttgttttcagttttttccttatggtttttttgtattgagagatgagttgacttttcagttacttaggtttgaatgagattgattttgctgggggttcctgtgcagggaaatgggcaggggttagctttacaagcatcattgtgttaagggctccctcctaaggtccacttctctggctcttaaagcctaccctggattaggaagaatcccactacctctgtacctgtgcttccctgaattcctcacagcctttgcatttcaagttgatgcatctacttttagggtttatattttgctggcattttctgagtgcttatgccctttcttctccctccctacttttctgttctctctttctgctccccctagcaaccctgtctttttagttaatctgtctacttctttttctcaccagctctcttgggatgaggcccctcagcatcacatttttttctgtggtcccctggtggcatgataggggccagttggctttgcctttaccgtcacctggcaaggttttctcatcctgttttgttgttttcagatttgcttaaagtaattttaacttagggtggcacccttagcacttccctttcttccccctctgtgtatagcgtacctacggttctggtactagtgtttgctatttgggggagggttcaaccacatttacaaatcaaatttgatttacaaatttaaaaagtgatttaaatttgtgcaatttcccgtttcctagtttacactgaagggtagcttttgttttgttttggttatctttctctaagcatgataccagctttggaggttaagatttttatcatgttaaggaactataatttctattttacgaagattttaaaaaatcaagaatattgaattttatcaaatactttttcaacatctatggagaaatttgattttttaacttattattttggagaattatataagtagattttctagtattaaaccatttttgtattcttgttattttggtgttttagacttgccttatctcttcatctggtcattttatagatgtagatgctttctatatgcctgagaatataatgtgttctctatttgtggagtctagtgttctctatgtctggtaaaccaaactcgttaattgtgttgctcaaatcttctataatcttacacttttttttaatctggtccagccattgctgagacagatatgttaaaatcttccactttgattatgggtaaatgtgtcaatttctcattataattgtttatatagatactattacatgcaaaatataagaaattttacatctttctggcaaattggcaaatattaaaagattatgtattatatttatccctaataatgctttttattttatatggtgtcactatatctaataccacctaaatttgtatgcggcttatgttcatttttttataaggccaaacttaaaaaaaaattcttattgatgttgacatgttgttcacttcctgtgttgttggataatttttttcagatccaccctttcactgagagttaggccgtttgaggttcctgccttcatgtgaaggagtgaaagaggtgcatctcaattctctgtgttgtgtggtttccagacccttgtttcagttctccatgagggcctttaataagttttaattgctaattctttggatgtagaaataacccaacagccagacagggcacagtggcgcaagcctgtaatcccagcactttgggaagctgagttgggcagatcacttaagatcaggagttggagactggcctggccaatatgatgaaacccgatgtctaccaaaacatacaaaaattagcttggtgtgggggtgcacgcttgtaattccagcttcttggaaggctgaagtgggagaattgcttgaacctgggaggtggaggtcacagtgagccgagatcgcgccactgtgctccagcctgggcgtcacagagtgagactctgtctaaaaaaaaagaaggaaaaaaagaaagaacccaacagccagctttcttcaatgtcagtttatactgatgggctcatggatttcttttattatcttgataatctgcctgtgtgtttatagagatagctgttatgtattatccttcagttttcgggtattttgtgatcggagaatttccaggtaaccctgtcagccacattgctggaaatgcaagtcttcagattaaagattttttttttgaaaccaatgcttaaatacttggtggggaaagagaaataaaatcacctccctcttttttttttttgttgttgacgtttttctttttagcatgcagcagaactgattaaaacagtggcatctcgctatgatgaatatgttaatgtgaaggatttttctgacaaaatcaatcgtgcccttgctgcagcaaagaaggataatgacttcatttatcatgatcgagttccagaccttaaagatctagatcctattggcaaagccacacttgtgaaatctaccccggtcaatgtacccatcagtcagaaatttactggtatgtcagttattcagacacactttaatctcatttttctctagtttactctgtttttcctagctaaaaatcacataattgctgttgtatgctttgaatataatttgtattcatgttgtttaaaatgaatatgagaataaatattgtgccagtgcaatgttaagatggaaagtaaacaataataaagcatatgtaaagtatacaatagttagaagacttgaaactgtgtgtttgattaagactgtagcacttgtcattttgttaacttttgttatttaagatgctgccattaaaaataaacaaatatggctggatgtggtggctcacacctgtaatcctagcactttgggaggctgagatgggtagattgcttgagctcaggagttagagaccagcctgagcaactggcaaaaccctgtctctaccaaaaaaaaaaaaaaaaattaactgggcatggtggtgcatgcctgtggctttagctactctggaggctgaggtgggaggctcgcttgagcccaggaggtggaggttgcagtgagctgagaccgtgccaccatactccagcctgggtgacagagagagatcttttctcaaaaataaataaataaataaataaaataaatataaaaataaaccacaaaaatatatatttttttcttttcttttttttttgagacggagtatcgctcttgttgcccaggctggagtgcaatggtgctgtctccctcactgcaacctctgcctcctgggttcaagtgattctcctgcctcagcctcccaagtagctgggactacaggcgcctgccacctcgcccagctagttttgtatttttagtagagacggggtttctccgtgttggtcaggctggcctggaactcccgacttcaggtgatccacctgcctcagcctcccaaagtgcttggattacaggcatgagccaccgtgcccggcctatttctttaaacatgtaaacttctggagtggtatttgtatgagataaatacatgttattatattgtagatgtatacaacagatggtagcctctagctgagattccaaggagaatattctgttactgggaaagggtgattatatgtttatttagcaaacacaaagtgtttaccatgtgccaggcactctttaagcactttacaaatattagctcatttgttttcagaagtgccctgagatgggtactgttattatccctatttgatgaggatactgatgcacagagtggttaagtaatttcctcaaggtcacatagctaggaagtgttggagccagaaatggaatcctgctgccgtgacccactcagtcaattttttttttttttttgagaccgagtcttgctctgttgcccaggctgtggtgcagtggtgcaatctcggctcactgcaacctccgcctcctgggttcagacgattctcctgcctcagcctccccagtagctgggactacaggctcctaccattacactggctaatttttgtatttttagtagagatggggttttgccaagttggccagactggtcttgaactcctgacctcaggtgagccacctgcctcggcctcccaaagtgctgggattacaggccttagccactgctcccggcccctcattcagtttaatcaacagatgaacagtgtcactgaagatccctcaaactcagtgatgaacacatctgaaaaagaaagaaaattaagttcaaagaagaaacttttcattgttgccgttgtccatgaatgtagtgatctaaaaattctctttatcattgtgctttaaatagtgatttagttttgatctttaaatgtcaatagacaataaatatttatagactatgtgaatattggaaagaaaatataaacagtcacttttacagttcgggtttttgtctaaaaattttgttgtaatttctcttcctaattttagatctgtttgagaagatggttcccgtgtcagtacagcagtctttggctgcctataatcagaggaaagccgatttggttaacagatcaattgctcagatgagagaagccaccactttggcaaatgggtaggtagagcttaattttagagcctaaagttttccgtttggttgttctttagtttatgaacattttagtttctgagcttagagctaaatgtcaagagtatataaaatagaaaatgtagacacacacttacaactatttttgttggacactgtatttatgaagctctagcaaatatagttggaagaaattatagaaacaaggtgaggatatgaggactaaaaatttgtattttaagaggtatttatttggaaatgagaagtagaaatgaactcagatacatggtacatttagtgttctgaaccaatttttgtttctgatggactgaatactaagaaaataattcattggtttaaaaaatttttaggtatattttacacacacaaaatacacctattctaagtgcacagttcaattattatatgtatatgtgtgtgtgtgtgtgtatgtgtatatatatatatttatgtatatatatatattttttgttttttgggacagggtcttattgtcaccaggctggagtgcagtggtgtaaacactaaacatggctcactgcagtctcaaccttctgggctcaggtgatcctcctgcctcagcctcctgtgtagctgaggccacaggtgcaagccaccacacctggctaattttttgatatttttatagagacaagatctcactttgttgcccaggctggtcttgaactcctgggctcaagcgatcctcctgccttgacctcccaaagtgctgggattacgggcatgagccaccatgcttggtcatttagttagttttgataaatgtatgtacccatgtaaccggcactatgattaagttagagaacattactgttaccctaaaaaaattctctcatgcccctttcccagtccttcttcttttagcccctggccgctattgatctgctccctgtcttaagtttagttttactttttatacaatttaaaacacgtgtaatcattctagcatatgcatatacagtacttacagtatgtacagtatatacttagaatgtgttttgctttttttcacttagctactgtttttgagattcatctatattatgtgtatcagtttcagtcttttctatggctgagcagtattccattttatggttatagggcagtattccattttatggttatacggcagtattccattttatggttatagagcagtttgttaactctttcacctgttaatgggcatttcagtttctgtgaacattcatgtataaatcttcgtgtggacatattttagttctcttgggtaaatacttaggagacaaattgttaggttgtgtggttagcatatttaattttatacaaaattgccaggttgttttccaaagtggttgttccattttatatcctatctgcactgtttgaaaatacaattgttctgcatcctcaccaatacttggtatgtcagtctttttagttttagctactttagtgtgtgtgtagcagaatctcactgtgatttagtttgcattctcctaattgctaatgatactgagcagcttttcatgtgcttactagccattcatatattttctgtaaagtgtctattgaaatctttttctcagtttttaaaagtgagtttttcttaatagttaaagacttctttacatattttggaggcaagtcctttgtcagatacatataattgagaatataggtgaccctgaacaacatggggttatggatgctgacccccctgcacagtcaaatctgcatataacttctgagtccccaaaacttaactactaatagcctgctgttgaccagaagccttaccgataaacagtcaattaacacatactttgtatatgtattatatagtatattcttataataaataagctagagaaaaaatactattaagaaaatcataaggaagagaaaatatatttactatgattaaatggaaatggatcatcataaaggtcttcatccttgtctatttcaagtttgagtaggctgaggaagaggcggaaggagggttggtcttgctgtcttacaggtggcagaggtgaaagaggtgaaagtccacaggtacacggactcatgtagttcaaatctgtgttgttcaagggccaactgtatttctcttgtagttggcttgccttttcatgtttttagttttgattaatgcatggattttaccatcatttttctctaacaagaaaggaatgtaagtttactctagcatatgataaacaggcagtctgagattttacagagcttattttctgaggagttcattgtattacatcatttcatttgcctttttgtcgttacatagtagatagggatatgtacctcccttcgccatcatgtaactgaaataactgaggaattgttattgtgctacaaaactgagaacagatgaagattctgtaatgaatacttagatcatctattttctgttgacattttgcctagatgatgtgaaattataactattgattctgttgaaagagagcaaaaaagaaaaaaataactattttgtgtattgtttctgacttgttagagatgctgtaacaatcaaaagtataaaagactgcttttttaggatagaatttttgacttttaattacttagactgaaagaagtttgaactgtaagccgacgatacctaatatattttaatgcggtcatagtttttcttattttttgacttttttttttttttcccccgagacggagtctcactctgtcgcccaggctggaatgcagtggtgagatcttggctcactgcaaccttcgcctcccggcttcaggtgattcttgtgcctcagcctcccaagtagctgggattataggtgctcaccactacgcctgactaatttttgtacttttagtagagatggggtttcaccatgttggccaggctggtctcgaattcctgacctcaggtgatccacccgtctgggcctcccaaagtgctgggattacaggtgtgagccactgcaccagcctattttttggcttttaattctgaattgtgggcttcattttttaatgattttggtttaattttatcaatcactgattttttttgtttttctgttaatctttgctttgctttttttttttttttttttttttgagacggagtttcgctgtgttgcccaggctggagtgcggtggcgcgatctcggctcactgcaagctccgcctcccgggttcacgccattctcctgcctcagcctcctgagtagctgggactacaggcgcccgccaccacgcccggctaattttttgtatttttagtagagacggggtttcaccatgttagccaggatggtctcgatctcctgacctcgtgatcctcccgcctcggcctcccaaagtgctgggattacacgcgtgagccaccgcgcccggcctttgctttgcttttaattgatagggcttatccagtttttctgggtgctaactccattgctgttgatttggttatagaatactaaattaaataaagtaagtattgatgaggagttaaattgttttagacttcagtataacatagtatctcattttttcagggtgctagcttcccttaatcttccagcagcaattgaagatgtgtctggagacactgtacctcagtctatattgactaaatccagatctgtgattgaacagggaggcatccagactgttgatcagttgattaaagaactgcctgaattactgcaacgaaatagagaaatcctagatgaggtatgttttataagatttgcttttcaagtataaacactgtgatcccttgatgtccagcagggattgggactggagacttcctcatgctagtacagtgtagttagtattcatcactttggtgaatttactgtggcccagagccttctctttagcataagagaaattctggttgagtgagaatgggtttcattcttatcttaagggtaagtaagtacacactaatgaaactcaaatgaccactgtgtaaaactagtatactgtgagaaatcaactgtcatacaaactgttcagtctttgtaattattgatttattttatgcatagcatgtagcaagatttttctttttaatttaatttgtcttaacctggaaggttaaaccctttaatttatccctaatttcttaaaatatattaaatatatttgttttatattatttatcttataattccaatatctgtagtttttgtgggtttgagtctatgatttgtaatttttgctgattcttgcttatggtggcttgttttctcttgtgttcagtttttttgttactgttttttaaaactttaaaaaatagtttcagatttacagagtctttgcaaatttagtgtagaaagttcctgtatatttttcacctagcttccctgaaagttaaaatcttatgcggtcatggcacatttgttaaaactaggaaattgacattggtacagtattattactcagattttaccagttattccaccagtgttcctcattctgttccaagatccagtacagaatactgaattgcatttagtgttcagtgagttttgattgtgcattcatatttcctgtacttatttgtgggaattcattgagatctgggtttaaggtgaattctagaaagaatttgtgtttgcttctgccataaaaaggcattatatacctggtacctcctcaaacttaagaggttttttcctttcttttataatcttttaattatagtagtaatttatcttaagactttgtgtcacacagatagtgcggtttctagtcccaagttcaggcttttgatcaggaatctcagataatacttcttgttttttcttttttctttagagccaaggtccagacaggcatgttttcttttgtagggcagttttctgttttaaaaattcatccactgagaatcacctgtttggaagtataccagtttgagggtggagagtgcttttgatctgacctctcaccttttattgtccctacctatgtttcttgttgacttttcatgttctaaattcacaatccaagtcaatggtgaactacacagctggtgaactatggatggtgggccagtgctagcttgtggcctactttttttgtatggttcactagttaaggataatttttatcttttttagagcattgtcaaaaaagaagaattctatgtaccgtagactgtggcccacaaaacctaaaatatttactctgtggtgtttgacacaagtttgctattctttgtcctaagctatcagggattgtcatacattgttggtgctagcactgtgtctactggtagattagtatttccttgtgtttctggccccctactatcctgtcatcttatctgtgcattaaaaaggcatttaaaaatatattaaacataattttctgtttgttgtattggaatgaaagtctaaattttatattttttaatgtaattgatcagttttccccttttgtttatggcttctatttatttattttaatcttaaaactttctttaaattgatatatggatgtaaatagtctcttatttattcctccttttttttttttttactgagaaaggtgatagctaattcacccttaaatttataagactttttgttaaatgcattataacttagatgtctgcaagaaaaaagtcgatttatattctaacctagtattcccatctcaccaaattctcacttatattgtgtatgaacatttattaaatgtattaaagtttttataccagaaatgacatttcagggttctttttgcttccttttaaagtcattaaggttgttggatgaagaagaagcaaccgataatgatttaagagcaaaatttaaggaacgttggcaaaggacaccatccaatgaactgtataagcctttaagagcaggtaaaaatgtgtataaatgaccttcatttgaataaattcccaatttcgacccacgtttttgcttgattaaattaggctcagttgtaaattcatttttaccgaaactgtttttcctcagttttagtataaagattaaaaaagttcacaaaagtaatctgccaattgtcagaagtacagatttttaagaaaggtatgaagtgaaaagttaaaatgatcctccaactttcattttctgttccaaactctgtgcatattttattttatttattttttttgagacaaggtctcgctgtgtcactcaggctggagtgcagtggcaggatcacagctcgctgcagccccaacctccagggctcaggcaatccttctacctcaacctcctgagtagctgacactgtagacatgtgctaccatgcccggctgatttttgtattttttgcagagacgaggttttaccatgttgccctggcttgtcttgaactcctgggctcaagtgatccacctgcctccacttcccaaagtgatgagattacaggcttgaaccaccatgcctggcccctgtgcatattttaaaaacataaatgagagcatattacatttatggctttgtaatttttttcatttagtagtgaatcctgggtggtaaaaaaaaaaatgagctttaagttattttgaggccaaatttatgcttcttaagactttgattattaagattttgtgcttgctgagataaatgctatcttcatggtggctggagattagttttatttatctttgtaaaaagttcatatattattgagatttttctaaaaatcttttttttttttaagtcacattgctcttttgacagaggaatacttttaaaataaatggaccagtttttggagagaatgatttcttcttcattcatgagttataggaaaagattaatattaattaacttttatttggcagatagtaaccaccaaatgtattttaaggtatagctatgcttttgattttataagtgattttgtcatctttctaaaaacgagaacgcaaagactgtcaggagctgtttttattatgaagtgaattggggtctatagaaggggaggataagtaaagttggagactagaactcaacatataaccagccgataaacgttgctgttagaatcacttctgtgctctgcaaacttttattttctcccagagggaaccaacttcagaacagttttagataaagctgtgcaggcagatggacaagtgaaagaatgttaccagtctcatcgtgacaccatcgtgcttttgtgtaagccagagcctgagctgaatgctgccatcccttctgctaatccagcaaagaccatgcagggcagtgaggtaagaaggacactttgatgtaggttgtcatctgcttaagaaaaccacattcaagccattttatataatgaactgccaatttcttattgtcaactttaaaaaaatgcagaaataaattggggttgttatatttaaagtagtatatagactgtgtaatagataattatactaatattaactgtcctgtaatagtaacttccatttattgaatgcccttttttgaactaaattttagatacttcataggtcaacagtatttaatttgggttttataaaagagagaagcttggaagtatagaaatttcctgaaatgaaaggactgggtatagccagatacacaaattctttatttcttacattattctatactcctttccaccttgtttcaccggaactacctttgaaaggaagattgacaaggtgtgcatgttaataaatggatagcaccatcatggtatttctactgatgacaggaaagagaaaattgaatagtagggcatctgatttggaaagtcctaaaagaagagaaagtgcaagtataatttaatgacctatcacagggagatagggtaagttagtaggaaaagatagaggtcccaaatctctgcacaggaaaacaagcgaaagggcaagaaatactgctgaaaacttcttgaaaaaagtgaatttcctgggatagtaagttttgaaaagtttgagttttgttccttatttgtctttccatagaagcattttatatatttcatgtatttattccaagacctactggatatctgctctgtgtaaggcactatggtaggtacattggaaaattaacatacaaattacacacaggctttaccctcaatttatgatccattgtggaatattagtcatgtacaaggatgactgtaatatagggaagaagtttaaaaatgtcacagggaaagtataggaagtatgttacgaggatttagatgaagtacttaaatttcagtaattttggagtagttctcttcagaggcttcttaagagattggcacattatgagaacagagtggataggcagaaaaagtaaacgtgtaggatcggagaagggctgagtagtggctgtgtctagagagttatccgaggtacagaggatctgcaaagacagcttttactcctgatttcttgtgacagaaggtttacagacatgttgagaatggctggaatctgtttgtttatttatttattcactaagtgtttgaaggcctactattccagaacagtgctgagcaccttggtccctaacataaagagacaaaaaactgctctgggttacctttagtgtagagtaaatgcacaggtactgggcacctctcaaagggaagagaaggctacatagttgaatgtgcattgaacctggatctaacgggggaacccaatggaacaaggaatgtgagttattgttttgaggacataggggagaaaaggaggtggtcagaagattaacttgtgaagaacaacgaacctgaagaagaaactgcagacccttcgaacagcaataaattttggtaccttttttattttagaaaaagatttctggttagtactttctttgtattctttttggtgtcttgtacatgactcagaattatgtggctttcgtcctttgattcttctgctttcagtagaaaagcaaaaatggtttgtgctaagcaaaatctgcattagtatgcactgatatattgctattttattcagttatatcagttttattaatccttacttgtgttacacaggagaaaggaacttttatagtcaatacgaagtaattttatggaagctagattttcttgacggggtaaccacaaaaatttcagtactctctgtatattcgtttgtcatgtgccttaatcaaataaggcaagcatcaggtttatcaaagctatttcagactggttataatagttgatgacggattttagccagaatttttatgataaaaactcagttttttgattgctgattagagtgatgcaaatgtacatgttttattaaaaagtccaagtttgatggtagggctgttttttcttttattgtgaagaagcctactgtctggttacttattttcagtctctttggacatctggttttagacattgagatactctgacaaattttgcagactagtggtaatttgtatttaaagatttttgtattaaatacctaggatcactgcttgtgattggttgcctatgatgtactgtggcctgaagtccagtctatggttggctggccaagccttggccctaatgtatatggggctgagtctagccagaggaaggaacatgtatttttttgcacaaggttgatgttcagttatactcaaagtgttacatctgctgggagtaatggagggggtacctttaaaaaaaaaaaccctttacctccttacaggtagagcataaagagaattgtttaaaactgtgtgccctcccagaggagtgccttttttggattcacagactagtggaggatctgcaaacacagcttttactcctgatttctcatgacagaaagtttatagacatattgacaatgactggaatctgtttgtttatttatttactcaccaagtgttttttgaaggcctactattccagaactgtgctgagtaccttggtccctaacataaagagacaaaaaactcctctaggttacctttagtgtagggtaaatgtatcaagtttctgcgttcgttgctgtagacatagttgcttatttgccttttctgaaaataaaatgacaaggttataaaagtaaaatagaagattttgttgagggcatttctttctttcttttttttttttgagacggagtcttgctctgtcacccaggctggagagcagtggcgcaatcttggctcactgcaacctctgcctcctgggttcaagcaattctcctgtctcagcctcccgagtagctgggactacaggcatgtgctactgtgcccagctaatttttgtatttttagtagagacggggtttcaccatgttggcctggatggtctcgatcgcttgaccttgtgatccacccaccttggcctcccaaagtgctgggattacaggcgtgagctaccgcgcccggcccattgagggcatttcttgtctcatattgtacttggtgctgttaaatgccacagaggattttaaatctaaaactggggtcaggaagctgtggcttgtgggccaaatccagcctgcctcttctctttgtatgttctgtgagctaagaatgagttttacatttttaaaatgtaaaactctactttctacttcattttttaaatggctgaaaaaaagtcaaaagaatgttttaatatgtgggcattatataaaattgagatttcagtgttaatacatttttgttgaaacatagctgcgctcattcatttacacattgtctttcacactacaaagcagagttaaaagagttgcaacagagactgtggcctactgaggcaaaaatatttcctgtttggtcctttaccaaaaaagtttttaagttcctgatctgaaagacaaagtattgacaacctaggtgatgccattcctgccattctgtttgacctcatctcctgttctgccttttgtttactatgcttcagccagagtggcgtttttttctttcctttgatcctgccaagcttgtgcctgccacaggacttttacatttgcgtttccttctgtgcagggctttcttcccatttccgtggctgttacctctttttcattagtcttagatgtcacctcttctccatctttgtcattgtctacccacattattctatttttgtgtatttgtttaatcctcccctttgcatatttatttaatcctctctggtccccaaatgaaggaaaagactgtttttgttagtagttgtgtccatagcatctagaatggtacccaaaacaaaagtatttgtttgaatgatcatcactggcagcctaacttaataaagggatacatttaattgcagttgaaaggtagctggagttgtgtataagaaataaatatgctaggattctaattatttatatactttgataacatgttaaacctcaaatttgaatttataagaaaatttaggcagtggttttcttattatcttggtcattcatttgtggaagcagtttaattcattttctacttcatttactctgttaaaatgaggccagtgccttataatctgaaatatgttaaactagtgtactgcatatgaatttttttaaaaagatgttcataatataagggatctctatctttgtgtggtagtccacaagttcgttcataaattcgttgtttgaaatggcatttttttttccccagaaagttagaattattgcatttttgaatatcacagaatttgttaactatttgaccctctctgtatcagtctggttggataccatggaagttgtggttagcttttcttcctaatctaagtaatatgattgaatacttaccctttgttagaagttatgttgagcactttatatagattatctcagtctgcacaacagtcctgaaataggtactattatgcccattttgcagttgtgaaaattgaattttcttagtagtaacctgtccttgattgcacagtaactaagtccattatggtctctaagggagtatagtcagagttgaagtgttttttattttctatgtaattacatttttttatgtaattacgtttcactttgttagacccatttgtttccatattcaagttttgaacttaatctcgttttttgagtgtgtaaaaaatgttcatgattcaaaaggtacatacagagaagcctcattccttttccctctacttctttcctgtatacttgctgtaagtaaccatattcgttagtttctggtttgtccttactgattttctttttgcaagaacaacaacaaacaacccccaccccaaattatgcatacatatgtatacatatatacatattatgtatatgtatatttattttctgattttccttctgtcttactcaaattgcagcatactgtatatgcttttgtatcctttttttctcatttaataatatgtcctggaagtcacttggaaggaaacttttattcacatcgtctgatatcaagttctgctaggtctttaaacagactttgtcatatccacccacgtatgattctttctcctcctccttccttttagagtttctgtggtttgatgctttctagactctaggaatcatatttctttctctttccacagccttctcccctgtaccctcttctttccctccctccctttctccttcccttcccccttccttcctctcttccgcccctccctcttctgttcctttcctttccttccattttaaaattaggatgtttaggagatatggatgtaaacaaggccaaaaaggaaattcacctacatttagcagaaacctcgagtctctggtcttcacaaagggatgttactttggacattcctatcaaggagctaactaagactgtggaagaaagagtagaataggaatttttagaaacaggcagttggtaggggaatccatgggaattggaattgctgctggtagtgagaaagacaggggtggagacagggctcgtgatgtcctcttcttcctttgtctttcccccagttttctttctatgagcatcattggggcaagcagaatagagagattgggttgatgttcttggtggtcttagcaaagtatgaagagatgagtgaaaggggcagcttgaaagtgctcattagaaggcacttgaacactatgaatatgaaggggtatttatgaatcaggtgggtataggtcagagagtgtcttgactgaatacaagagataaatctctgttttgtttttgtattttgttttgagacagggtttctctctgtcacccaggctggagtgcagtggcatgatcatggctcactgcagccttgacccactgggctgaagcaattctcctgcctcagcctttggagtagctgtgactgcaggtgcacaccattgcacccaactaatttttttttttcaatgtagaaatggggtctcactttgttgcctaggctgatctcgaactcctaggcttaggtgatcctcctgaagtgctgggattgcaggcatgaacctctacatctggcctaaaactcttaatggtatgaagagaggcacaagaaccctctttccttttcctctcccagtatataaaataaatgtggtatatacacttatatctgtatctttctctatttctttctccatctaccatgcttgcttcatagctgtctctatttctgtcttcacctctgtttctctatatctctctcagtctctctaggcaaaataggatatctacttacctagcaaaatcataccttcccctgcttcacagccatgattgggagggagtagaatgtagagtggctaagagattggttttggaactagtcagacttaggtctcaaatttcacctctgccccttagtagctgtataaccatgtcacttaatttttctgagactcgttatccctatctttggaatagaggtcataaatatatataccccatggggtattgtaaggaatatatgaaattatatttctgaagtgttttagcatggtgcctaacacataagagttcagtaaattgtagatgttggctattgttattaatgctgcttttgttttaatatgagtcaactgaaggtacagtgtctatctatataaacctgacgttcaatttatatttggctctctgagaaatcatctctctctcagcccgaatgaacctttatatattatttccttctcgaaattggctttttttttttttttttttgcagttaaactaaggtgtcttttttgtttaggttgtaaatgtcttaaaatccttattgtcaaatcttgatgaagtaaagaaggaaagagagggtctggagaatgacttgaaatctgtgaattttgacatgacaagcaagtttttgacagccctggctcaagatggtgtgataaatgaagaagctctttctgttactgaactagatcgagtctatggaggtcttacaactaaagtccaagaatctctaaagaaacaggagggacttcttaaaaatattcaggtgaaatttatatatttaataagatctgtgttttaaaaattacagaaaagatatgtctggactaaacctatattcagttaggaaaatgacattggagaatatctgtagttaagagtagaacttaatacatgtatattttgtaaaattaaacttggcacatcagttttatctatgaaacaaagtcacttcttttttttttttttttgagatggagtctctctctgtcgcccaggctggagtgcagtggcgcgatcttggctcactgcaagctccgcctcccgggttcacgccattctcccgcttcagcctcccgagtagctgggactataggcgcccgccaccacgcctggctaattttttgtatttttagtagagacggggtttcaccatgttagccaggatggtctcgatctcctgacctcgtgatcctcctgccttggcctcccaaagtgctgggattacagacgtgagccaccatgccctgcagaaacaaagtcatttctatggctaaaatgttgcatattacttaggagtgcttgatacttcagatatttttcatggttccaagtttttaatagctttggttttttttccatatgggaggaaaatcgaaattagttggaattactgatacctttaattgtatggctaacatacatacagacttcagtcattttttaaaaaaataatgcaaagtaaatatgttgagaagtttgaagttagttttcgtgtttacagataggtagtttggactaacaaatacttgaaagtttgcccttttaatagttaatatgcaaaattaaacatatatttctactcctaaacattgtatctatatatgatataaaataactccaaaaggtaaaataattttcatgttatattttttacaagtgttatatactaatagaaatctgtgatcattattggttgttttgactcctattggatttttgaaatttttacttaagaaagatttaaagcataatgaggcttcaaaagagtgtactaggtattctagtaattttgcatatgtatttaattacatatgattttcataattggaaaagatcaataaaaatgttatgagctatattaattttataaataaatgtaaatatgtaaatctttcttttaacaaggtctcacatcaggaattttcaaaaatgaaacaatctaataatgaagctaacttaagagaagaagttttgaagaatttagctactgcatatgacaactttgttgaacttgtagctaatttgaaggaaggcacaaaggtatgaagtacatgcaaaaggaaccatagctagcaagtacagatgtgaacgcatagtttggaagttaagtggtatttccagttgaaccaaattgctctttgcctagaattttagctttaatgccattgctgctgcgaagtttgttataggagggagaaagcttaatgaaggtggcaacatttcatgggaactttgaagaatgaattgcatatttcaactggcagaaaaggggtataaatattccaggtagcaggaattagcagagatgtcaatgacacctttttaagggataggaagttgactaatttgatgaattttgaggggcaggagtagtcaaagctgatttgtgatggaaaagcggaggggcatgacttttatgttctctgcggtggtttgctgaggacagacttgtggcctgcccaagtgtcagaaggcttactgaatatgtaagtactttcttgccttgtcctttaaaaagtttagggaattcgcttatatttctttttaccaatttgtttttgagggaacagtgatttttaagttttttcagatgcataattccttttggtacttaacttcataataatcactgaataaagttaccttgatataaatacagtaggtaaaatgtaaaaccctctgaagagagggtgaaaatactgcaaagccttccaaatagagaggatagtaaaatgccattttaatttggtttaaaatgctttgtttaaataggtaagctgagaaaaccctccagagagcctttagaaattcttttaagggtttctgaagtatgcttgcatttctgtagtgaatttgaaaacctaatccttccacttaaataggtttaatgttattaaacaattgacttttctctaggaattaggaaggttttcatgatcatgaatcttttaacttgttacattttttatgataatgttctgtaaaaatgcttttattatttttattttctttaggagtcttagatcatatttaatattaagttgttgggcctagtaaattgtataaatgtatctcatgcagatctcagttcttcggctctaactatcattgacaaattagctttagatcacattactctctggattaaaaaattgttcttgttccttacttgtatttgttctttgcttatagttttacaatgagttgactgaaatcctggtcaggttccagaacaaatgcagtgatatagtttttgcacggaagacagaaagagatgaactcttaaagtaagtctgttttgtgtaccaaattgtacttaaagaattttcttttaaaaaatcatgtagagacttttggtatgaacttggtagtatgagatagcaattttcctcttctcatggaagaaggaactagatagagtattttacaaagcaacaagtaaacagctgcataatctgggaatgaaaggatgaaaagaagcagaaactctagatgcaggaagtacagtgaggtcacagaaatgataaaaacagttcaggtggcagatctcaggaagtgccagtaaatacaagcaatttattttgaagtggcaaataggttccttacataaaactagagctatagaacatggaggagacagcatgaatagctcagagaataccagcaaaatcactttcagaaggaggctgctgagaaagcagggccagttaacatacgactcatttcctgctgagtaatcaatacagagtagcacagtgctgataaaaggtggaaaacattaacaaaatttaataaaacttcatagatgaagaacatttaccaaaataatattgtcacagaataggtgaaaattatgagcaaacatctgaccatgagctaaacaaaaacaacaacaacaacaaatgtaaggaggcaatcattctaaggccggggtccccaatcctggggccttggactggtactggttcgtggcctgttaggcactgggctgcacagtaggaggtgggtggcagacaggcgggcagctgggcgagtattactgcctgagccccacctcctgtcagatcagccacagcattagattctcataggagcgcaaactctattgtgaactgcccgtgtaagggatctaggttgtgcattccttatgagactctgactaatgcctgatgatctgaggtggaacagtttcatcctgaaatcatcttccgctcccctgtggaaaaattgtcttccatgagaccggtccctggtgccaaaaaggttggggactgctcctctaaggaacactttgagcagaaattccagaactgcaggaatatggtaagaaaacaggaagtgataagatgtgaggtgtcagaattcaggaaagaagtagaagggaagaataaaaccgtgacatgggaaagagcacaaagggcgaataaacactaaagaacacacaggaacacagagtagaaatgaggaaattaaaatgaaaccaaagtcaagaaagaattagagagaaaatgggcacagaagatctaatataggcaaaactgaatttctctcagaagaaaaaccagatagaacagttatttaacgttctgtaaacagaacacttatttaatgatactcaagaacattttcttaagtgaagattgttgaaagaggatatcatatggtaggggaaaatgacaagaactgtcagcatcaaggcatataaattattggccttaaaagataatggcagaatcctttaggcagtcaggcaaaacagtcaagccagtttataaaaaggtgaaaaaaattaggctggcagctctgtatgccagaagagagtggagtgattgctgtaatctcaaggatagtaaatatgagctaaagattttatatcatatagtaaatacatgctaaagattttatatccagactgtcttttgggtacataaaaagccatatattcattagtaataaatataaagagctgaaagagtcttataccgatgaccctttcagccaactagatctttattcatctctctgttcatattcatgaacagagaatgaacatgttcatgttcattcacctctctgctcatgttcatgagagaagttattttcttctacctctaacaaagagcaggttagttgtttttagaatatttctactaaacctataaaaagcaaataattagaatgttttaaaaatggttctaaatgtttaaaaaaaggtgatttttttttagatggagttttgctctgtcgcccaggctggagtgcagtggtgcagtcttggctcactgcaacctctgcctcccgggttcaagcagttcttctgcctcagcttcttaagtagctggcattacaggtgtgcaccaccacgcctggctaatttttgtatttttagtagagacagggtttcaccatgttggccaggctggtctcgaactcctgacctcaggtaattggaattataggggtgagccacccccccagcctaaaaaaagatgagtattctccatattagtcttaatgataaaaaaacctaacaaagattaatacaaaacagtctacagaccagtttcagttatgaatatggatgcagaagtcctaaataaagtatttgccagtaatagtcaccaggacgttaaaaaataattattgaccaaggggaggggggcatttattccagtttcagtattcagtattttcacatcaaaggaaagatcacaggtttgtcttaatagatgaggcagaagcatttgagaaaatgagtgttctgatactcagtaaaataagaatagatagaagatagatgcttccgtaacatgaaaatatatatatgtatgtgtgtgtatatatttctgcccaaaactcagtatagtgattaatggagaagcactataaacagttccctctgaagtcaagaacagacaacaaatgtcactgtcagcactatttttaaatactatactgcagtaccagccaagacaatcacatgagagagaaattaaaaaattggaaaggaagaagtaaaactagcactatttacagacattatgattgtacaactacttgaaaacccaagagaaccccaaaactctgcaaataataaaattattattactgaagttgttgatcataaaaataatttgtagaaatcagtggctttcatgtaaataaacctatagaggataagatgaagagacccacttacagtagcaacaaaaaggataaaatataaaatataagtttgtcatatatgagacctatgtgaagaaaacagtatttcaaaaagaaggcttgagcaagttaaaaaacatgttcttggacaggatgactcaacttcataaagatgtcaattctaagttaacttatgcatcaactgggcgtgatggcatgcacttctagtcccagctacttgggagattgaagtgggaggatggtttgagccctagagttctaggttgtagtgcgctatgattgtaccgtaaatagccactgtactccagtctgggcaacagtgagaccctatctctaataacaaacataaataaagaaataaacatatgcggccaggcgcggtggctcacgcctgaaatcccagcactttgggaggctgaggcgggcggatcacgaggtcaggagatcgagaccatcctggctaacacggtgaaaccccgtctctactaaaaatacaaaaaactagctgggcgtggtggcgggcgcctgtaatcccagctactcgagaggctgagacaggagaatggcgtgaacccgggaggcggagcttgcagtgagctgagattgcaccactgtactccagcctgggcaacagagtgagactctgtctcaaaaacaaaaacaaaacaaaacaaaagaaataaacatgcattcatatgcttttgatatgcaaacatgcttttgatatgcaaacatgcttttgattaaaaaaaatcagcagcttttcatttggaattagacaagttgatcctaaagttcaagtagaaaaagaaacaaggtcagccaggaaaacaataaaaagagtagtgaaggaatactagttctaccagatattaaggtatataataccatatttaattaaaacacagtggtactggtacatgattagacaaagacagaatagaaaatagaaatagattcaaatacatacgtgaatttagtgtaaaagatcttcagccaaccagaagaggtggacaactgcccagccatttagaaaataaaagttatctttataccagagtaagttctgagtggaccaaacttgaaatttgtaaatgaaatataaggtgtaaaatagaatggaggagaattccgtaataaagctgggatgagcaggatctaataactcctacttaaaatccagaagccattaaaaaaaaagaaaagaataagtttctcatagaaatatgataaacagagtcaggatatgacaaattgggaatccaatatttgaaacttattcacaggcaaaaggctaatttactttatttagaaaagaactcctagaagtgaacgagaagaaaacccaatagaaaactgaggagaagacgcaaacagaattttgcagacaaggaaatacaaatggctcttaaataaatgaaaaaaaatgaataccctcattcattataaaatacaaattaaaattagtctgaagtaatatttttcagattggcaagaatctgaaagtttgataatatgctttgttgtcacatgttggagaaatagatttcatacattgccgtgagaatacccaatggtgcaatccttgtgttgggcattttagctgtaaagaataataagactgcaaattcaaacatcctttaatccagccattctgtttttgggagtctattctgaggatatattagaatatgctagaaatgacatatttatgagcttattcatttctacattgcaaatagcagtaaaaaagtagaaacaaagtgaccagggctggtgaaataaagctatacttgtatagtgaaatgctgtgcagctattttaaaaatcagggtgttttcaatttactgatatggaaagatctccaagatagttatggtaaaaagacacagaacagtgtgtagagtatgttttgtgtaaaaaggaagaaaataacaaatatagaaattggcttgtttacgcacaaggaagctctggatattctaaggaagaaagattggaatatcgtcatttaaaatattttatatttcatatatctaatttaaaaatcaggtttgttgtaaacaagtatatattttatttacacttgtcaagtattttcagctcagtgattgaaaggtgaatgaaagatggaaaagtaggccatataataatattagcttttgaatatctgagagtttattttgttaaagtcgttgttaatactgaaggccaaaatcctttgaaatcttactggatataatgtataccggaaaagtatacataagtgtgtatcttgttgaatgttcacaaactgcgtacacccaggcaaccagcacttaaatcaatacacagaaaattctcagcaccctaaaagcattgttaatgcatccacccagtcagtcagtctttatctttcttttccagggcaaccgctatcctaacttgtaagaacatagattactttctcctgtttttgcattgtatataaatagaatcacatattatgtactcttccatgactggcttttattctacattatatttgtgagattcatcagtatagttgtgtgtatttgtagatcttttattctcatttctgcatatattttattatgtgaatgtacaagttatttattctactgttgaatattttgagtagttgccagttttgagcttttataaatagtgctggcatgaatgttgtaaatcactgctgtccagtattgctggtagcagtaaaaatatggaaacaagtcaaatgtctggttctggttaattaaataaaactacatctatatggtgaagtactatgcagtgacatatgcaattgaaaatgtaaaatttgtagtagccgtagttaaaaaaaaaaaaacaggtgaaattaatttcaatatttcatttaacccagtatgtccaaagtattattttaacatataatcaatgtaaaattacaaatgagagatattttactttttttcacactaagtcttagaaatctaatctgtatttttttttttttgtgagatggagtcttgctctgtcgctcaggctggagtgcagtggcacgatctcggctcactgcaacctccgcctcctgggttcaagcaattctctgcctcagcctcccgagtagctgggattacaagcgcccaccaccaagcccagctaatttttgtatttttagtagagacgggtttcaccatcttggccagactggtcttgaactcctgacctcctgatccacccgcctcggcctcccaaagtgctgggattacaggcgtgagccaccgagcccggcttaatatgtattttatacttacaacacatctcaattcagagtagccacatttcagatgtttgatagtcatgtgtggctaatggttactgtattagacagtacatgcttttggtgagcatgttatatgcagtgctgttgggtatatatcgaggtcaaaggatatgtgtgtatgctcagttgatattgtcaaatagttttccaacgtgattgtactaatttatattcctcctagcaatatatgagagtcctggttgctccacatttttgcccttagctattctgctgggtttgtagtattatctcattgtatgattttaatttttcattttcctgatgactaatatgtcctttttatatacttattagctggaggctttgctttttaatttctgttttcattgaaatctttcatcagaagtttaaagcgtttaagaagaatgaatattttactctgagctttactttcttttgactaatggtttgaatactactgtcaggttgttgggcatagtactagtggcattttattttatatctttttgctcttttacattattgattttatttaatagcattgatttatatcttttataagtggctaggaaattatcatttgctctataaatgtgttatttactgcaaccatccctagagtttatcaaaggaaaagaaaggtattgtgttaaagctttataatatacgtatatattttagatatttcaaaatctggccttttagaattttgatattgattaaaaacttatttattttataagcagttatttacttaagaagtagttttgttttttttttttgatgaatgtatactagttttctttatgtctggagtgactggggcccttcttgagagggaaggttggatgcggacagtgtggggctttgctgttaattgttaaatcagggcaaaaggtactgtctcagatgttttgggacatgtcatatttacttctttgtgtacgttaatcagtgcagtgaaaagatgattgacatcatgtattacatggagtgcattttaccttaggtattgtttagtgtgattttgggataaatttcaatttactgttagaggagacagaattttctaatatttaatactaaattgtaatagtattttcagcaatatatctttcatgagtttatcttagtgacaggtgatgtgttatcttttaatataaaatatttcaacgccacatttctttgaatatcttcaggaagtttttatctagaaatttgcataatggtttgcataaaaggttagccttttcacctgttttattttgtataaacactgatatagtgattaaaacattagctacataactatgagtcactgtagttttctgataacttttagatagatgatgttaggagttttttaaatccagggactaccttttattagagggtgggcagtcttttaggattacttgcccagtttgacacgtttcttactctagctgtaactgtgatctctgaaaatgtttactttttcccccagtcttcagaaatataaaaaagatacaacttcattttattaaacaataggaagaaagaggatttagattctagtcaagaataaaaatgtagtatattttgtttttttcagtttttgttatattgataaataattatacatattatggggtacatgtgatactttgatcatgaatacaatgtgtaataatcaaatcagggtaattaggatattcatcacatatttgtggggcacatgtgatattttgatacatgaatacaatgcataataatcaaatcaaggcaattaggatattcatctcaaacgtttatcatttctttgtgttgggaacattccaaatcttctagctattttgaaatatacaataaattatcattaactatcatcaccctatgctgctattaaacactagaacttatttattctctctgactgtatttttgtacctattatccaccctctcttcatccccaccccctactctttcttgactctagtaaccatcattctactctgtctccttgtttttagctcacacatatggaggagaacatgcaatatttgtctttctgtgcctggcttatttcacttatcatgatggcctccagttccatccatgttgctgcaaatgacagaatttcattatattttttatggctgaataatattccatggtgtatatatactacactatatccatttatctgctgatggacacttaggttgcattcatattttggctgttggaagtgctgcaataaacatgggaatacagatatctcttcagtatatggatatcctttctttaggatatatacccagcagtgggattgttggatcatattgtagatctagttttagttttttgagggacctccatactgttttccatagtcactgtactaatttgaaatgtagtatattttaaaataccatcattgtttggaatccattttctatgtttcatgtatgaagaaaagaaaagctgatattttatgtgtgttaatttttttctatcatgttaatttttaacactctgtctttgataagggacttgcaacaaagcattgccagagaacctagtgctccttcaattcctacacctgcgtatcagtcctcaccagcaggaggacatgcaccaactcctccaactccagcgccaagaaccatgccggttagtaggcaaataaatattttaaacagaggttttacattaacgatgattacttgttctaacggataaaacatgatttacataggaaggatctagtggttaccacctgcatcaggtaaccaaccttctgatattttgcaatatgtagaacacagcatcattcaagaattcttgacaaaaaaatgcttaacctgaatgtaatcaagcccttaaactttctgtttatagcaaataaaacaaatgataaaataagaagttaaattatgctattaggaaacaattggacaaatctttcacatgggacatttatatgaaataactgagttgatcatttctaaaagtgaatgtcatagattttttaaaaaagaggcatattctagatgaaaagagatgaaagtttccttataatcaaatgcagtatatgaactttatttgcttttggtttataaaaatagctatatgagcttttttgtgttaattaggggaaaattgaatttggagtggatatttgatgacattggggaatagcattagttttttaaggatgaaaatggtattgtgattatgtaggagaatatccttatgagaacttgagtgctgaagtctttagggctagtgtcatgaaatttgcaacttactttcaaatgattctgcaaatatatatggatgtagttatagataaagcagaaatgacaaatgttaatagttgttgaatttcattggtagatgtgtgattattttatatactattttttacaaattttctggtgtgtgacatttttcatgtaaagtttggggactaggaggagatgatggtagtaaacagtacctgtgctgcttccttccacctcaaatgtccaaccactggaggaagcagtaaatgattaaatatgaggcaccaggaaaagagcagtggctatggagtttccacaggttggaaaattattcaactatgatatatttctatagtaataagccggtatttaagaatgggaattaaaaatatatttggttggattctagagtttctcatatgtccttattaattttaattaatagcaatttgagagaaatatgaaacattttatagtcaatgctgactttttcttatagcctactaagccccagcccccagccaggcctccaccacctgtgcttccagcaaatcgagctccttctgctactgctccatctccagtgggggctgggactgctgcgccagctccatcacaaacgcctggctcagctcctcctccacaggcgcagggaccaccctatcccacctatccaggatatcctgggtaaggctgcaacattgtgtatcccaagttggctaatgttgtttctaggctctggctaacctgttaaaaacagggtcatcccttctccaaatggaggtgtcatgaatgaataagctacactgtcagcttatccagaaatgaaaataatgttatggtcacttacatgaataggatagctatttcctaggcttttaaaatttatgtttttatattttacatattgggtttatattaaataatcttttctgtattatagagtttagtaggtgtttccttggactttaggtgataaacaggtaccttttctgagcgtagcatagcaaaactgataaggccttgtttacgtccctatacttagaatacttggcatttaataaacagttgaatagaaatttatctaattatgggttgcactttcttaaaggttaatctctgtggtaatttcttaattttaaaaatccaaacatttgactaccttttaagatgtgctctaaattttacttagtaagtacatgttgtctgccaaatattagaactttataagttgtaaatttatgtatatcacagtgaatattgaatattgtggaagaggaatgtatttagatgactagttttgccacgttaaaatgaagggtctccattttttttctttctttaatactcgaatatttaatcttattttcttcagtatttatttttggatagtattaaacacttggtactcttttgttttaattaataacaggataggaatgcttttctctgacaagtgccttgaaacagtttttttcactccactgttctttaatagactaaaaaatagaaatgactttcatgaaaaacgtagttctagaatgattattgttttattttttagtatttgatttaccaatcaagatttttctgttttcttctatcaggtattgccaaatgcccatgcccatgggctataatccttatgcgtatggccagtataatatgccatatccaccagtgtatcaccagagtcctggacaggctccatacccgggaccccagcagccttcataccccttccctcagcccccacagcagtcttactatccacagcagtaatatgtctgctcagcagctcagctgattcagatcagagggaaagaaataccaaccctgcaataagtgtactaaactctacgctctggttaatgtaatgtactctcctggactgaatgcagtgtataatttctgtctacagctagaagctgtgccccagttccacatttgattacacatgtgagatttgctgctgttgcagtataaacactaggtataataggatttgaaattgcattacagttcataaaaattgaaaatgagaaattaaacctgcaagtgaaacatttgaaacgattatactttctacataagacatggttgggacatcagatacttacaaagatggtttaagtatggatactagagaaaattaagttttctttctctttggtttattgatttggtttaatttccattatgctattttgcataatcaaggcactgtaaatcttataattttaaaataaattacttaagaacagttgtcattgttatgttttgttattgattctcattactgtctaattttttttctggtattagtctcattttgtatgtatataagttaaacagatactgtttttaagtgcatgaatagtacaagttattatcaaggatgttttacagggaaatcaaaagaatattatcatactttatctttcgtatgctgattagtaaacgatttttgacatttattttagaaagtcctataatgtggaagaaacaaacagttgctaccaaagattcttcaaataaacatacaaataaatgtgtatatttaatgttttattgttagcttctccagaaaattgatgcaaattctggtaataattcttgcattttttccccataacctggttaaaataaatacgccattggcaatacttcataatgtaatggaattgtttggggaacacttactgtaccctctcatcctttttccaccttactgtgttaacttagtgacatttaatgcccaatatgtatgaatagatctaagccatttaattttttttccttaaagattggagtattttataattcaaggagcatacaaaacaatggttgggaacatatgccaattatggaataggctatgtatttaatattaatctctgccattaggatatctactcactgtataaacctcagtaaaaatagtgaagacatgcatcatggaatgagaaaatgagaaaggaatgagttgtctaacatcacagtgggatctgttttttgtgaggttcatttctgaacacattaggcatatgagcagatttccagtgaatctatttatgtttattttctgagtttcaacgctgaccttttcttgcattattgtttcattttaatgatagtgttacttgtcccactgttgttttcattgagtttggatttatattttaaatgttcgaatgaaagtatgattgtaaaagggagtgaattggtttaaaaatatatgtatattttaaactttgttgtgtgtaggaaacatgaaggcatgttaattcaatataaatgacctttgatttcatggaatattaaagttggtttaaagtccaatagttaaaccttagcaaaaatagctttttacttcatcagttgctaagatttaatactttggattcatcaaagtgtgacatgggcttgtttgacttctgtaagtggcatttaagttccacattcttattacttgaggtactttatactaacataagacagtgagagttagaggtattacaagttgctagtttataatgtcttactaatgcagaaacaaggaaaaaagcaaaattggcctgaatattctcttggggaaagagggcaccaaagaaaagggtaagtgcatctgagggccaaaagagatgtataagccttttagcccattccccatgctgggcctgctcacagagccacaggaagatcattcagaaactaggaaaggaggcccccacagctgatcctgccacagcacacctgactcactcggctctgttagtgtaaccttttaaatgtagcaacacaaaccctttccctcttgtcagttcactcatcctttggtttctttttaatcacctgtgtctgggcacagacaatcacaataaatgcagccctttattactgttaaggatcatactgttggtttggagttggaagggtactactctgtgattcaggtgtgttgtacccatatttataattaggctttattatcttcctaaatcaaggaaaggaaatcatccccagaccatttatgctgagctttggaatactattttaaactggattgtacttaaataatgaagctctgcatagaggaactagtcagaagtggggaaaacactgtctaatttttatcagtctggtataaagtattgatctaagagaactctccctgtgccccttggtctttattctcaattaagaaaaacagtcacatgtcacgacaaaccaatcaatctttatgagatattcctgtatccataccccagcttgtttgcaatttataaacctccccttcaaaactaaggagttgcagaaaaaaatggatttcacagagccttgtgtccctaaagttctgtcccagtcagcagtctttatagtccaaacagattataaaaaatgttttccatttgaactttacagtttgcaaaagtgcttttatacattttctaatttcagaaacaggataatttgttaagtgggtttcagtttgctaatagggattttttgtgttttgttttttaattttcagcatctcttgaagaatcttgctacagccaaatggcatctcactttttaaagacgtttgcaattattagttgattcacagtacagaacaaggtataaaggaaaaaaccctgctaggtagtgttataattgctagattaaaaatagactagaacaggttcattttaagatttacttggaagagcaaagaaggaaaaattatatttttaaagaaagagaatattcaggctttatttctggtatgaagtttatattttttaaaaaaatcctatattatcacaccagagattttagattcttttctggttagaaacattgctggtagttggattatatttttattgtattcatttatcttagggggaacattgtaaagaaacaaaaaggtccagatgaatgtatgctagaaataaaagttgaaagattcttacttctttggagtatgaattcttatttaaagtgtttattcttcagctttatagtttccattatttctttgacaaatggtgaattggaaaatgtaaaaaaaatacccactttgactaaatgcatgagactacaaaaggaagatagtgtttaaattttttttttttcacacctgcaacctgataatttagcggtcatggatgggccatgtttttcattgcttatgtgatttactctaggagtattcttttcaaataccactttttaggttaatttttggaaatgatcagcaagattactatactcatcagctgatgaggggaagggggatgggttctgctgcatcccgagtgaagatgactgagaagctgtgtgcttggcctgctttagtatttactgctatcacagggcaggattggcttaggaactccctgtgagcagaccgactacagcctgtgaaccagagggcttcatgccaccgagcctcagaccacaggctactgccagtcagtgtccctgcccaatgaccggtcttgcctttgtaagttatcaatttggggcacatccaagctgtctgccttttctcctcattggtgctgtgcaaaggatcctggcttctctcagttctgtggctcccgcgatcctttctgcttaaaagttgcgtaagttatgaacacaggtgatacaggtgaagaggttcaagtctattaccattgtttttaagtgttcctatatttttaactgttttaagctttacacactttgaagcccacatgattcgcactcatcaagtatgtctttattgtgaacatgaagtggcccttttccatcttgcagtatattctattttttgaggcgagttctcgctgttgcccaggttggagtgcggcggtgctattttggctctctgcagcctcaaactcctgggctcagtcaattcaacctcctcagcctctttagtaactgggactacaagcacctgccaccatgcccagctaattttttttttgtggagatggaggtttcaccatgttccccaggctggccttgaactcctcagctcaagcgacccacctgccgcgacctcccaaagtgttaggattactaataggcatgagccattgcacccggctactgttttatatgactactcttgttttgtttttggatgcattagcaggttttctaacctaatgtgtgcacctgctttagttttagatgtttagatttagttacttgactcaaccttttttttttttttagtaatttaaaagggaagtttaacaattttggtaaaattaaatgatctgatatttttgtctgatacaaatattttatcctttctattttctatatctgtcattgcttggattatgtgttcttttatgtttcctagttgtttgaaatattgtttattacctataatttttgaaagcattaatattctttttttccttctcagccatatgttgtttcttaaaaagtaggggatgggctgggcccggtggctcacgcctataatcccagcactttgggaggccgaggtgggaggatcacctgaggccaggagttcgagaccagcctaagccaacatggtgaaaccctgtctctactaaaaatacaaaaaatgagccaggtgtggtggtgggcgcctgtaatcccagctactcaggaggctgaggcaggagaatcgcttgaacctgggaagcggagactgcagtgagctgagatcgcaccattgcactccagcctaggcaacaagaatgaaactctgtctgaaaaaaaaaaaaaaaggagggggatggggaagggaaaacttataaacagggtttaggctcataattgctaatgcactattatttttacattgtacatctcgattataattgttaatgtttgcatttttttattactcgatttataaaatatgtaaacatggtctattataacttggttatagctggtcctcttctcttgttcccttcttgggatgcttttgaacattcaggaggtttggtcttgccctctctcttagaccagtcttactctgcctccagcctgtgggcttctctgttgccagcaggtgccagtgattctggatgaggaactccctgaggggccagtgtcttctttttccactgaaccctggaagaagaggggtgcacaagaatggccccttcagccttcatcagcctcccacaatggactgggctgcataatgtgttctttttaaaagtagtatgttttttgaataggcaatacacggtataaatttcaaaaggtagaaaatggtgtatgatagtaagtgtccttcctgcccctgtcccttgacccagttttcttccttaagacagtctccactaccagggcgcacagggttcacattgtatttagacttaacagctcccagaagcaggtgtgttgtgaccctctgtggaaggcacacaatgaattgtgatagttgcatctaaaactggagttttattctttcatagagaccaaagactgtttttagctagagaattatttctaagttcagctacgcttgacattattaagaacagtaacatgtactgaatcgctgccaatttctaatcccactatgctttcatgttctttcaaaattatccaaggtatatatcataattttttataaagatttgcattttaggctgatatttaagtagtttttcagcaagaaacttgtaacattgaatcacagagaatagctatatctagaaagggaacagagcataaccacatttaattccttttgacaacgtcaggcagaataatggcctgtctatgtccgtgtcctgttccccagcacctgtgaatacgttaggctctttggcaaaggggaattaagattgctaatcatctgatttgaaaatagggagatgattttggattatcaggctgaatccgtgtgatttccgtttcctaaaagtggaaggaggagatggaaaaaggagaaaaggacagatggcagaatgaaaatgacttgacctaatgctgctggctaagaagatggggccatgagccacagaaagtgggcagcttctagaacctgggaaagggaaggaagattcacccctagatcctacagaaggaaggcctacacaggcctgtcagcaccttgacgtcagttctgtgagactaattttggacttcagacttccagaactgtaagataaatttgtgttgttttaagccactaagtttgtggtagtttattatcgtagcaacaggaaataaattatactcagtttggtttattagcaacttctttgttctgctccctgggttataccgagtatactgcatcctctagcttctctcatcagcaggaaggtgggaatttacaacacggtggtgactccacaaaggccacgtgggcccagcgttggctgcaccattccctttaatgaaagagtatttggttcctaaaggaagattcactttcttatttcttgtttcgtattttagggtctttatgttattccctttccataacagtgtcttttatcactattggggttttcagaaaggaaatacaatgtagatggaagtgaggcgactgcacaagggaaggcacttggaaacagaccacagtgctgtggaagagatatctgttgcctttttttccttgtaagtaatgtgttacaaaacttttaaccattagagttgaaatttttctccagcaaagatctgtctttactcaaattacctggtaatgtatgaactttttttaaaaaacagatttttttaagagcagttttaggtttaaagaaaatagaggagaaagcatagagttcccttataccccgcttaccccaccccctcacagtttctcctcttgttaacatcttgtattagtgtagctcactgattacaattgatgacccagtattcacacattattattaactaaagtacataatttatgttaaggctcatcttctgtgttgtacatctgtggattttgccaaatgcataatgtcatgtattcaccatcacagtctcatatagaatagtttcactgtcctaaaaatcccttgtgctctacctactcacccttctccccaacctggacaaccactgatcgttttattgtctgtatagttttgtcttttccagaatgtcatacagttagaatcatacaatatgtagccttttcagaccgccttcttggcatgtaagtttcctttgtgcctttttgtggtttcatagctcatttctttttagtgctgagtaatattccattgtatgagaatactggatatatcagtttggttatccatctaccttttgaaagacacacttgttgcttccagtttttggcatttatgaataaacattaatgtgcaggtttgtatggacataaaatttcaacttatttgggtgagaacctagaagcacaattcatggatcataaaagactatgttttgctttgtaagaagctgccaaactgtcttctaaggttgctgtaccattttgcattcccaccagcactgaatgagagttcctgtttctccacatcctcgctagcatttggtattgtcagatttttggattttagccattctaataggtgtgtagtggtatattactatttttaatgtgcaatttcttaatgatttatgacgttgagcatcttttcacatgcttatatgccatcttgtatctttggtgagacatctgttcaggacctctatccatttttgaattggattttctcattgaattttaatgcttttttggggtatattttaatgtagttcctttatcagatgtgttttgcaaatattttcttccagtttgtagagcaaaagctttttcacagagcaaaagtttttaatttaatgaagtcaaacttaccagttctttcatggctcgtgcttgtggtgttatatcaaatctatgtcaaaccctagattacctagcttttatcctatgttatattctggaaattttgtagttttgtgttttatatttatgtctatgatcatctcctttacttttgaaggataattttgccaaatacagaattctaggttggtgattattttctttcaacaccgtaaatatttcccttctcttcttacttgcattgtttgtgaagtctaatggaattcttatccttatttttctataggtaaggcaggtttttctctgctttctttcaagattttctctgtctttggttttctgcaagtttgaatatgatttgttaaagtgtagacttttctgtatttgtcctgattcgtgttctccaagcttcctggatctgtggttttgtatctgtcattaatcctggaaaattctaatccattattacttcaaatatttattcttctcctttctttcttcagcttctggtgttctctttgtgaatatattacatgttatgttattgtcccacagttgttggctattctgttccaatttttcattcttagcatttcagtttgggaagtttctcttgacatatcttcaagctcactgaatattttctcatctgtatctagtttaccagtgagcccatcaaaggcattcttcatttatattatagggcttttgatttctagtattttctttcatttctttcttagagtttcgagctgtctgctttcattactcatctgttcttgcatgctgtccacttttacattggaacccttagcatattaagtatagttatttaaaattcccagtcaaatagtatcaaaatcttttccatatgtaagtcttgttctgttgtttgcttatcttttcagagtgtttttcttgccttttaatgtgccttgtaatttactgttgaaaggcagatttgatatattggctaaaaggacctgaggtaaacagatctttaggataagggtttatgtttatctggctaagaacttggctgtgtttatcacttaccatagctgtagatgtctgagatttcagttttcttcagtgtcctcatttttgttttccctgttgtttttggttttccctagacattctttcttaaacagagcctcaggcttgcagttgtttcagctgtaatctctgttgtcacacaggagccttattgatgtggtgttgaggtgtgagggtagaagtgttctataatcctgtgatttggtctcaatctttcaaggagcctgtggccatggcctgtgaccctcacaagtgcttcccagcttttgttttactccttaggtgagacaggaagttagttaaagggggctggagttgggtacagttgtctctgtcagtatcagtaggtgcttgattccaggacttctcacaaataccaaagtgcatggatactcaagtccttgatataaaatggcatagtatttgcatataacctatgcacatcttcccatatactttaaattatctctagattacttataataccaaatacaatgtaaatgctatgtagttgttttactatattgtttagggaataatgacaagtaaagaaagtctgtacgtgttcagtagtgatacaattaaaaaaatttttttttggtctaacgttagttgaatttagggatgcaaaacctatggacacagagtggggactgtatttcctttcccctacattgtaaccagtatagtttcccttgagggcaagtggagaacagaatgctcagatggttactttccccttctgctggaagcatcaggggatttcccccaaattttcaccacgagaccctggtagggcttttgcaggtgaaactcatgaaaacatgggggcccctctgggcctgggccccaggagtttttaacacacagtctaggccccactcagcttccagcagtttgtccattacagtttttttcctcctagatcctggctccagtggcttcggctcctgcttctgtatttgtctgtttctccagtcttggggctatttgtttgccctgtgatctcaattctctggtggattaaaaaaagaattgttgattttcagtttgttcagctcttttttgttgtgaggatgaaggggtggttgctgagctcttcacatgtcagagcagaaccccagaagtccagatgagctttggatacaaatactcaagcctttagtaagcttggaggatttttcacttctcttccatgtgctctcgactgccttctggaatctctattgttacagatactagatctctccacatgttttctatctgtgtagcacataataaatgtttagtaatgttagctactattattttttacccattattttaatcttccacctttttcttgattggagaagtttcttgaaataatctaattcacaattcctttttctgcagcacttggtctgccacacactgtcaccaatgcattttaaaaagttagtccaagcttatggggtacatgtgacattttgatacatgtatataatgcattgtgatcaagccaggatattcagggtgcccatcacccaagaacaatacatttctgttaagcataaccaccttactctgcgatcaaacactgaatttattccatcttattctacgtttgtgccctttaccccacttcccttcttcttcttgcccccactcacccttcccagtctctgttgtctagtttttcactctttacctccaagtgatcaaatgttttagttcccacatttgagtgagaacatgtggtatctgtctttctgtgcctggcttatttcacttaagataatgacctccagttccatccgtgttgctaccaatgacataattgtatttgctttttatggctgaatgacattctactgtgtatatatatactacagtttctttactttatccattcatctattgataggtgcttaggttgattccataccttagctattgtggatagtgctgcataaacctgtgggtgcaggtgcccctttggtattttgatattttttcctttgagtagatactcaatagaggaattactggatcaagtggcaattctagttttagtttaaaaaaaaaaactaaaaaccatttttttgaattaactctttaatactaaagatttttaaattgcttatagatataatttttttgcaatttactttttttcttttacattctcaacatagcaaaatactgtaagaatgattagggactgacatttttaataaaatcatcactaagttttacttctcaatatactctttttttatagagaatgttgttatatgtccaaccactgatttttggttcttgtgaagtgctttcttttgtggatagttgttcaatttggtgttcctgcagaggggatgatggctggaggcttctatttggccaccttgctccatctctcctattttaggctttttgataaatctctgtgcagttttccatagtggctgtactagtctacattcccagcaacactgtataagagttcccttttcttcggatcctcaccaacacctgttatttttgtctttttaatagtagcattctgactgggtaagatgacatctcattgtggttgtgatttgtatttctctgatgattagtgatgttgagcattccaaaacattttcaaatatggccatgatattttatgatttggtacaatctttactgatctcacattttcccctgtagatagtagctgcttgatttcactgatatcatggtagccactcttttttatataatcgttgttagttgaaaattagccccctgttcctgcaaggattccccctccccatttcctttagatgttacgtaacctgagctagaaataatgcagcgctgttagaatttagcaaaacaactctaggatgtgtgtttacgcagaatgtatgccataccagcccccacagtcaacccccataaaccaccccagcgtatgagctcagggctgcctcctctgcctgtcaaggagcagcccagcaggtcagtaaactcacttgcttgactttgggtctactggtcctttctcttggctgactttacaatagtgactcgctcaacatcaactatgtatttgcacttgctagttctaagcactggtgagtgtttgaataattcattttgtttttacttttcagagacagtctcactctgttgcccaggctggagagcagtgacatgattatagctcactacagcctcgatcttctgggctcaaaaacatcctcccacctcagcctcccaagtagctgggaatacaggtgtgtgccacttcacctggctaattttcaatttttgtttttgtagagatgggggtctaactattttgcccaggctgatcttgaactcctggcctcaagtgatcctcctgccttggcctcccaaagtgctgggattacaggtgtgaacccccaaaatatgagccaggtctgagttaatttagaaagtttattttgccaaggttgaggacatgtgcttgtgacacagctttaggaggttctgacgacacgtgcccaaagtggtcagagcacagttcggtttatacattttaaggagacatgagacatcaattaacatatataagatgaacattggtttggtctggaaagggggacaacttgaagcaaaggtaggaagactcaagccgggagggggcttccaggtcataggtagataagagacaaatggttgcgttcttctgagtttccgattagcctctccaaaggaggcaatcagatgcgcatttatctcagtgagcagaaggttgacttttaatagaatgggagacaggttggccctaagcagttcccagcttgacttttccctttagcttagtaattttggagccccaagatttccaagattttcctttcacacaggcatgagccaccatgcccagccagtagtaattcattgaagtttcatatgaaccctatgaaaatggtattttttcattcatattcattgaaaacagaggagtcagcttcattgtagagaagctgagcaacttgtccaaggccacatggctgccaagtagctgagctggggctcaggtttctttcaccctgttgcctctcatctgaactgctccaacaagtgtagcttcctcttgactgctgctcttgcctctgccgctgaaaacagctaatgtttatagagcgcttgtcatgttacaggtcctcttctaagaatttaaagtccattaacttattttagctgagcaccacttgtgaggtggccactgatttgatctctcattttacaggagaggaagaaacaaggcacaggggagcttgagtacctgggactggcctgtgatgaagctgggatctcactgcagttagatgttagttttcaaagtttctcctgtttcatggagttttgttttgtagaaagacttttgttctcattccttcattttttttttcttcccagtcattcaaaactatatgttgagagactacttactcttctaggtgctggggattaaactgtgcctgggaatttgcattccagaagagaaggatattgaactagaaggataggtttgcaagtgaatactgtattaagatgtgaatttgtgggtggcagtgctcttgtatttgtccctgttttcatctccagccaggtggctaaacccgttgcatattcctgcccctgggattgtttgttgggttggagggtgggtgggagcagaagctggggtctctggcaggagtcaaagggagtggtaacatttcagaggggatgaggttttggtttaggagatcacagcattcccagaggtatcatgcttcaaacgcagtggagcttccacatctgaagggacagcgaggccaggcagcagcccagggagtgcctggcaacccctggggtatttgtgtggggaaccagtaattactgagacggaatttctcagcaccctgaggaatgagcttctgaggcagaaacaaattcaatcaatcaatcaatcaatcaatcaatcaatcagtgaatatttcttgtgtccctggattggtgggcttcaattcacatccacccaccacatttggtccatctctggaatggcaaagaatatttacatcacacacaactgcaccccatggtctgatgatgacgcccattggagatttgctgagcagaaataaggctctcagaagccgctgttgggaaggggatgaagacgaagctgagtttgaagagcagcctgaatgctctcacccactggtcagatgtgagggtcaccagaatggagaggaggtaaatcacttattccacagtgttgagattcttccgtctttctttctttctttttttttttttttcttatttcccaggcaaaataccctatgactgagagagaagaacctgaatcctggcattcaagaatattcctacagtggcccagcctggtcatgccatgtaaggcctaggccaatgcattgccccacctgtggggaaggctgttttgtcatggtggaaatgaacccactggaaacaatgggtgttttggggagaatgaagctcccacttggccccagtagaagagcattcgagtcttgctggggcccatttctgagatgcaccagaagttaatcaactttttagtgtcagaagacgcttatttgatccctggggcccatttttgagatgcaccagatcagaggctgagaaactgcagagctcagtgacatcacaagggtgaggccctcgggccccagggctttcagagcacaggaaggttcagtgctgagtctgactactcagagctccagagtaggctttcttgatgctgcaaccatcaccagcacacagtgggctgccgaaaagtgtctgcacctacccagtgaggacagggtgcaggggctcgtcctcagtgctagacttcacaagccagggctgtgtcttcagaaccggtgtggacaaacctgagtggcatatcccattccaagctctatctgacagaccctcaccctcacacctgctcccaaccacagacgctgtaaaggctgggtactaacgggtgacggaaaccagtcaaagagaaaagctgattttggtggctcgcacccaggccttgctgttcaggccagcacatgctgacatgtcaccaaagctaattatcctgaaggaccctcccaaactcctgggaaatgggcttttgattctgggtcccaagagtgagggtctaccctctgccctttgtgggaggcgggggcctaccggtggggggcacggtgaggttagccaggcataccgtccttggggattggtcctgacaaggccactgggacatgtggggagacatgggacatttcacagggtgttcagccatcaagaaatcttgcagttgatgttaatggctgaggagtgcttgggggcaggaatccagggtgggcctaagagtagttggtagtacaccactggtgctccttcctaggggagactgctgccctctctgtgtgtgctttcatgtggagtggggaaggtggtgcttgtgccggctgggcagtggagcatttcagacaaagaggcatgtgttgaggggttcagaggtgagaaggggcagcaggcaggagacctcaattaaatgtaaaaagcctcaagaaattgtaagcacaggagagcagtggtcagatgagggttagatagctcagcagggagaaggagtacatttggacttgatgcggaattccttggcagattagaggcttatagagaggggtctgggtgctccatccagggcgtcctttgtgggccatgggtgctgtgctgtgggagtcactatctgtggctgtggggccttcaactgaccttcagtcttgcctactcgctgcctctcccagaggcacggatacaacagggagcctccctgtggactggcttttctccccaagccgtggggacccatggggtcttctgggaggcagtggtggcctcaccaccaagcagccgtatgactctgggcaagacttttgcatctaagcctccattgcctcactgttgaaatgagagtaataatcccttcttgagagtggtagaaagctgaacagactggccctggtaggtgctcagacacttggctgttttaattattcctagtacaggcaaacctgcccccaccaccccacgcttgtggagactttgctgggtttattggccctcctctgcccccagtcctctctacactttattttgctgaaattcacttcaacagggggatgttcagccaagacaggacagaagctggtgctcctgacttttttggatttgcttcagctggatacaatgttttgggttgaccatttaattcagatttcctagttctcacacaccttggaggatttttccccggaaatactacgaaagtggtaacttcgcctcgtgtagagagactgctcaatgaataaattaagctagattagaacagctgggtttcaccaagcccaaggggcccaggaacagaattcaaaggatcagtgaactagagggccaggcatggtggctcacacctgtaatcccagcactttgggaggccgaggcttcaacagctcaatgaactagaatgggagattagagcttaacttttgaaatttagaatttccttcagttataaatagcaacaaaccaacctttgtagtattaccagaaactgagactttatttctagaaatctcagcttttcacatattgttacagctgccactgatttctcaaaatgtcatttatgcccatcataaaggagcatatcatgaatttatggtaattagacctgccactaggtcttgttatttactgtgttaaaaaagaacatctatctgcatagcccccacttgtttcataattggataaattaattgaaatgcaattagttttctttgtaattatgaatttcggaagaagtccataggcttcttctgacactaaaaaattgataaacttctagacattggagaactggaaggataaagtggcaattcccagtttagccacaagagggaactatttcacaacttatgtttagaaagatcatagctgggatttttcttatttcctcttaactcgttctaaaattggttcgaattttcttctttactgttagcagtgtaattggggtgctgtgatgaggctctgtagcggataccccgccaagagctgaagcatccctgtctcatgaacccaggaagacgtgatatgaaaaagtgagtctcccaggcactagatgagaatgccaagtttagtgccccagcttgtttgctgtcttccccctgccccctgaaaccttgtagagcagagacgatacctccttttttattctcataggaacagttccttcttcaggttagaaacacagctgaaggttttccacgaatacagtggctgttagaagaatgtgttgtttgtgtgtatgtgtgggaagggggcagaggcagggttggcgtgggagggagggaaatgagagctttagaggtggagagaggctgtgatcctataataaaaacccgaggacctggccaggccttccacttggttatgcagtggttgcccctagggctgattttaatgggaacaatttcacacgttcccttgtcgtttggccacatcagcacttaggtcaccgtatatatttaagtgcacagaattgaggtcttagagtgtctaattgcaaagggcggcagccactttcacaagtcagcatcctacggaggagtagctctgcagtccctcacttgccctgaagtaggtcaggctggagtaaatgcagcagatgtccacgtgggcgcagtcgcggccacagaacacagttctgagttcaaacctacttgtgactccaaaattaacatttgttacactgtctgcctctctggcctttagggattgttgcctgttttttttgtcccccaatgttagttatgagcaacattgaacaactcactgttgaaagcagggctttacaggctccatcctaaatgctggggccaggagagaaccagccgtaagtgctgtggatccctagagctcacaggatgcttggcacgtgttgggtaaatacaacccctctgaatacggtcctttcaggtgtgtctaccgtgtgaccagcaagttgttgatcttctctgagccgcagtttcctcatacataaaacgggaattcttttacctcaggagattgtggtgagaagtaaggaaacagatagtatacacagttagcaccgtgcctggccattgttactgaggatcacagctttgttccttaagcatatggtgtgcatgggacagacaaatagtagccaagagcatgggctgctggtgcatcctgcctcactttatggcactggtgctgccaataacctggtgaacttaataactgctcttcattaaagtgccaggatttattttgtgagatgacagtgtgacaagttggtgcagagcatgggccctggagctggatggcctgggctaagtcccagatatgacttatggctgcaagactttaaacaagttccttagtgtctctgtctttagtttcccatctttagagtagggaccataatggtactttctgcataaagttattatgagttaatgcatgaaaagcactaagaatggtccccggcacattagcaattactcaaaattatgagctattattattactgttattgtcctagacaacttgctaaacattctctgatgacaaatttcaagagttgtgtgaatcttctagacagtctagaccagtggtctcatgcttctggaacctgtttcctcaacatgctagggtagtggggtgaggatgggatgggaatggatgaacctgggtggtacggtggtgggggtgatggtggaggtagttgatcagtggcagtgggactgtggtggtaccacggtggtggagtgatggttgggtgaaggtcgggtggtgtgatgatgcctgggtggttgtagtgaggtagttgttggtgctgtggttgtttctggggtaatggtggtgttggtggaatgatgtgtactggtggtcgtgggtagtcatcattggtggggtgacgtgaggtggtggagtgggtgatggagtgatggtcaggtggtgttggtggaatgatgtggactgggggtggtgcatagttggtacggtggggtggttggtgttggtggagtggtaggtcggttggggtggctgtttgtgatggtggtggagtgatggacaggtagtgttggtgttgttgatggaatgataatgaagggttggtggagtgatgaggaggtagctgttggtagtgtaggttggaaaatgatgatggaatagttggttggtggtggtgatggagccgtaggggcagcagttggtggtggcaggctctggcagtggtgacaagataggaggagcagcgcttctctctgactccttggaggccatccttgctgtgaccaccatggtagtgccaacttcaagaactaggtttgtgcctgattctagctctgcaggactcctggctattctcccagagggccctggtgcttcctccgcctgggtcagtcctgggtgtgctggaattctaagctgcaagatcaatttctgcttgtggtctcagaacttgtttcatttatttatggacatgcccacacttgattttatagtcttgcctcatactccattttttttctttgagaaaccacaggcactttaaagatattgtacaaatatttcttataacaactttttgatgctggggtcaggtaacagaaccttgctttataggtgacaaaattgaggtgattctccaggttacatgtttcttaaaccattgagaagtgacatctcgtttacaacccttcctgtggctggtagaattaatttttgttggaaaaaaaggtcattttgttatatttaaacctcccctcaactatgaaaaaagagagctgtttcttttcttttttcagagagcccactgggcgccttgttcctgtgtatttgtccatgaccctaattctttactgacgtgagcgaggtaccaggagtgggggctgcagagtgaggacacgggagtggacgtaaagttttcatttgaagcttcagtgaatggggtctgtacaacccttgtcatccaagggagccattttggagagaaaaaacaaaacaaaacaaaaaaacttctgttatttttgaccacttaaaaaatatttgcttcacatttggtaaaactgagaaaaatcacattttccttagtgaaagcagctgcagtttcttccatagcacctttgaagatgggatgggaggggagccagggatggtgcactgttggtgcatgggccagggcaagtgcaggttgcctttaagcagatgtgttttaactgaaaaaggaataaaagggtacacttcaggacatacttatccccaaaaggctgcttcctaaaaatgctaattgtgcatgttaaacagaaaccataggctcctgacagcctcacagagtcctgtttgtggatgttttatggaggtgatttaaaccctaggactcttcctttcttccctctcgtgaaggatcttggtgttaccaactcattagctcgtgttcctgttatttgcctgcagttgcagtcctctgctttcaataaacgggcctagcactgtcaggggatgttgaagtcacggaggtggccacactggataatcaacagtgatgacaactttgcaaatttaagaacagcacacgaggcagaaatgagaagccgcatgaagtgctgatgaagagcaactttctaatatcctcctcctgtggttccacatgagatgtgagctgtgaaggaaagagagttatgaaccaattggtgctttgaattgagattctcagagtccacccatgctgctttgtgtggagtcttggggcatttattcaacaaagacatcctggggacctactctgtgccggaccctgggctaggtgctggaaggaagtgataaggaagacagggaccctgtcattggtgaataaacagtcacaggggagagatgtagacagacatggataccaggaaatgcaatatggagtgagaagtgttgtaacagagtgttgttccaaaaaggattcaaggaagctggaagtgtgcacaggtaacacaggaatacatgagagagaagttttgctctgctggattgaagatcagagtggaaaagattgtcaatggccacctgccaaaggccaccagggaaacacctgcagtcataatttgctacaccaaaagagagtgaatgccacagagaaccgtggatgtgtggataagagggagttagtggggcttactggaggatttggtcatgtgtttggtgatttggggaagagtacaatgaagctgggctctgttctggattggtgctgtcagaaagtggggcaatttggtgagtgagcatcttacactagtactagtgtactaatactggggttagaggtatcactggaaaagaagcagcagcatctcatgttagcctagggagagggaggtttggtcactcttgtgattgcacagggtctttgtttttacctctgttcaggtctgatcatggagcagccatctgctcctgaagttctttctgaagtctttctgaagttctcaactgctactgatattctctgaaagattttgtgttcatcaggggacaacacagtctagcaggtagagatgaggccagctaccagctgaaaactctcaaggctgcttccccatcacccctccacctctgggcactgaaggatgagtaggagtttcccagatcggaaggtcaaaaagggatgggcatatgaggcaagaaggcatatctggagtaggcctggggaggtaccgagtatcccagtaggctgagggacaccagaagtaaggacgtgggtgagaaccagggggtgtaagcccaaggagtcagacagggccctatggtgggggcctctggggcttgctaaggagcttagatggaatcctctggccatattaatctgagtgctcaactcagagcgggtgatcagcagatgtttattgaattggaatatcggttaatgaattggacctctttttccttgcaaaccccaccctcatgcacccaatatagtgccatcaaagacaagaagaaaagctacatgaggaagggatatccttctaggagtccagatgtcctgcccttacagtagcttttggaatactatagtcacagagctgacagggttcttagggtacatttggtctgcctctctgcttttacaaaagggcacctgaagcaagatgcgacaaagtgcttgcttaatgcttcacagcagattgtgaaagaatgaggacttgaactcacatcccttgcttccttgtttctgcccttttcactacagcaacacttgtccttgtcatctataactttcccagattagttcttctataaccctagtgaaccctgggcctccacatggctcagtctctgcagagttctccatatacaaaaacaaaacaaaattcagcagccagaagtacttgagaaggaattccatttgctgcatgactctgttgaacttcgaggggataagagtcaccagccacagttccacttttcaaggacccttgcctctactcctcagctcctccggatggtctcttgtgccagcacccaagctgctcctgtaaccacaatccagagctgatttttctcttgcttcttccttcctcatctagttctttattaaagagattgacctggcctctctgcgcatatcctccctaccttcttcctgtctctcaggactcatctcccctcttttatctgccagtgttgtgtctggcagtatgttacagaaacctcattacagtggctaaaataagtaagagatttataatctctccccagacaagaagtccataggcagatgctccacagctgtgccagaagctcttcctggttttctgctctgccagttagggtggatggtttgcttcatctcacagatggctgctgcacctttgggcgtcatgcttacattccaggttagaagagggggaatggccaaaagcaaaagatatgtgcctgctgaatggtctctttacatcagaaaaacaattgattttctggaagccccagccggtagaattctccctacactcattggccagagacggtcacatggccattgctagctacaagggagccttggaaataaggccctgaatagataagggaagaatggatattgtgtaagaagctagcaatgtctgccatactcatcttataacttttgcatcacaaaaatctgggagctgacttggcaaaaacagggtttctttccatgttgggttggggaataggagtttattaagcaaagttatttacagatgaataaatattagcctaaatgagtatgattgattctagagcacattgattttgttttcatgttgcaaatttttagcctttaaaaatagaaatttaaatgggcatttaggacatattgcctataggaagctaaacactttttcttaatgcattatattcaagattagggctttgctctgagattcccaattccaggaagaaaagtttctaaatacattctacttggaaaaattatagttgttttctcttgtgcactaaaataaaatcagtacagagaaaaaaaccccaccaagcttttggtactacaatttcaattctcatctttgtcaatgtgcacataggcatttagtgttattataatgaatgcatatcagttgattgtaatctgttcttttccatttaatattattttatagcatgattttataaacatacagttcatatagttatttttagtaactatatattttgagatatcataattggcttagtcatgctcctttgaccagtggtaatttcaaaaatatttaacaactgatattcatattgatcaatcagaacactctaggctatagaaacagagtatgtcctggaggtctctgtaggacctgacattaattcatttgttgctggattgtagggtagattgttggtggttgggaggttgggtagggaatatttactaactgatatggaagaaatgtaactattttcttaattaaaattctttttttgtagaggtgggagtcttgctaggttgctcaagctggtctcaaactcctgcctcaagcgatcttcctgccacaattcattttcatctatttatctattttatagagacagggtctcaccatgttgtccaggctggtctcaaactcctgggctcaagccatcctcccgccttgacctcccaaagtgctggaacaggttcgagcccctgtgcctggcccctgcaacaatttaataaccggttttataagttagttttggctgtgtaacaaaccattctaaaacagagtgacttaaaagaaacaatccatttagcccataattctgtgggtttgtaatttttaaaaattaatatagtttttaaaatttcaatagcttttggggtgtaagtggttttttgttacacagatgaattacatagcggtgaagtctgagattttagtgcacccttcgcctgagtagtgaacattgtacccaatgtgtagtttatttatccctcactgtgccccaccctctctcttctgagtctccaaagtccattatctcactctgtatgtcttcacatactcatagcttagttcccacttataagtgagagcgtatggtatttggttttccattcttgagttacttcactgaaaataatggcctcctctcctttgtagccagtgggccaggaaagaagaaaaaataatggtccccagctctatccaagttgctgcaaaagacattattttgtgcttttttatagctgagtagttttccatggtgtgtatgtatatcacattttctttatcattgttcgatggtcacttacactgattgatttctttgcgactgtgagttggctgcaataaacatacacatgcaagtgtctttttgacataatgacttcttttcctttgcatagatacccagtagtgggattgctagattgaatggtagttctacttttagttatttaaggaatcttcatactgttttgcatacaggttttactaatttacattctcaccagcagtatgtgagtgttccctttttaccacacccataccaacgtctattgtttttttttttcattttagtaatggccattcttgcaggagtaaggtggtatctctctgtggttttaatttgcatttccctgatcttcctttgagaaacgcctattcatgtcatttgcccacttttcgatgggattattcatttttttcttgctgatttgtttgagttcctagtagattcttggtattagtcctttgtcgagtgcatagtttgcaaatattttctcccattctgtgggttgtctgtttactctgattattccttttgctgtacagaggctttttagtttaattaggtgccatttatttagttttgttttagttgcatttgcttttagggtcctagtcattaattttttgcctaggccaatgcccagaagagtttttcctaggttatcttctggaatttttgtggtttcaggtctttgatttaaatagttctttgctccatcttgagttgatttttgggtaaggtgagagataggcatccagtttcatcttctacatgtggctggcccgttttcccagcaccatttattaatttatttaatttaccattttattataaaagatattgcaaaggatacagatgaagagaagcataggatgaagtataggggaagggatttggagcttccatgctctccttgggtgggccctgctccaggaacttccttatgttcgctctccagaagctcactgaaccctcttgagtcctcttgagtttttatggaagcttcattacatcagtattcctttgccccaggggatagtgtgcgaccctctcatgggagagtctaaacatccacaatcagaaaggtggagaacattagagtcctaccttggggcaggtgaaaggagggcgggagaaggtcagaggcctaacacacccagcattataacaaaagactgcaacaagggttatgggagttatgagccagaactgtggatgaaaatcaatatatatcataacaccacaggccactcctgatttttaaccacggatcctttacatctatctatctatctattatctatctatctatctatctatctatctatctatctctgtatacacaatcattaataactagttcagtctatcatattgtatgaatgtctcccaggatgaggccactcacatttgtaggtttcctcacaatcttttcaggttccaaaagcaggagtggccttggtaaatatacagcttcacccttacaggtatctggaataatgagctaagagacaatgtcatcttttgctctgagactcttgggtcgttaatgtaatattgaattttcctcaattaataacccacttatttatttctttactcttagctactatttctctttctttccattaatacccaaactttttcatctttggaaggggcattagaatcaccagtgctatttattaaacagagtgtcctttccccaatttatgattttgtgtgctttgtcaaagatcagttggttgtaaagtatttggctttatttctgggttctcgattctgttccactggcctatgtgtctactttttgtaccagtaccatgctcttttggtgactacagccttgtagtataatttgaattccagtaatgtgatgccttcagatttgttcttcatgcttatgatttctttggctacttgggctcttttttggttttatatgatttttaggatttttttttctaattctgtgaaaaacgatgttggtattttgataggaattgcattgaatctgtagattgctttgggcagtatgatcattttcatggtattgattcttctaatccgtgagcatggggtgtgttttcatttgtttgtgccatccatgatttattttagcagtattttgttgttctccttgtagagatatttcacctctttggttaagtatattcctaggtattttgttttattttgcagctgttgtaaaagggattgagttcttgatttcattctcaacttgtttgttgttggtgtatagcagtgctactgatttgtgcgcactgattttataacctgagactttactgaattcatctatcaaatctgggagtcttttggcggggtccttagggttttctaggtatatgaccatatcactggggaagagtgatagtctgacttcctctcttgcaatttggatgtcctttatttctttctcttgtttaattgctctggctaagactttcagtatatgttgaatagaagtggtgaaagtgggcatccttgtcttgtcccagttgttggggtatgctttcaaaatttccccattcagtatgatgttggctgtgggtttgtcatatatgacttttactattttgaggtaagtcccttctatgcctagtttgttgagggtttttttaaaaaaatcataatgggatgttggattttattgaatacttttctgtatttattgaggtgattatttggtttttgtttttaattctgtttatgtgatgtatcacatttattgacttgcatgtgttaaactatccctgcatccctggggtgaaactgtgggttggcaatttgtgctggcatcagctaggtgattcttatggccttgactagcatcaatcatgtgtctgtggtctgctgctgatcagttaggcaatctgcttctggatcttgcaaggtcaattggagtgatggggataactcgccacaggtatttcatccaccagaaggccagcttaggcttttcttatggtaggacagagttccaagaaaacaagcaaaaacatgcaaggatccccgaggcctgtgctcgaaactggcaaaaatgtctcttctgccatacttcattggccaaagctagtcccagggtcagacccaaacgacagacacagattctgcttctggatggaaggatgtgcaaagtcacattgaaaagaggtgttgatatagggaggagaataatttgggctatttttgcaaaaaaatctgccatgctgtcgcataccagggtggctggctgactattggctctgttgcaaattaagcatttataatttgcatttttcgacattatgtatagcagtttcatgaacatcatattcttcttgaagactgccattcctggcattagaaaaatacttactaatggaacaggtttagaagacctttagtcattcaggaaccatttattcagcacccctctgcactaactgaagagacagcataagcagcagatatatttgtttggagtctagaagggaagatacacagcagtgaacagcacaatgtggaatgtggtttctgttttggtcatagtgtgtgtgaaggggtttgggagcaaagggagggactacccagagggacgggtgtgggtaaggaaagtgtagtttagtgtgtgtgtgtgtgtgtgtgtgtgtgtgtgtgtgtctgtgtcttgtgtaaagcaaggcttccagtactaatggcaaagtttagttttgaaaaatgagttagtcaaggaatgtggtgagcagtgaatttcaggaaccacaaggtatttcatcccagataatgaggttagagagcaagccacagtgagatggcagtgaaaagcagggcagggtcccaaattccttcagcctgttcttgttggaggcaatgcagggtcactgacaggtacacatttcattgtgtagggttggtgctgaagacaggggccccatccagtgcaggctgtttgactccttgcagtaagtacttttctaatgccaagaatggtaaagtcatctggttccggggcaagaacctggaaccagagaagggatttcttttcttactgaacacagcttggttatctgtgaagtcacactagaagaaataaacttggtcttacctcacatttttcactaaaataagttccaggtagatcaaagatttgggcatttaaaaagtaaagtcataaaatattagtagaaaatagaattattttaatctcaaaatgggcaagacttttctaagaactatacaaacccagatatcatagtaaatgagattgatgcatttgactacataaaacaaaaatggaaattaaaaaaaacacctgagttgcaaaaaacaccatatggaaagtaaaaaaaccccaacaaattaggaaaaaatatttgtaatgtggtggccttgctatcagttatttagttttccaaacattattttgttgaaaaaaaaaaaccatttcttactgacttaaagtgtaaccctgaccatatgtgatgtgtttatctatttatgcagactcacatgggcctctttgtgggctttacattctgttcctttcatgtatttattctttcatgtgtcctgccctattattttaattactataatatggtaacatatcataatgtctcaaattgctttttaaaatgagatgtttgttgaaaagctttctttgcccatgtaaaggatttttctatttaagaatatggtataccttcttattagtacaggtcttttttttatacatcctttaggggtaatttaaacttttcttcacacagattttgcacatcttaagtttatttctatgtattttatcatttttggttattacaaatgagatgttttcctctatgttaccttctaactggctattaagctctccatattaattttctatccctctaacctacaaaatgttttattgtttacaatagattttcatcttattctcttggacttttattggttaataatcatatcagtaacaagtactcctatctttgtcttcacttttaattttttttgtactttatatttccatctattgttgacttcattggatagaatttccagaattatgttaaataataagggcaatggtggacattcttctctttttcttgactttaatgagagtgcgtcttgtgttttcccattaaatatgaggctggtttaaagactgagatacatatatctatcacatcaacaaagcatctgtcattagcagtgtctgctacaaccaactgcttacggtagctaagtatctgcttttttttctatgtggaacataataattcctgccccaaggggagttccatttaggtcctgcctctgaccaaaggccagttctgcccatgaagtccaaataggcttcctttggtttattattattattattattattttagagacagggtcttggtctgtcacctaggtcagagtgcagtggtgtgatcatggctcactggagcctcatactcctgggctccagtgatcctcctgcctcagcctcccaagtagttaggactacaggcacaccaccatgcctggctaatttttacattttttttttgtacagacagggtctcactgtgttgtacaggctggtctcgaactcttggcctcaagcaatcctcctgccttggccttccaaaactctaagattataggtgtgagccactgtcttggtctggtggtctttaaactaaaagaaaagttatttagtcacaacacagctgacatacagtcactcagtggacacaggataatcacaacagaaactcccatgctcaaaagggaaaatgggaaatgctgtagacgttggtccatggcagagattacagtgagctctaatggcaaagattcccttttctggctgtagaacacatttcatggtggggctacttggatctcctgtttctgttctctgggaaaaatgccctgttcattatctactggtgtccctgcctctgcccaagggaactttcttccttgtcttttattgctcatggccataaaaatactgcactatcagtcaacttaggttttcagccacagacagaaagtacctctcttagcaaaattattttcccttccatctctgtttctgatgggctggctctagactgaggtcatctgtcttgtagagttgcatgaaagaaaacaaaaaagcagctaatgcccaccaaaactaagattttctcctaatgcttcagcctcctttggcaggttgtcttcaagataccacctgtgagggtttaactcacccatgagctttgtatggagtaagagtcaccagattatcagcctgtggtactgtatttcatgtaagatgttagtaattgttagacacatcttactcaaaaatgttaacatataaaaaaaaggcctatgacaattgtcagatgctcttagctttaggatgcagatcactttcagagatgtaagaatgtgcaaaaatgtgcagcttagacaagtacccatgtctacgtctttgccgtctgctgtctccctaattgtactggataatatcactttttaggctttgtaacttgaagcttcctacctgtgcataccaaattctgtttacattaaggttcattgttgttctgctctcttcaatgttcagtttccacttgtggtccaagatggctgctccagcaccaggagctgtgccactttcccaccagcaggaaggagggaagggactaaaatggacattctctcctcttttaagtatatgtccaggaagttgtgcatgccatttctgcctatatcccattgtctagaagttagttacatggttacacttagctaggagaataccatttttattctaggcagccaagtgtccacatagtattcaggtacttaattactatgcaaggaaaggatgcatattggaaacacctaacagtttctacaggtctctgaaatagtcctatttttattaaatgaaattgtcctcaagaagatatatagttttgttagatgctttttgaacatctctggaggtggttaaactattttttgaattattttaatagattacttaatattgaaccatctttgctttcctggaataaactccacttggccaggtagtattaatttttaaatttgtttctggattctgtttgctaatatttaagagtttttgcaatgatatttataaggaggattggctcatttttgtttctttgtttttggtgcatccatgctctgctctgctctgtctgtacagctgtaattcttctaggcatgaaaggggtgcgcctctcactggagctaaggcctgttataatcttgagtttgcacagtgtctaggatgtggggatggcaccttttagtctctgtggcctctccatcctgtggtgtccaggagccctttcttaggacctgtgtggaatctgtcactttcagccttgtgttataggcttctatgtctgtcttctattctctgctggctcaagcctcctgtgaccagtcactccttcctcatacacagagtgagcactctttcactaccaggtactgaagtcacagggtgggaggggcctagtgctgtgctacaggatttcccagtctggaagggagaggctttttatggaaacagatctgtgacatgggaatgagtgtcatggatgattctacaacgtgttggggctcagagacctgggagatgctgctatgaggtgttgatgaacgagttgagtcttgaagcaagattaagagtgcctgacagaaatccaatcagtgctcaataaatatttggtgagtgaatatatgaagatattctgctaggcagataagacaagggaaggaaaaacatgtgagaagatggccgggtacggtggctcatgcctgtaatctcagcactttgggaggccgaggtgggcggatcacttgaggtcaggagtttgagaccagcctggccaacatggtgaaaccccatttctactaaagatacaaaaattagccgggcgtggtggcgtgcacatgtaatcttagctattcaggaggctgaggcgggagaattgtttgaacctgggaggcggaggctgcagtgagccaagattgtgccactgcactccagcctgggcaacacagtgagactccatctcaaacaacaacaacaacaacaacaacaacaaaaaccaaaaaacttgtgagaagacatgagagaaagacccaatatgttcaggtgtgatgaagtattcagggctgttggagcacagggagtgggatggagtgaaatgaagcttgacagtcaaacaccttggatgtggagtgtgggttctagtttaaagactaggagtgaccagatgtctctttttaagatgggcaggacgtgatcagatttgaggtctgaacttgaatctaatttaacttattttttcttttttattgacacataacatacataaaatgtgcaaagtacattaatcttaagtgcacagtttgataaacttttttatagatacacctgtggaatcaccacccatatcaaagatgtagaacatttccagctccctgggagtttctcttgtgacccttcctagtcaataacttctcttatctccactgttttgacttccatcatcatggactagttttgcctgttcttgaatttcctataagtagaagcatacagcatgttctcttttgtatctggcttccttaactcatcatgtctatgaaattcattcatgttcttctatgtatcaacagtttgcatgtttttattgctgtatgatttaattttaattccacaatgccagtataatgctagtgaccccaatattgtaaatacccaatgaatattagctgaaaaaatgaatgaatgagggaatgaatggatgaaatctttctattcatttctattaaaagaagcccttaacaatgagaatttatctatattcatggttgcttttttcctcccaatttttgtgattatcattcatgccacttctacttgcaggggcaaaatttatggagatgacactctctagggttgtacctggcttccatgagacttgagttttgcagatcacttggtgtcctctcctgagtcctgcctcctggggcctgatttccctggagttgtgattaggtgggttggagtcctgcttattggagtcctgcttcctggggcctgatttccctggagttgtgatcaggcaggttctgatgagccacctctgcactcacatgccctgttcttacacttggagggcccattggtgggttccacagcaggggtgactcttcagaacctggatggctctccttctaggtcctttcccagctattggcctacaaccagcctcagagctctcagtttccctactagctgagtgaggtatgtgagggaggaaggctgctaatcatgcacatgtgcatacgcccaaagcatggcccccgctgactctgcacttctatctgaaactgccatattcctctgcctttgtgtgacaatatcaaaggctcatgctagaatgcaaaggtgttatgacgacagtggcagtgactagatcctatagtcatttttatatttacagttgtcttcatgtaataacaactactgctctccaggcgccatctggccttatctgtctctccagactcaacttgagcctatcactgtcttccctgggctctgctctttctcagcacggggactttacacataccgtttcccgtaaaatgctcctaattctgtccttccccattcccctccgtctttgtcaggcattattacttcctgcttctgcatcagatgcattccatctgttgaatcttcaaggagcaagccctctgcaaaaccccagcctcacacccagtctgggcctcttgtcctgtagtgcaggccccaacgccatcactctggatattgtaacagctatcacagagcataattaagcttttgcttccaacatccctcgattcaaatccggctccatcaccagtgtgtaaaccccacaagagacaacagggaccatgtctgctttgcctcctgtgagcctagcgcctagtatgggtatggaacttggcatgtagtgggtgttcaatacatttttatttatttgtttgtttatttatttatttattttttgagacaaagtcttgctctgctacctaacctggagtgcagtggcatgatctcggctcactgcaaactacccctcctgggttcaagtgattctcctgcctcagcctcccaagtagctgggattacaggcacccaccatcacgcctggctaatttttgtatttttagtagagacggggtttcaccatgttggccaggctagtcttgaactcctgacctcaagtcatccacctgccttggcctcccaaaatgctgggattacaggcgtgagccccagtgcccggctcaatacatttttaaaacatgaataaataaatgagtgagaagtttcattttgtgttagatttttaaagaaaaatagagaacatctttctgtcctttcccaccaagcctgtccctcccacccacacacaacagtcctgatggagacagttgataggacacttaggtggcttctggtgttcaggcctaccacccagagtctttttggacatgaggaactttgaattaatgaccgaggagagccctgagagcatttgcaggcagcactgggtaaagtgcacaaagcagttggtggtgccaggctgtgaggccattagtacagggaaaagggcttgcgtggagagccctggccaattaccaggagagtaggagacaggaaggtgcatccaggttcacacaagtcccagcctgctggtgtgttatctaacgtgacagactcagtgtgaccctccttccttttggaacagaaagatgtcatttagcatttttttgactcaggctggagcagcaagctgggatgagaaatcttttcttgccaactcattaaggattgggctaggccctcaggaaacctgcaaactcaggccacttagcagaaaagtcccgatggcatgtccttacctgcagagcctcttacttcttcagggcttccattttcccttctgggtaggagtacaaggaaggctgagaaaagtgagagggtggagttgagggaagaagtcaagggcacagggactgccttctgaggtctcagtgtctccccacctttctcagggacccatgtgtccacagagctttgtactctgcagctgtagccttactatgagtcaaaggtgccctgttgccgagtaggttcagtgttacaaacatttactgagctctgctgtgttccaggccctgtgctgggctctgggggtccagaggtgtctgggaaactcttggagatcagatgtgtaagcagttacccttaacacaaagagatatgggcaacgttagaaggattagagatcttgtgcccttgatagcagctgtacccaggagagggtggctgggctactatgtgtatcagggaagcttctagggaagaggggtgtaggcaggtttcccatgatgaatggatgcttggtggatggacaagggcattttaaacaggaaagtcacagtggtgccaaatagcatgacatattttgacaaccaccacactgctttgcgactcctggctaaaatgtattgctcatttaccaagtgccagggaatgttctgttttctctgccttgtctcttgtgtcctcacactatgcctaagaagtaagaagtgtcattatctcatttcatagttcaggaactggggcacagggaggttgaatgacttatctgaaatttacgttcataagtggctaataaggagtggatcaggtttgttggacttcaaagtccataataatgataatgataataatagccagaatctaatgattgcagttaatgctttctgcacacttactgagtgccaagcactgtgctaaacattattttagttaattctcacaacattcaggtctgtacaattttctctctactttgcagatgaggaaaccagggaacggttaagtgacgcccagaaagatagctcatagctggtggggctaagatttgcccccaggcagccttaaggtggagcctatgcttgtaaccattgtcctttcctgctgtggcagaaggtggaaggtcagagtgagggaagttaagtctagggaggtaggcatttaggccccagcccttgaagggccttgtttgccacatacagaaccatggagtattaagcacggcagccatggagtcgggaaaggctccaactggaaaggcccccattgcttttggggaggctgctttgaaaggtcaaccccagtgtctcctcattattccagttggggtccagtttccttgaattccatctttttctccaactagagtgtcaagatctgatgggggcagaggctgttctatttactcctccttggtctcttcagtggcttctcatctctcaggtctcagctcaaatgttctttctttgggggaaatctttattgattaatctggacgacctagatgaggttctgcagttataagttctcacggcacatctttcttttcttggtagcacttatgaccattggaatgaaataataattattttgaatgttggtttaatatctatcttttcctgtactccatggactgtaactagttaattaattaattaattttgtcatctatttaacagatgtttattgaatgccagttgctattgtttgggtgtgatttttttgtccccaacaaatttcaacattcaacaccatcctcagtgtggtagtgttgggagatggggcctagtgggaagtgtttgggttgtggaggcagatccctcatgaatagattaatgcccttccttgggggtgaatgaattctgtattagttcccaagagaactggttattaaaagacctggcatctcctcacctccaccttgcttccttttgtcatgtgatctctgcacaggtgactcctcttttgtcttctgacatgagatgctggtgccatgcttctcgtacagcctgcagaagtgtgaaccaaataaacctcttttctttataaattacccagtctcacatgttcttttatagcaacataaaatggactaagacaccagttatgtgctagtcattgtgctaaggtgctggggatgtagtggtgatacaaatagaccctgttcctgccctcaaggaatttataatcacatagggagaccaacattaagaactaactaccaaacaaaagtaaaattgcagtagaggtaagttctacaaaagagggggtgcatggcattgtacgcctctctaatgcggcaatttgatacagttaggaggccagggaaggctttgctgagtgctgagatatggagagtaaatgttactaggcaaaggctgagggtaagggaagggtgtggtgagacagctgtaaccataccctggtgggaggcagaatgtgggatataaaggactgaaaggagaggctggagggcagagagtaaggagttgcctgtacagcatggggctggggagggtggcaggactcgatcacacagagccctctccactaggtgaggagtttgggaaggggctatcatgaatttaactttgaacatgttgagtttgaaataactttgagatattcaaaggttgatcttgtgcaggcagttagaggtttggagttcagaggacaggtgtaagctgaagacacttgtaagtgagttggtgacagctgaagccacagtcataaataagatcccctgggaagtgactcaccattttttttggtgccttggactcatttggcagccattgtgtgtgtgtgtttttgagaccgcgtctcactttgtcacccaggctggaacgcggtggcttgatcgcggctcactgcaacctccacctcccgggttcaagcgattctcctgcctcagcctcccgagtagctgggactacaggcatgtgccaccacacccggctaattttttgtatttttagtagagatggggtttcgccatgttagccaggatggtctctatctcctgaccttgtgatccgccccgcctcaccccctaaagtgctgggattacaggcatgagccaccgcacccagcccaatgttttaaaatgtacaaaatgaaatgcataggataacagtggaaactaattgcattgaaatatagttatcaaatattaaaaataaatttgtgatgtgaaggtatatatgcttctttattttattaactccttaaatgccaataaacagtagcagttcttataattactataatttcaaagcagtgatgggtgtatattttgagacctctacaactgttgtgtaggatgaagacacctggcatcattattggagagaaagtcacaggtactgctaatactgctggagtttgttgcctgcattcataatcaaaggaattgctaaatttcaggaagaggtgaatgaaaataccaaagtagacattttcacatttatgtttactgtccctcaaccctaagttaaaactcctggtctaaagtgagaggaagagagcacctacaatgctagcatggagtctcccatcaagcagagaaggataaagctgcacaggagaagcagaaagatgcaaggggtaggtgaaaaaccagagttcatctgtagaagccacaggaagcaagtgatccaagaagggggtggtcagttgtgtcgaatgctgaaaagttccataaaataaagactgataaatgtctgttggatttagtgacattgcaggaataatttgtcttatttattgcttaattcctggtgcatttcagggcacatgataagcattcaatatctgttgaaggaagagacaagttgctagctttcctcattaggtccagcaggagattgtctgcctaatggaacaggcaatgaagcctgcagatactttcttaaattgagtttttgactgaggactatggaagctgtagagtctttgcagggattaggaattccaagacttttggaggctttgcccatggttgctggagctactcatactcagagctgaatgctgcccagtggctgacgacttcccctgaagattcacctgcatctttgcatccttttctagggacagctgcaggtgggcaatgggtggacccatgtgtgcgaggaatgctctattgtggagatctgaattatcacttatccagcatcttcctgggtgatcttgagccatttgtccaatcctcacactttactgtagccccctgtgaagtggggtcacttctgttgcttcttgcttccccgtgctccagtgctgtgtggtggaagaattgggtcatatgtcgttaccccaagtgaaatgatcattataattttttgtcctagacatttttccattatatatttgaaccgtttaaaacagcacagcatcctaagatggtgattgggatgatgatggctgaacttggcaatgagaatatgaaacttgggatttggtgaggatttaaaactcagttcaagcagtttcagtctgtgctccagggatccctaagggtatctgagatgccttgggggaaccaagatggggataagagaggacaggcaggtgggattcaggcccattgggcctgtgggagcatcttccttgtatattggagcatcttttttatatactgagattccctacaatataatgtgaagaaagaaagaaattttgaaaatgactgatttaatccaactctcttatccctttttttttttttttttttttttagacagagtctcgctctttcgcccaggctggactgcagtggcgctatattggctcactgcaagctccgcctcccgggttcacgccattctcctgcctcagtctcctgagtagctggaactacaggcgcccgccaccacgcctggctaattttttatatttttagtagagacagggtttcaccgtgttagccatgatagtctcgatctcctgaccttgtgatccgcccgcctcggcctcccaaagtgctgggattacagacatgagccaccgtgcccggcctccaactctcttatcttacacaaaaggtaacttatgcccaaagaggtagaaagctgtgctcaaggtcatggcaatagttggtggcagagctgcagactaaaatcaggtcatgtatatagttttttttttttttttcttttttgagatggagtctcactttgtcacctaggctggagtacagtggctctatcttggcttgctgcagcctctgcttcccaggttcaagtgattttcctgcctcagcctcccgaatagctgggattacaggcacccaccaccaagcctggctaatttttgtatttttagtagtgacggggtttcgccatgttgatcaggttggtctcaaactcctgacctcaggtgatctacccgcctcagcctcccaaagtgctgggattacaggcttgaaccactgcgcccagccagtatacagttttttaaaacagtttgattaaatacttacaaagtcatgcatattatcatttatgtatgtatataaaataccatgcttatacatgggtcatgcattatttcttctaattatgtccccttctccccacttttccaccaacctcaaatgttgaatttgtttgccctgaaaggtgtttggggaagggtgctttggatttttacaatttggaaactctttttcacttttctggcataagaagtacaaagtaaattgaataggcctatgaagatgttgagtgtttttcatatgcagagaattgaaccccaaaagaaaatggtctaatggggttaataaaggtcagcattcctcagggaactgggaaattaatctaatggctcaaacctctgaggggttaatggaaactgtaaagcaacagctctgcctattgcaacgactataaatagctcaaagtcctgaaccacctcccgaagctgtgatatcctccatattaacttcagcagctttatgccgggctaggctacaacctgaatttattccagctgcatccagaagacccttgcaatatttttcagccatgaccaaaagagtgggagatggatggaaggctgactggttgtgaattatgtgccaagtcccctcagagtgaatggtaagggtgcgtgtgtgtgtgtgtgtgtgtgtgtgtgtgtagagagagagagacagagagagagagggagagagagagagagggagagagagagagaggtatggtggaaggaaatttgtgtgtggcatctcaatttgattagagcatgtagacctcctgaggcttagaatcttttttttttttaatcttcatttttttcctttggtaataggattttgaataacaggacatggtagattcatgtatgagtcctagagaatgtctacttcaacctctgcatttttcgtgcgaggagcccctgagcccagagagggaaggtcactggcctcatgcctccatcaaccaaggacaggggcgcaggtttccccgtcgccttgatggagatggctgcgcttcccctgtgttcctgaagctccctgtcccactccattacatttcctgtctcacctgggcgtttgaatctcccgctcacctgtgaccttctagatagcagggactgttttactcaattttaaggcctactgcttggcagagagacattgcaggtgctcagaaaatttttgttgatggattgaataaatgaacgaatgaatgagctttcttaggggaaatcatctaagagtccagttttcctataaggagggacaggaggttatgagaaaaagtttcgaatagaagccaaggactgccccctcttctctaaatgaagaaataataatgcctttcatttctataaaattgatggttataaaaaatgttaatttactcctcctgataacttctgagaaagattggggaggtatttgttattcctacttcatggataaggaagcagaggccctggaaggctcaatacttggtcagggccacacaactgctcagaagccaggactccagttctccagttctcagccagagtcatctttcttactctagggtaggtgttctgctggattgccttaggaaaacctcgcaggaaatttccgagtgagagaaaccatggccatgcatttggcaaaagaaaaccagagttagcatctgtttagtgctttttagactctttgatgtgccttctcataaatcatctcattggtccccacagcagccctgagatgctgcggctatcatcactcacatcacgtagacgaggcaatgagtgatttgctcctatcatccagttgataaatgatagcattggagctaggcccaggtctccattcacctgagcctcagctccaactactgaaccacagatcatcacatagagaatgatgagagaggtctgggagcaggtaggaagagtccatcacctaaggaaactggatcctgtgtataagagggtgggcattcctggaccaaaagttgggctggagatggggctgctggggagacttggctgctgggagactctgataggcaggtttagagcccacaggaaagagggaagttgagaaaggaaaaatgctgcagaagatcagaaagcaagcaaaaattaagggataggaaagaaaccagtgatttttatcaacaagacatggaagggaaagaatgatgtaagccaaacaaatgtagagaaacagaacatatagttctccctgtgaaacacttttaagctgcaaagtgtaaagagatgttatttttgtatttgtgacattttaggcttccgctacttgcaatttaaaatgaaaaaaagaaaatcccaaatcaacctaacttatttcttaccaagttaaggaaaatgacagaggaagggcacaatgcttagctgctaattgccattctttgacaacccacgaagactatcctcagcttatttaaaataagcatgttctcaactctttacttttcatcactgacatcactgttgaggaaaacgtggtgagaaaagatgaagaaaacacattagaaatcaggaatcagagcaagtttaagaaaattatcatcatcatgaagagaaggccctgggactgaaagggcagctcagggcacccttcagaggcaggggtggggtcacctggggggttccctgggctttgcagctcctctattccaagtcccttttccccagaggagtggtggggctctctgcagggctaaaccctgcaatctggctcttctctttgaggttctgattgattttggatttaattttgtcttgcaggcttttctgatatatctccaagcaggaaacaatattatttttcttttcttctctgtcaaaagggggcaggaccttataataatttttctttgtgaaagaggatgaattgagatatttgcagggtaggaacgaataaaaaaagatcataaataaaaggatctcagtagggcctaaggagtgaaccccaaactataatgggtagctactacaatcaaattaacagctcctcttcccaaccaaagatttcagctgcctcaccactgccccgtccccaactaaacactattcctaaaccttcaagtgaatcagttcaaacccaaactggaaactatatgctatctaatgctattggatttatcaaaacataattttcaaaaagtaaagaacattgttctcctacaaacatagaatgaaaatgtatcaaatttttatttaactaattaattaataagggaatcagctggatgttaaaactattcccaagagagggcagtaacttagacatctaattcttcttgggagaggaccctccttggctccacaaagctgcacggtgtggccacagtttttgtcttgctgtatcgaccccctaagtagaaggcaggtagatcaagatggaatctacacttccgcagggtgacctctgcacatagattttctgttgttagactttaaaggagcatcctcctcccctcttggctctgtgttgtcatgtacaggatataatagactcttgcaaggggcgaatgaaactgctctctttggaagctgagttgagtaagattgatttttagatggcagctccttctcagacaggcttaaaataaaaacggtcgagatgagtttgtgagtaggaattggaaaccagacttcagagtaccttgcaaagactgaactcctttgtgttagatgctcacttgattcatcctaatacagagcccagcacacagtaggtgctcagaaaatgtttgctggatgaatctcaagaatttcctttaggcagcaaggacccactttccaggggcgggtaggttgagggctggaagagtgaggaggctgtcatgttctgctgaatgatctttattgctgagaacaatttcttgctttcacccccatttcatattccagctcttattttttttaaaggagaatatgaatttgagagtatttcctcttttctccctcattcttcctctttgaatgtgatgatatcactatcataatcttcatggttgacatttttcagtgactcaccaccttactattttggtggttgtacatttcaacagataattgtctttccctctctcctgagcatgacacctactcacatctagagacttccaacacaacaaagcctcaccaagtagcaactcactgaacctggtagtgaaagtgagaggtacttatgaatgaaagacagtaagtgaagttgtggatgagaagacaggcctgctccaccaggcatgaactgttagtcctaaaagtcaccccgaggctcagcattccttagactaggacaaaagggaaatctcttgggaaatgaagaccactatccttgaaactaagcatggcataggtgctctaagtggattgaagccctcagggtgcttcatcgagacacccctgagggagagggggagcttctgagaaggaaattccgagagcatagtgttctggggtttggtcatgtttttaatgggtcagaggagttcctctgtctctgggaaatgtctccatttatgttgtgggtctccccacaggcaacattcaaattggcttggtcaactgagactctggctagaactgacttccccgctgacctgtcctgctttaagccatcgtaagtgacttctactgcccctgactcccttggtaataatattctctggggtttacatggtaacgttaaacatacctgctcatggtatttatttaatgatgattttaaattcttattgagcttgtaacacactgaaattttgtgtattacttctctgttttggcaccttgactgatgtactagctttatcatatctgtaaaactgccccatgtacatattaagaggtttttgtcattttgtgaggataagggactcttcaatgagtagggaatcactaatttataaaaccagaagctcagcctcctaaaccataaagactttgtcttagagagaccataaaatactgataggtcacaaaaggttaagtccttttttattatttaactttcctgacatttatgacttgtcttccaggtaaaacggtgtgcattttgtaacagggacaatgcattattgttcattgaatt

SEQ ID NO: 45 - DNA, 182314 bp, Homo sapiens
agagacctgtatcacaagaaatgttaagggaaaatcttcagggaaaaaaatacatgacagcagacaaaaacttagatctacactaagaaataacaggaaatagttgaaattaaaataaatatttaaaaccttaaaaataagctgggaacagtggctcatgcctgtaaccccagcactttggaaggcaggaagatcacctgaggtcaggagttcgagaccagcctggccagcatggcaaaaccccatctctactaaaaatacaaaaattagctgggtgtggtggcacatacctgtaatcccagctactcaggaggctgaggcacgagaatcatctgaacttggaaggcagaggttgcagtgagctgagattgtgtcactgcactccagctggcaacaaagcaagacactgtctcaaacaaacaaacaaaaaaaccttaaaaatatatgtatttaattactctaaaaactaactgacactctaaaacaaatactaggtctattgagtttagtaaagtcatgagataaaaggtcactataaaaaaatcaattgtgggccaggtgcggtggctcatgcctgtaatcccagcactttgggagggtgaggcaggcagatcacctgaggtcaggagttcgagaccagcccaaccaacatggtaaaactctgtctctactaaaaaatacaaaaaaaattagccaggtgtggtggtgggtgcctgtaatcccagctactcgggaggccgaggcaggagaatcatttgaacctgggaggcagaggttacagtgagctgagatcgcgccattgcactctagcctgggtgacaagagtgaaactccgtctcaaaaaaataaaacaaaacaaactgtgttcctacagaccagcactcaacaattgggaattttcaaaatactgtatcatttacaaaactaacaacaatcacaaaatacttagatataattctaacaattaagtccaagatctacatgctgaaatcacaaaatgctaatgaaagtgatagaaaaagagctaaataaatggtatatacacacatacacatacatatatacaccaagttcatgaattggacaacttaatattataaagatttgaaaccccacaaattgttcttgtgtgaatgcaatcccaatcaaaattccagtagaatttgatgcagaaatcgacaagctgatcctgaaatgtatatagaaaggtaaatgaattagaatactcatatcaatattgagtaagaaaaatgaagttacagtgcaattatctgatttgaagacttaatataaacctacagtaatcaagacaatgtgggggctgtaagaggcacatgcctgtaatcccagcacttctggaggctgagacaagaggatcgctggagacctgcctgggcaacatagcgagaacctgtctctacaaaaaattttaaaagtagctggccatggtggcacaggcatataataccagttactcaagaggctgaagcaggaggattgcttgagcccaaaagtttgaagctgtagtgacctatgaatgcaccactgcactccagcctgggtaacagagtaataccctgtctcaaaagaacaaacaaatatatagatcaatgaaacagaagaggcagtccaaaaatagacatacacatatatagtcaactgatctccaacaactgtgcaaaggcaattcaatgaaggaaagaaatatactttttcaataaatggtgatgttacaattggatatccatgtgcaaaataaaaaatgaacctcaacctatacatcacatcatttacaaaaatcaactcaaaaatgtatgagatataaacataaaacctaaaactataaaactactagaagaaaacacaggagaaaatctttacacctggagtacacaaataattcttagagacaacatgaaaagaaacataaaagaaaaaaacataaaagattcttggagacaacataaaattttaaaaattgataaagcagacttcactaagaacttctgctgtttaaaagacatggctaagaaaatgaaaaacccagtcacagattaagagaaaatatttgcaaaatacttatctgatagccaactgggttcactgtagagtttaagaagcctattctaaaattcatatgaaaattcaaggggcccagaattgtcaaaacaagcttgaaaaagaaaaagttggaagactcaaatttcccaatttcaaaacatcctacaaagcttctgtaatcaagacagtgtgacaatggcacaagaagagaaatataaattaatgaaatagaactcagagtccagaaataaacccatacatttgtatgggcaactgattttcaacaagggtgtcaagaccattcaatgggggaatgattcaacatatggtactaggacaactggatgaatgcggaccactacctcacaccatacataaaaattaactcaaaatgaatcataaacctaaatgtaagagctaaaactctatagttattagaagaaaacatagggtaaatcattgtgaccttggccatggtttcttagacaggacataaaaagcataaacaacaaacaaaaaaagaattagagtttatcaaaactaaaaacacctagtcttcaaaaaaacacgatgaagaaagtgaaaagacaaccaacagaataggggaaaataattgtaaaacatatatctgttaagggacttgtatccataagaacttttacaacgtaatagtaaaaggacaaataacccattttttaaaatgagcaaacagaaaagaatagaaagtctggaaatacactcacatgaatacaatcaaatgatctctcacaaaaaagcaaaggcaatataatgaagaaaagatagtcttttcaacaaatggtactgcaacaactgagatccacatgcaaaacattaatctagacagagaccttatgcccttcaccaaaaattaactcaaaggatcataaaactaaatgtaaaatataaaactcctagaaaataacataagaaaaaatctaattgaccttgatgtggcaatgtctttttagatatgacaccaaaggcatggtccatgaaagaaataactgttaagatgggcttcactaaaattaaaaacttctgttctatggaagatgtctacagaatgggaaaacaaaccacagactgggggaaaatatttgcaaaatacacatctgataaaagactgtaatgcaaaatatacaaagaactcttaaaactcaacaacaagaaaataaacaactcaaaaaatgggcaaaagatccaaacagtgcctcaccaaaaaagatgtaagatatataaacagcaaataagcacatgaagagattctcaacatcgtatgtcattaggaattgcaaataaaattatgatagcactacacacctattaaaatggccataacccaattcaccgacaacactaagtgctgacaaaggtagggagagagaggaactctcattcactactggtgggaatgcaaaacagtacagttattttggcagtttcttacaaagctatatatactttcccccatatgatccaatgatcattcatgttccttggtatttagccaaaggagttgaaaattgatgtccataaaacacctacacactcatattttttgtttttgttttttgcagaggcagggtttcaccacgttgcccaagctggtcttgaactcctggactcaagcaatccactggccttggcctcccaaagggctgggattacaggcatgcaccaccatgcccagcccacactcatgtttaaagcaactttattcacagttggcaaacttgaaagcaaccaagatgtccctcagtaggtgaatggataaatatgtagtacattcagacaatggaatagtattcagcactaaaaggaaatgagctatcaaggcatgaataagacatgaaagaatcttaaatgtatgctattaagtgaaagaagttagcctgaaaacgcttcatactgttggagtcaaactgcatgacatttggaaaaggcaaaactatggagatggtaaaaggatcagtgactgccagggattggggaaggaggaagttttagggagagcacagaggatttttagggcagtaaaactattctgcataatactataatgttaagtatatttatcaaaacctatagcatgtacaacacttagagtgaagcctaatgtaaactgtggaccttgagtgataatgatgtgtgaatgtaggctcatcaattataacaagtgtatcactctggtaggggatgctgacagtggaggaggctgtgcattatgcagaagcaggcggacatatgagaaatctgtctctcttactcaattttactgtgaacctaaaactgctctaaaaaaataaaacctattaaaaaacaaaaatgggcaaagaacttgaataggcatttctccaaataagatatacaaatggcagccaggcacagtggctcatgcctgtaatcccagcactttgagaggccaaagcgggtggatcacctgaggtcaggagatcgagaccatcctggctaacacggtgaaaccccatctctaataaaaatataaaaaattagctgggcatggtggcacgcgcctgtagtcccagctacttgggaggctgaggcaggagaatcacttgaacctgggaggtggaggttgcagtgagccgagattgcaccactgcactccagcttgggtgacagatggagacgcagtctaaaaatatatatatacatatatatatatatgaatggcttataagcacatgaaaagatgctcaacattattagtcattaaagaaatgcaaatcaaaaccacaataagatactacctcacacctactaggaaaatggaaaatgtcaaatgttggtaaggacgtagagtgattggaacccttatatgctggtggtgggaatgtaaaatggtgcagccattgaagaaaacagtttggcagttcctcctaaagttaaacataaatttaccacatggcccaggaattccactcttaggtatatacccaaaggaagtgactcaaacagatacagccatacatacttgtacgtcaatgttcactgcagcattattcacaatagtcaaaggtggaaacagcccacatgtccaccaactgatgcacagataaacaaaatgtagtatatgcatacaacagaattttactcatccataaatacgaatggctgatacatgctataacatagattaaccttgaaaatatcatagttcaatgaagctagtcacaagaggctacatgttatatggttcaatttataagaaatgtctacaataggtaaatctataaagataagaagtagaatagtggtagcttaggactaggttggggtgggtatggagggtggtataatagctaaaaggtaaagagttcttttggaggtgatgaaaatgttttaaaatttactgtggtgatgggtgcacaaacctgtagctattacaaaatcaatgtaatatacacttcaaatgagtgaattatacagaatgagatatcaatagagctgttaaaatttaaaatccaaaatagactcaattacacatatatgagccaagcagtatctcaaataagcaggaaaaaatgtgtactcttaagaatatacttaggaatctatccccaagatatacaagtaaaattatgaaaagacatgcaaaaattattcactacaagagactggaaactatccaaacattcatcaatatgggacagattcagtaaaccatggtgtatccacactacaggatactatgacactttaaaaataaaaatgaagactaccctaattctgctatgcaatgatttccacagtatactgttaagtgaaaaaagcaaagttgggaaaagtatgtatatcaaaaaaaggggaattaaatagatatagacagacataaatgtttataaaaaacaatgatggctgggtgcggtggctcatgcctgtaatcccagaactttgggaagtcaaggtggaagcatcacctgagcccaggagtttgataccggcctgcacaacatggcaagaccccatctctacaagaaataaaaaattaggcatggtgtcatgcgcctgtggtcccagttgctggggaggctgaggtggaaggatcacctgagcccgggacgtcaagtctgcagtgagtcatgatggtgccaccgcactctaacctgggcaacagagtgagatcctctcccaaaaaacacacaaaaaacacacaaagacacaatgatggaaaataaagttttaacggtgagaacaggatacaaggaacagagaaagaaactagagttatttgaagatatcttcttttagcaacaactattttgaaaatgaaataaaataaatgaatctaaatttacatcaagttagtagcataaccacacaaaagactattttcaagtgacttgaaacacagtaatttggctctatcttgtcaatgggacatatcctacagacaaaaacaaaactctgaaaaatacagttaacagtctttataaatcttattgttgttgacagaaaaaagatacagacagaagacagaagtaaaaactgtagtcttaaatctgaattagaaatatcagtatgaactcatgacatatttttctttaaaattaaaataaaatctaggtcaggtgtagtggctcatgcctgtaatcccagcactttgagatgccaagacgggaggaatgcttgagcccaggagttcgagaccagcctgggcaacatagggagaccctatctctagaaaaaaaaattttaaagttagttgggcatggtggtgtgcgcctgtagtcccagctagttgggaggctgacataagagcactgcttgagcccaggaggttgaggctgcagtgagctgtgtttatgccactgcactccagactaggcaacaaagagagagagagaccctgtctcaaaaaataaaaataaaccaaataaaataaaatctaactctgtccattgaataaatctagaaacaatgaccaaacaaggaacatgaataccactagcaccacattgcagtttccaggcacctcttcccatgaaaaaaagatcaagagcttcttggagaggtggctcattccccagttggagcaggaaatacatcttgtgataccagacagcaaagaagcagtcaaagattactagggtcatgtcaagataggacagtttgaatatcaaaaaggatagtaactgcactgtcttgaaacacattagatatgtttaaatatatgagttcataattatatgaaaacaaaaacaaacatttgaaggacactaaaaaaaccattgttttcacaattagtaagtaaatggaaagaatcatagcaatatacctaccattctatataaaccatatcactaggtaatcaaataactgtaaatggggaaagtttctccttataaaactattccagccaataaatgaagaaataacagaattcaaatatcaccattttgcaaactctaatgaattaacagatctagacactgaacgttaatggcctctaacatcacacacacacaaaaaagagacctagagcttgtgtgccttccatatctcatgtgtctccaggaaggagatgaaaggagagtatttcctattaaatagtcttgcctccctgccccacaaaaaaggactcaatttaagttttagatctaactaaattaccaatttacaggaaaaacagatggaacagtcaaacatcattacacgaatgaaaccggcaagatccagactgtgggaaaatctacacaaataaaactcaagaatttttttaaatagagactgagggggaaacattaaaagagacttaataaatatgttgactcttgcaggcagaataataacctcacaaaggcgttacatcctgactcccagaacctctgaatatggtatcacacttggcaaaagggactctgtggatataattaaggatcttcagagggaaaaattcctctggattatcctaggcctaaaggtatcactaggggctcctccttccccatctgttttgtggtgagaacgtgacatctacgctcttagtaaatttcaagtacaatatacattaactatagtcaccatactgtgcattaggtttccagaacttactcatcgtataacagaaagcatgtaccctttgaccaatacctccccttttcccacatcctccaacccctggtaatcaccattctatattctattctgttactatctataaatttgacttttttttttttttaaatatttgacataaaagtaagatcatgccatatttgtctttctgtgtctggcttatttcacttagcataatgtcttccaggttcatccatgttgtcacaaatggcaggatttccttcttttttaaggctgaataatattcctttgtgtgtgtgtcatgtgttgtgtgtgtgggtgtgtgtgtgtgtgtatgtatatatatatatatgtatatatatgtatatatgtatatatatatgtatatatgtatatatatatatatatacatacacacacacacacaccccccacattttctttatccattcatctgtttatggacacagcagtttccatatcctggctattgtgaataatggtgcaatgaacaagggaatgcaaatatctctttgagatagtgatttattttctttggatatatactcagaagtggagcacatggtagttctatttttaactttctgaggaacctcctaaccattttccatgatagctgtaccaatttacattcccatcaacagtgtacaattttcttctccacatcctctccaatacttgttctcttttgattttttgatagcagacatcctaactggtatgaggtgatatttcatcgtggttctgacttacattaccctgacaattactgatgttggtatcttctcaaacattgagttagatgagcatctcatacgttttggatattaaacccttatcaaatatgatttgccagtattttctcccattcagtagaatgccattttgttttgttgattgcttcctttgctgtccagaaaactttgtagtctgatgtagttccactgtttatttttgcttttgttgcctgtattttcatgtcaaatccaaaaaatcactgccaagaccaaagtcaaggatatttccccctatgttttcttctaggagttttacagttttaggtcttgcatttaagtctttaatccattttgaggtaattattgtgtacggtgtaaaataatttcaccatatttcatccaatttcattcttttgcatgtggatatccagtatttccaatactgtttattgaagacactatcctttccccattgtgtattcttggtgtctttgtcaaaaattagttgactatatatgtgtggatttacttgaagggtccttataagggggaatccttttaaagacaagggtacttataaggaggaggccaaaagccacagtcagaggagattttatgacagaacaggtcagatgaagagatgtgacgacgttatactgctggctttgaagatggagaaagacaccaagaaccaagcaaagcaggcatcccctagaagctggaaaattctcccctgaagtctctagaaggaatataatcctgctgacaccttgattttatcccaatgaaacccattttagatttttgacctctagaactgtaaaagaataaatgtataagtgtataagctagtaagtgtgtcataatttgttagcagcaataggaagataatatattaatgaatcacaacatgtggctgttatttggttcctaatttttcttaaaataacttactaaaagatttagaaatgtgaaccctgcacatgtgacatcaaggaattattgttttataattgtgatgaagttgaggttacattaataatttttttaaaagaacatatatctttgacacagtaactaggaagtcctggggatgaaacaatatgatatctgtgatttgtgacacagtgatggggcaggattggccacgggctgataagctttgtggctgaatttattttactgtctacctttacgtatgttcaatattctccatagtaaagtttctgtaattacagaaagcatgattcctaatggtgagatgttagaaaacacccttggtacccagaacacaaggaggcatactttcttttattcatcctcatcctaagggtcttagccaatacaccaaaaccaagcaaaactgttgttagtctgtgatatacatatagaaaaccttttaaaaatccacaaattggataaaaaatgtttttaattattatcataagcaggctagccataaaaatcaatataccaaatgccattttatttctatatgccaaaaaacataatttttaaaggcatagtggctcatacctatagtttcagctactcagaagactgaggccagagggtcacttgagcccaggaattggaggatgcagtgagctatgatcgtgccactacactccagcctgggcaacagagcaagatcctgtctccaaaataaataaataataaaaatacaaaagaacaaatagcatttatgatactctctaacactttaaattaccgaggagttggccaggcgcggtggctaacgcctgtaatcccagtactttgggaggccaaggcaggcggatcaccacaggtcaggagtttgagaccagcctggccaacatggtgaaaccccgtctctactaaaaatacaaaaattagctgggcatggtggcatacacctgtagtcccagctactctggaggctgaggcaggagaatcacttgaacccgggaggcggatgttgcagtgagctgagatcacgccactgcactccagcctggcgactgagtgagactccatctcaaaaaagaaattctgcttccttccattttctcagtgaagtcggaagcaatacatgcctcagctgacaatgatgattgcagaagaggtactagtaggaccaaggggagaggaaaagatgtagaatagttgtttaagtgaaagagtgaatgaactaagaaaatatagtatgactgtcaggcagcattaagggcccatataatggtcaggaatttaaaatgaagccagttaaagaggttttgtgtttttctccaaacaccttcagttgccctagtgtagctatagggtaggctgagtgggattaaccagtattgcatttttttttttttttttgagacgaaatctcattctctcacccaggccagagtgtagtgtcgcaatctcagctcactgcaaattctgcctaccaggttcaagggatcctcctacctcagcctcccgaatagctaggattacaggcatgcaccaccatacctggctaatttttttatttctttttttttttttttggtagagacagggtttcaccatgttggccaggctggtatcaaactcccaacctcaggtgatcggcccacttcagcctcccaaagtgctgggattacaggtgtgagccaccatgctcagcgcagtatagcattttatcaaataaggaccataaaacaagaatgaagacagaaaatagaattaagaatgaatgtaaggactaatatccagaatctacagggaactcaaatcagcaaggaaaaaaaaaccaaattatcccatcaaaaagtgggcaaagggcatgaataggcaatttccaaaagaagatatacaactggccaacaaacatatgaaaaaatgttcaccatcactaatcatcagggaaatgcaaattaaaaccacaatgagataccaccttacccctgcaagaatggccataattaaagagtcaaaaaacaatggatgttggtgtcatgtgatgtgatgaaaaaggaacactttaatactgctggtgtccactctgaaaaacagtatggagattccctaaagaatcctaaaagtagaactaccattccatccagcaatcccactactgggtatctatccaaaggaaaagaagtcattatataaaaaagacacagggacatgcacgtttatagcagcacaattcacatttgcaaagatatggaaccaacctaagtgcccattaaccaatgagtgaataaagaaaatgtggtatacatacaccatggattacttctcagccacaaaaaggaacaaaataatgtcttttacagcaacttggatgagctggaggccattattctaagtgaaactcagaaaatcaaagatcgtatgttctcacttataagttaggagctaagctataaggaatcaaaggcataagaatgataaaataaactttggggattcaaggggaaggttgggagagggttgagggataaaagactatatattggtagtgtacactgcttggatgacaggtgcactaaaatctcagaaatcaccaacaaaggacttatccacgtaaccaaaagccacctgtacccacaaaaccactgaaattataataaatttttttttaaaaaaagaatggatgtaaggatatgattaatgggtaagcttaatgaaacagatgtcacgtggggtggtaaaactcttcaagttcaaagaaatgaggttccgaatttagagttccggaatatcataatcaccaacagtaatgccactggtgaaagggtcaagccgggcacggtggttcacgcctgtaatcccaacactttgggaggccaaggcgggtggatcatctgaggtcaggagtttgagaccagcctggccaacatgacgaaaccctgtctctactaaaaatacaaaataagccgggcatggtggtgcgtgcctgtaatcccaggtactcaggaggctgaggcagaggaaccacctgaacccaggaggtggaggttgcagtgtgctgagatccattgcactccagcctgggcgacaagagcaaagacctgagcaaagagctgagaccactgcactccagcctgggcgacaagagcaaaactccacctcaaaaaaaaaaaaaaaaaaaaaaaaaaagaaagtgtgaatcaccagcaaccatacacctgtagtggtctgaattggtagtggcagcatttacaaccatgtaaccatcattatgtcttcatgggtagtcagtatgacatatttacatgttgaaatatattttacctcataaattatgtgtgattgtcctttatagtacagctaagacattatagaggtttttaaaatttatgtgtatcagatattatctataaattttatttcagaattgaaaagggagaaggggtaattaaaaggggcactgactctgacaggattgagaatcactgccctagtaaaattttttatgcatatgtaacaaggtgacaaaaaggacaatgttaagagtaaagaattaaaaacaacctggatgttcacctatatggcaggtaaatggaataggcaacatcaatatgtattaatgggtagataaacctcatctcttttggcaaactaaaaaatggcatatttcttaatagtttataggatatataattgaggtgacaccaatgttgggaagaatcctcctcagaatgcgaaaggggctatgattttgaattctgagaaaatacatgaaatgctagcacacagccctgcactacatagcgctacatagttataaatgttttcacttttttttttttctctcccctgagacagggtctggctctgttgcccaggctggagtacagtggcccaatcacggctcactgcagtctcaatatcctgggctaattttttggtagagatgaggtctcactatcttgctcaggctgtgttttctccattttttaacgtcaacttactctatggttgcagatgaaatgtaaatgttactaatcctcataatatacaaaagtaaaagtagagctggcaaataacaggatattgaagaggtttataaaagtagagaaaaggaatatggatattctaatctccctaggctcaagcacctccttcactaatttaccaggtctatggcctaaagcaatatacttatgtctccttttctacaaaaaaaggaaaataatagtatgctggtttcctaaggccatctcaaaaattaaatgagacaatgcaaataaagcatttgagacagtgcctggtactcactaaggactctgtaaatggtggttatcgtacttaactgtattttatgaggcaaattttattgccataatgccatttaaaaatttgagaactcctgaaattgcaggactgttcttagtaaaagtcaaatgtcagactacatatattacatatatgcctatttccatattttgaatcttcaattatgacttctccattgaacttgggaccccaactgtctatcatctcaacttgtaacagtcttctcacacctaacacagtaaaaactaaactttttacatccgtcacccaatttatttgttcttctctcagtcttccctatttcaataaatagcacaatctaacctactgctcaatcaaggcaattatccataattcctctctttctttcaaccctcaaacccaatccaccaggagctcctgtcggatctaccaccaaatcacagcccaaattttccacttctcagcattgccattgctatcaaaccaggcctagccacgattatctctctgctgcttctgttattcctttatagtcgactctccacaaagcagccaccctttacacacataaaaccccccactgtatttatttttttttagacaggaatttgttatgttgcccaggctggtctcaaactcctggcctcaagtgagccttctgtctcagcctcccaagtagctgggactacaggcataagccaccacgcccagttacctccaccatatttagaataaaatcctatgatgttatacctccaccatatttagaataaaatcctatgatgttatacctgcccagttactgccaccacatttagaataaaatcctatgactttacagctgcttcctcaacttcgtctttcttaacacctcactcatttaaactctagccaggctggctttatgttcctcaacaaaactagggtctctgaatttgctgtttcctctgcttcaatcattcttgactcttatgtttcttcagtgtctgcactcacatgtcacctttcttgaccacccaaagtagagtctcataatcatttcataccatgttgatttacaagcacatgctatctgaaatgatctaatttctatacctgtctacctctttctaatgcaatggcagggatctcactttcccatcttctgttaagtcaccttctcaatgaggtctttaacgaccaactatttaaaattccaacatatgcatcttgcctagtattccctattcccttcattgtttttttctccaaaccacttatcaccatctaacacactatacattttatttatctttcctgcttattcctctcctcctactagaatctaagtccacaaagacaaggatttgtctttttttcacattgtatctgcaatgcctagaagagtaagttcctgataataataggtcatcgataaatatcctaatgcagctgaatgaatgggccttgtcttgttcaaagctggatggatccttagcatcttgaatacccagcatacaggaggcactcaaatttactaacacaatgactgttaagacactcagattctgaagtactaccaattcaaagaaaaactgtattttgttcagtataaactgaaattgaagtatgattctatttgtatgttcaaaagctcctatgacacactttttaaaacagttaagtatgttttattgtatcttaagtaaaaaaaaaaaaaaaaaaaaaaaaaaaagattacccagttgggtaacttagcttataaaacttaaagcaacagattaattagaatgccctttccctagcaatgtcagaaaagtttctatgctatagaattcaacagaaagggaagaactagtgatttaggaaagagagcagaattgatggatcaatgtccttgagtaagcaagaaggcatggaatctaatactttcgtggagggaattgcataaatgaggaaaacaggcaatttatctattctaacaaggaaaaaggaagattatatggtcacagctacaaggaagtgtatagacaggtggtgggagactatggcagttctcttctgactgctgaaattgtcttgggctacattatctagtgaggagcatggagaaaatacgtagtgaaaacagaaaagaacccggatgagacccctgatggattctaactcttaaagaacagttaaaaacacagcaccgagtagaagtagggcttagaggcataacagaaaactagcatactgtggtatcacagaatatcagcgtgattgctcaactgtcattcactgaggtacatctgaggagtgaaatggcccaaagccaattcacaacagcccgtgtagaagatggcacaccaatcttaacttcggaaggggtgcaaacattaccaaagcgctgtctttctacaacagtctatgctgtagcataaaatcaactatcttgagtgtgaatatgtatatgcctttcttacagagtaaatttagcttgtttcttccaaagaaataatctcccaaatggtaatgatatattattaaattaccttttccccaaacgttttaaaaataataatcaagagatggtatgtaatgaagcatcgacgtgggtaactctcaaactttattgtccttgtaaaaagtctaacctttccaaaactcatctgggctttaccattaaatctgcgtcataattctagagtttgtctttcttctctttttgaataaaaggtttcaaagtacagcctattcgctggatcatgagaatatgttactaagaagaatcacttcatccatgggaagctgcagtcagcattttaaagcaacactgccaccagaagacaagaaagaaaagtaactactaacgactacggggcaagttaaatacaaaatatttacctggcctcccaacgcggctacattacaccctgcctaccaccaactcttcagaaaggctcattctttctcgcacctcatctttgtaactttttcccccccagcattagcctatctactaagacacatcaacctaaaatcgtatcctaatgtcctatctgttggtctgggtagtgtttacacaggtgaacacaaatgtcgaagtctttcactgatttttttttcaaaataagtgatcaacattgtgtcctagtaactccgcaacgtgtcacggaatcgctgaatttgtcattgtccacaagtgtagaaaaatgtggtcacaagtcagtcctcggctcgcgtacgaagaggcggtctgcccagtggggacgcgggacccccctgtttcccctatttttatttattttttactttttttgagacagagtctcactctgtcgcccaggctggagtgcagtggctcgatctcggctcactgcaacctctgcctgctagattcaagcgattctcctgcctcagcctcctgggtagctgggattacaggcgcccgccaccacgcccggctaatttttgtatttttagtagagacggggttgcaccatgttggtcaggctggtctcgaactcctgacctcgtgatccgcccgcctgtgcttcccaaagtgtgtttcccctcttaagcagtggttcggacgggagctttcccggcccggcgctcgcgtccgggattaaagggctgccgcggagggcgtgaccagcccagcctcgccgccgtcgcttacccggtagttgctcgaacccacccagccggtgagcgcgtcgactgtcttgcctaggcggcccaggtcctcctccaggtccgagatggcgccgggggcgccaaggtagagcaggagctcctggccgacctgcagccggccgccgacgtccttctgctgcacctgggcgcagaagtactccatgctgcggggctccatggctgcggccgcccgcccgcctgccagtctgtgagcggccaactttcgccgagagccgcccagcctccagtgcgggtccccgcgggagcgggcgggactcacttagcccgccaggggcgcggcttgcggggcgcagcgggcggcgggaggaacgccaagcgcccagccgcccccaaactagtcaaactcggcgccccccgatccccagcccgcttcagaggccgcggccgcgggcgacgtcagcacgcgcgtgacgtcagcacgacgccggcgagggccctccagtccggctagcgttttgctgcggaggtggtggaggtggctgcggaaaccgctgggagcgataggacctctagggagacttggggtccgagttgggccgagccccctgggaggcgggccgttctttgctagccgctgtcagggcaccctgccctcgccctgtgaaatgtggaacgtttccaagtttgcctccacttgtattcaacacttaggaaagtacttggcatccccctttcccgcccccactgccggtttaaaaaaaaaaaaaaaaaagaatacactcctgacttctgcttccagccaccaccacagtcactgtgtaatacttaaaaaaacaaaacaaaacaaaacttaggtttgcctaaagtaaaacgcacagattttcagcgtacacttcatgagtttcggcaaatgtattcacccgtggaaccgccaccccagtgagggtacagcacgtttccaacaccccaggaagtcccaggacacttcccaattatctgctcttccctaggcaattctaatttgatttctagcatggtaacatagttttccctgttcctgaacttcatacagtctgtgcttctttggagtctggtttcttttagcataacgtttggggtccatccagcgctgttggtgtctcagaagtccattcctttttattgctttccattctgtggaatcactaccatttgtcgatccattcacttgttggtagatatttgggttgtttcctattttttataattatgaataaagctgctacaacggttagtgcacaagtttttgtgtggatatattttcttctctcatgggtaaataaataccaaggactggcattactaggtcttgtaagttgtatgtttaactttagaagaacctgccaaattgtttaccaaagtgactggatcatattaaatccccaccagcaatgcttgagagttccagttgctccacaatatttgatatggtcagggttattagttttagccattctggtgggggtaaagttgtctaatacattccaaaagcacactgtgtttatcttcttgacaattattcccaatcacaacaaaatgattatttatgtaatatctttctcttctaatacacagaaagctccaggaacctttgtgttttcctagggtggtgcctagcaaataatgggtggccaatttaagttaaatgagtgaatgaattcaacaaaaattgatatttgaaatattcacaataactaagaataaacaaactcaaaattcaaagaaattgactgttttctgtgttcttttttcagtatttctgtgtttcacattgtattgagtttgtaaagtttcttccatctttaattggttgtaatttccctcagactatgcctcaatcaagtaaactatgtgtgatggttaattttatgtgtcaacttgactggggcaagagatgcccaaatagctggcaaaacattatttctgagtgtgtctgtgagagagtttatggaagagattatcatttgaattggtgagctgagtaaagcagatggcccttcccaatgtcagtggacatcatccaattcgttgaggcctgaacagaacacaagtgtggagaaaggccaaattcactctctctgctcgatcggaaacatccatcttttcctgctctcaaagatgggtgctcctggttctcaaactttagtattcagacagaaacttatatcatcagtcctccaattctcaggcctccagactaggactgtattacaccaccaggtttcctggttctccagcttgcaaacagcagacatgagacttcttgcctcccttaaccgtgtgagccaattcctataataattatcctctcattaggccaagtgcagtggttcacacttgtaatcccggcactttgggagactgaggtggaaggatcgcttaagcccaggagttcaagaccagcctgggcaacaaagtgagaccttgtctctccaaaaataaaatcaataaattagccaagcatggtggtgcacacctgtggtcccagctacatgggaggctgaggcaagaggatcacttgagcccaggaggtcgaggctgcagtgagctgtgtttgtgccacttcactccagcctgggtgacagagcaagaccctgtctcaaaaaaaaaattaaaaaattaaaaaaaatgattctccacatatctatctaccggttctgtttctctggagaaccctgactaatacattatggtaactattccttgggtttgagtgtccaaaggttctgttcttaaagggttgcagaaagatataaaaagaggatcctatccagaagaactttacactgtaattgctggtgaccaggtgcagtatgtggtatagaaaaaaaaaaatgcaggagccctggattctaggttcagctctacctgttcctgtgaccaaaggtgactgctgctcttcacccttggttgtctctattccctttctgaacttaatgtaaattgaaaatcacactaggtcatttttaagttataagttaactaaatcatctttaggagtaactctggaagaacctgtaaaattattattaattatcatttattgtgttttatttttagtagagatgaagtttcattgtgttgcccagattattctcgaactcctggcctcaagcaatcctcacactttggcctcccaaagtggtggtattacaagcataagccactgcacctggcctataaagttaatagtaaacattggtcactattacttatatattctttctgtgtttcattaattcattaacaaatatcctctgagcacctatattgtgctagatactgtgccaaagttccaaagacccaaaattcatttagacctggtctctgcccacaagctctagtagggacaagaaaatcaacatttctgagatgctgtgatagggtaaacagagggtttttgaaacctagatgagaggctccttatctagatagtacttagtatgggagtagaaaagttataaattaaagaaggcttcttggaagaggttatatttaaattgaactttgaggataactaggaattaactaattaaagaattggtttcctggggagttgcatgtttgtctacaagatgtagtctcaactattttgattaaccatttgttattatcagtatatacccactacaaaatctacatctttatttatatcactgttatctgtcctaggttcaacattgttagagctgaaagttcacaaaattgctagcacctcagtcattttttcacagcatccctagaccaaaagaaacacctaagaagtccactaaataggtgagatccaaacaacttagtatttatatcctagcaacttactaggcatatgaaaaaaatatgcaaatcaaaaattgtattttaaatttcattcttgaacaaccacacttacaaatgagatatcggtgcctactggttactgcccaatttctctaaccttggaatgagactgaatatcatcattctcatcctgttgcacatcaatactcaggcagttgagcacatcaatactcagcttggctaatttttctattttttgtagagacagggtctcattttgttgcccaggctggtcttgaactcctgggctcaaagatttgattgattttttttaaatcaacacaaccacaaaaaacacagccttgcaaagatatgacatcaacaaaaaaaatgtgctacaatacaaagacacgacatcaatgaaaaaaaatgtaccacaatctcatattgaaaccatgcactacttggagccattacatgtctcacaaatgcccatgatcaccattgcccttcaaaatttaaaatatcctggagtgctcttggtgtgtgtgcttcggcaccccagggtgctggccacacaatttgggaactttgacgcagacagatgcctgatgatgcccaagttttcagagagacaaagagaacaggaaacaaatggtaatcatgcaggaagaaggtatggattcaataaggactgggcttcacaaagactcatgcctaatcatgtgttagggcttttaatcctctaagcaaccctgtatggaagatattatatccccaacttagcaagcagaaagctgaggctcagagattaagttcccagactcactcatgatttcagatccatgattcaaacccaggatgtctggcttctgtggtctttcaaatagatagacttaaagaaaagaaaattggaagaagaaagttttgaattaactaccacaataataacactccttgcaaaacatattgtatttctttgaatatttatttatattttcatttaggacccgcctttctctgaatttctgctaaaaagaaaaaagaaaggaggtggagaaaatggggaggaattttaaaaaagaaaatggtgtaggaaatatctgcattcttttatgatcagtcactaaaatttatctgggaacagaagtctatttttaactggcaacaagactgaaatagatcatttaaatacagcagactgacttcctgacttatttgttcattatttgtgataatagtggaaactttgagtagactttgttctgccactggattttattttccatacgaaggctaggagacaaataaatcatcacacagctggtttgaaatcatgcttcagcaaatatccttcaagaagggcattgtgttaggtactggggtgggggtgggggaatagatgggagtgtcttgccaaagatttatcacaatctttctttaaaggttaaaagggatatacatatatatgaatgttcatagtagctttattcattataacccaaactggaaacaacccatatatccatcaactggaaaatagataaatgtggtttccattgtatgccatacaatggaattctacaaagcagtaaaaaccaaactactgatatattcaacaatgaggctaagtcttttaaaaaatcacattcagcacatgaagccagacacagaagagtacatattgtgtaattccatttacatgaactactaatgtaggaaaaacttactgacggtgatggaagttaaatagtgggtatcacaaaagaagggagtcagtggacattgactagaaaagggcctgagacagctttctgcactgatggaaatgttctgtatcttgatctgggtggtgatgataagagcatatgcattggtaaaaattcagcaagttctgtgcttaagataagtacatgatgcatttactatatgcatgttgtacccaaaaaaggactggggggtggagattcagaacaagatatttaaaaagaaaaaaggagataaagcagttacagtctatttcagtgatagacaatagaaatataatatatatgtgagcatatagtatacataattcaaatttttctagtatacacattttagaaagttaaaaaaaggtaaagttgtatttactaatatataaattatatttaatagtattttatatagcaatatttaaaaaatatttaataaagttctgttatcatgttttagtatgcctttattaaatatcttttttttttagataaggtatcattttgtcacccaggctggagtgtagtggcaagatcacagctcactgcaacctcaaattcctaggctcaagcaaccatctcactttagccccctggatagctaggactacagatgtaccaccacatctagctaatttttttctattttttgtagacaaggggtctcacagtgttgcccaggctggtcttgaactcctgggcttaagcaatcctcctgcctcgggctcccaaagtgctgtgattacaggcgtgaatcactgtacccggcctaaatttcatattaataatatattatttatacttaataatattttatttatattcaaataatatcatttaagcctgtgattaaaacaaaaaaattatataaaatattttacatattagtgcaagtttcttgggaaaacccaggttctgatactaatggctttgtaaatgtaataaagtcatctattaccttctcggagcttcattgtttcagtctaaataatgcagattcataatgattgttgggagagatactcttccatgagtcttgcacatgttttgctaggtatgccaagaatacaaggccctgactactcattacctgggctatttctctgggttatgtttgcagcgagcaatcttgagggatgaaataatgtctccctcccagacagagaacagatttgcttactgctttctgtaaaattgcagaatccccaattcagtgtttctctccatgaggtttgggaggcaaagtgtatgagtttatgctacttgctgtgctgtgagtaaaaaagtcctttgtccctgacccaggagtctcaggtcttctgccagcatcaatgaaatagtcataggctaagttattagtttgtaaacagggtttaaaaactcctgtcacccaccaccaaaggctatttttttcttttcttttatggtaataatcaaattgaatctattacaaagtgaaatgactccataaatgtagtaaatatatttttataccaatattagttggcaccaatattaagaaagttaagctaggaaggccaaataaagcttcatacattgctacagaaattaataaagatgcaatacacttgtccaagcaatatttgcaataaaattatttctgtgagtaaatacacttgtcccaacaatgtttgcaataaaatcattttctgggagttaaatatttgcttattgatttccaatgaaagaaagtcaaaggtaggttcccaatgagtgcaatgcttcgttgaagaaagtgactaggagttaaaattgagagttgcagagtttctacccccttgcctattgaaaagacttctcatctctgtaccaccaatggcttcaattctcctaacatcccactattccctcaaggtgcagaaagacttattcatgcaacccttcaatttggaaatacctttgggcctcctaccattttcaagaatttgagctaagctcttataaagtataattcaaatccagaaggaatttaaattcttccgtgggagaaaaattcaactccaaaaatgtgtaaattataaatgctaaatataggaatagtcataaactggtatggtccaagctgggagagagtactcttacatggaagattcaagagaagcttcttgatatgggagcaaatggggtgagtgggacaatgggggtgatttcagcagggagaggcagaaaagaaaccccaagaatgagaagtctggaggccgaaggaggaaatgccaggcagagttcagtaatcatggccacgctagttcagctgctttctgggacctatatgagagagttcttgttggaatttttaagtcctaaaaaggttttgtcacatgcatgtaataaggaaaataaaacaatataccactttttcacgacagtcaatgtcttgttttccataaaagccaggagaaatagaacatttttatgtgcaattaatgacaggaaaatttggtgctttgatgttgccggggtgtccagtgatgttttcctgtcaaatgtatcaaaaacatgtcagacggtggtaagatagaccgtgaaaacattactgctacccattgtattaacatgacctttcttgcctagtctgcaaggatccacccagccagtattttcaaaactaaattttccaccttatgaaagacctgaaaaatgttttgtgacaaaaagttattcattaactcccataaaataaattcccatcccagttgcctatgaccagatgttttgttccaaatgacaccttttccatttcatttagcagagttttcttttttcttttcttttcttttttttttttttttttttgagatggagtctcgctctgtcacccaggctggagtgcagtggcgtgatctcagctcaccgcaacctctgcctcctgggttcaagagattctcctgccccactctcccgagtagctgggactacaggcgcgcaccaccatgcctggctaatttttttgtatttttagtagagtcggggtttcaccatgttggtcagactggtctcaaaatcctgacctcaagtgatccacacaccttgggctcccaaaatactgggattacaggcgtgagccaccatgcctgacccatttagcagagttttctgataggaaaaatgtactgaaaagtttgtgttgcaaatttggtttctatatgattttctatattagtttatctattgccgcgtaacagattatcttcatgttaatggtttaaagcaacaacacatatttattatctcacagattttgatgggccagaagtttgagagcagtttacccagatggttttggctcaggttctttcatgaagttagaatcaagatgtcagccatggaaaggtggctcattcccacggttgctggcaggaggcctcacttccttacctcaagggtctctccatagggctaccatgattgtcttcctgacatggcagccaacttgctccaaagtgagtaatccaagaaataccaaggagaaagtcacaatatcttttattacccaatctcagaagtcacacaccatcttttccaccatagtctactgttgatgtaagtcagtcttattcagtgtggaagagaactatgctaggacataaaaaactggaggcaaagatgaggaccatttcggaagctgactatcacaccatctttaattgtaatacttttttacattgtattttcatataggagcatgagtcaatggttaaaaggagtaagtattttttttttcaagaacacatgccctgtatcaaataccattgtagaaaagtatgtgagtataaactgctgcataaatgggcagaatcaagtgggcagggccaacagccccaggcaaggtgcaaggccagcaatggacggtggagtatatgggcacaactactggccttggagatcctttatcatctgagaaattgcttgggagattatccctgagctagtggtgaaaatcatgatgagtgcagtggctacaaggatgccgaagatcaggacatagatgttcaggcactttgcagtggaagcatggtagggccccagtcaggttgccaaccatcttcctgtccctagatttcacagagtaggccagtgctatgaagctcaggcagcatcagttcaacgaagagcgaattgaacagggaccagacaacaaggtcagacatggtggtatcactgtggttgtggatcacggtggatgtggaggagagctatggggcactctcagcagggccactttgttctccccaaaaggagtaagttttaattttaagtttgaaacagtgaaaatagaaaatattcagaaaaacctgaaattactgagattactgacagcctgaactgtggtcgttggtattccagtcaccattctaataagctgaagtccatccagaatgtacaggatatgcttagaagtttacttataatacaaatttccattattatggatatgtgagtgagcctaaagattggtatttgttatttgagaaaactgagtaataatttcctgaaaccattattatttcttttttttttttttttttttttgagacagagtcttgctctgttgcccaggctggagtgcagtggtgtgacagctcactgcaacctccacctcccaggttcaagcaattctcctgcctcagcctcccaagtagctggggttacaggcacctgctaccacgcatggcgaattttttttttttttttttttagtagagacaaggtttcaccatgttggccaagctggtctcaaacttctgacctcaagcgatccacccgcctcggcctcccagagtgctgggattacaggtgtgagcctctttgcctggccatgaaaccattatatttgaaatgacatttaacaaccaattttacaaacttttaaagaaaactatgatcacttttttcagttacagagaaggctgagtggagtattataattaaatgtactaaaaaattaaacatgctaatcattaaaaattgcataaatcttcaaaagaggttgttgaattgccttaggaaactgaagtttataaaaaagaagaaaaattagtgacaccctaaaaggtagatatgtccatatctgtttaggtcaaaagaggccgccagtcatttaaaaaatatgttcttataaaagcggcatagttaatgcacacattcgaatatttattttttttaaaaagtcatatgtaacccagttctttttcttatatttggatgaatgcatgattgttattgattaggcaattgtttattttatttgtaatggtgatgtctgtgaagatgcatgttagtaaaataactggtgaaaacattttcaaccagatagtaaagtattttaacacagataattttctggaaaagaatctatggaagtatgcagagataaagccaaatacctgacggaacttcatgaagaggttacccatttcaaggtttctgcccaagaatactttgttgcagaaaatttatttttatattttctcagaggagtagtaaagaagtaaatgttgctttaaaaaagtaaatggcttatttgatttttgagtcaaatttataacgaacatgttgattttgaaagctttctttactgtatagatgtatactgccttagccaagagtagctgctggtcagaattttctatctcaaggttgaatttttatttttctttgtggaaaaaaaaaaaaggtatgtctcctattgggtctttgaagaaccccgactaatacagaactattaaaactttttgaggcaggtgcagtggctcacacctataattgcagcactttggaagggtgaagtgggaggatcactttgagtccttccacttcaggattacaggagttcaagaccagcctaggcaacatagtgagatcccatctctacaaaaaagaaaaaaattctttttgaaaaaactagaattatggccaaaagaaggccagggatgagaccccctacaaaagttcaatgcaattgtctagacaaagaataatgacagcctccacaaagataaatgggtacctatactgctttccacctgatccacacaaagcaccagtcataaaagggaaagtatatactgaatactaaacagtcaacatatgcaaacttttgtatttttattaagcagactcttagcatttactaagagctgggtactgtacaatataggctcatttaatcctcataataaacttacgaggtagatactatgaatattcccaatggacagatggggatatagaggcaaagggagactaggtaacttccccatgttcaccctgctattgaatgtcaaagccaaaatttgagtccaagtaatcctgccccaaatcccttgtcttagctatgctcatttaggggaggaaactacacagtttgggtggtgatactcaagatatacagtttaagtcatcatttggagataaaaaatataaacaggtgaggagagatgtattttctagtcccgaatcattcagagctcctagatgcatttgtgcaacagaatttgatatgtgtattaaaaaaattgctaagcacagcaaaccatccgtgaagcagttttattagctccaccttggttgatgcctaggccaaaataaataaataaataaggacctgtacttatgaaggcaaactttagttaaatatatgcagaatatctgtagaaatctatactgcagttggaaaatataaatacatttatcacattttgcattggcattctgggagaggtgaagtgaaagacacttcagttttctatttatatttgtggccccaacgaaaatgttgcggtttccagacaactgaaatcagttcagttaatgaaagatcacacagctggccaggcccactggctcacacctgtaattccaggactttgggaggccaaggtaggaggttagcttgaggccaggagttcgtagaccatcctgggcaacaaagtgagaccctgtctctaaaagtaaaatagaaaaagaaagatcacacagctaaaaaatattgatgagtgacagagggaaattcacaattgtaaacactagtgaagctgaaaatctgttaggaaaaaccattagattcgttttttaaagaaacagcaactaatgccaaatagattatcatcttcctaagttataagagagagataactataactaatttaaataattaatttaaggaacattccagaagttatttgataatcgtatttagtctgcttcttggaattttgtaagcattttacatatgtgtattttgtcatttaattcctatgacaaccctatgagtttcaattattatcatcatccttctgtagatgaataaattgaagcacagagaataaaagccatgtaattaattagcttagggaaaggagtttcaaaactgtcagtccttcgactgtgcccctacctacagaccattctatacactcaattcctgcatttctctttttgatggttttctccggcaatgaaattatggctggggagttaagacccgaggggcgaccctcaacagaaagggggtgtaggaattgaactataagttctccagcttacttgcctctctgtgagacacttctaagtattctacactgctccagagggcttaagtcccagttgcctcctacagtaactcattcattaacaccacctttcttgtctatccttccttgcaagtctcatttccccactctctcaccacctgtccagagattatctcctgaatcaagtacttgcacccgaatccttacttctggaagaacccaggctaagacaaaatccaatcaagtctgaccccagcacccagcctctggatatctatgctctctaagagctgttgtcaccatggtccctctggggaggtatacacttattttactgcctcaggaaaaaacttgacatttgaaatttgccactgagactatactttatcttgtaccactagggccctaaaaacttgtatccaggaaaaggagatacagcctggtacccaagaccctttcacaggctgggctagtgcctgcttctaggctaccctggtatgtatctctatcctctcaaccatagttgctgctctgcctcggcctcagctatttgttcctgctgggtcctcctggggtctactgtggctctatgaagaccagccttggtggccctcggctgccaaagacccagctccagaacaggcctgcttctcccacttctctctccctgcaccatctacacctgcaccttctcaggtgcagttgctgccactgcattgttcatgctaaggaaacttcagttctgcccactattgcttttgtatcatcagggcaaatgtcaacacaatgcaaatggcagataatgtcttagtattattatgaaaataattttgactcatgttgaaaaccactgtactggaacatctgtagtgggttgaattatggcctcccaaaaagtatgtctgtatcctagcccccagaacctgtgaatgtgacgttacagtatttggaaaaagatctttgcagatgtaattaagtcaaggatctcagggtgacatcttcctggattagggatgacgtccttagacctcaaaggtcttagaagagaaggggagtagatagacacagagggaaaaaagccacgtgaagacagaagcagagattggtgatatgtctacaagctaaagaacaccaagaattgctggcaaccagaagccaagagagaggcatggaagggattgtccctcagagcctccagaaggaaaaaaccaaccctgctgccccttgattttggacttctggcctccagagctgtgagagaatagatttctgttgtaagccaagttcatagcaattagttatggcagtcctaggaaactaatactccatccagcatggtgctttctcctttgaccacatctcatgtccctgatttctgattccttttactgcatctacccatgagccaaaaaatacagcaaaactttttccctccaaaataacagtaaataagataacctacagatagtcacagaagtccttgttttcaatcatactacatgtaagccgtattagtccattctttcattgctataaagaattacctgagactggataatttataaagaaaagaggtttatttgtcccatgattccataggctgtacaggaagcatgatgctggcatctgcttggcttctggggaggcctcaggaaacttacaatcatgatggaaagagaaaggggagcagtacctcacatggccagagagggagcaagagagagagagaggggaggtgctacacacttttataaaaaccggatctcatgagaactcacaatctcaaggacagcatcaaagggatggtgctaaaccatttatgagaaacatgcccccatgatccaatcacctcccaccagaccccacttccaacattggcgattacaattctacacgagatttgggtggagacacagatccaaatcacataagcccttgtagaaagatgttattttaggccagttggcatatagcactgaaatattcaattaaaatatagatacacagatgtcaatttaggtaccatcttagtaggaccaactcttatgggcaacctctcagagcatcagcatattttattataattatctgaccccctactccactgccagtgattctagggcagggtgtacctaattcatctttttatctttagagcagagcacagggctttatgtaaagtggattttccataaattagtttaggaaagaggccagaggtcatatgatgcttgcagaccaaatgtagcacacaaacatatattattgggctcatacagtgtcattgtttctttttgtttgttttgttgtgtttttttcttttctttcttttcttttttttttttttttttttgtatttttagtagagtcgaggtttaaccgtgttggccaggctggtctcaaactcctgacctcatgattcgcccacctcggcctcccagagtgctgggattacaggcgtgagccacagcgcctgggccatgtcattgttttttaaaattgaagttagttggtcaggcgcggtggctcacgcctgtaatcccagcactttgggaggccgaggcgggcagatcacgaggtcaggaatcgcgaccatcctggctaacacggtgaaaccccgtctctactaaaaaaaaaaaaaaaaaaaatacaaaaaaattagctgggcgtggtggcgggcgcctgtagtcccagctgctcaggaggctgaggcaggagaatggcgtgaacccaggaggcggagcttgcagtgagcggagattgagccactgcactccagcctgggcgactgagcgagactctgtctcaaaaaaaaaaaaaaaaaattagagttagttttcaatttttaaaatgccgtggagcccacatagaaatttggaatactactttcttttgggaaatgggaaagtcttgcaatattaagcccactttcccgaaaggcaacacttagcttgagttgagcagtggtttcaccctccagaagcggccttgaccttccaatgcctttcagttttctcgcgcctaccctctcattgatgtttccaacctgagtccaaacatgagctgccacatttacttgacaccccggtttggggaacaatatcatggtattcacaagtcagagaagctttagtatcctgtatttccttaccatagcatttagcattcaggctaagtgcacgaaggctgacttttcttttagttgttttgtgtgtgtgtgtgtatctgaagtaattgatagtgaaatcattctatcctctttggactttactttcctaatatcttagtcagatctttgatagtcagtgagactctcactccaagagtagaagtacaacctttctcttttaaagtattgcaaaagcctcctcaaaaaatgattccctggtgttctgaagtcacgtttgcgtcctcccaaaattcatatgccaaagtcccaaccaccaatgtgatagtattaggatatagggcctttaggaggtaattaggtttagatgaggtcatgaagatggggtcctcctgatagaattagtgtggggttaaaagagaagaccagagagtgttctcccatccccaccccatgtgagaacacagcaagaagactgccatctgccagaagaggacccacacagaacccaaccatgctggcactctaatgctggacaatagaaataaatgtctattgtttaagccacccagcctatagcattttgttatagcagcccaagctgactaaaacccccggcttccctttgactttttctgcactttgcaaccgatgatctttcccagatagatttaatactgttcctttactgaaaaaccttcagtaacctcccattgctgaaagacagattacaaatttctggcctagctcctatgatttctccaggctttgtataccttacatccccagtcacaagaaactagttgctgtttcttgaaaaacccaaagcctttcttatgtccctggaatacatacagtgactccctggtctcaggaattgcctgcaccattctaaaagttttcaggtcgtgaatagcttacttttccttaataccaaagcctacttgttaagtctttaaaaagaaggatggagtagaagagatttaatgtgctgttaaaaagaaaagttcacccagccaatttttccaagtccatagaataccttggatttgaaccaaagtgagtgggtgaacagcttctcagctatgacacatagggaatttaatgaacccatttttcagactctctgttttaatactaagattttccaagaagcctcagacacagtcagtaactctgttcctgccattgcaaattgctattgggaacaataatatatagcagaagaccagactaagactcacaatgtctgggctctggttctgcctttgcctcttcctcgttttgcattttcacgtgactcacataacttctcccatattttgattgtatattgttttataaaagccccttataaagaaattttaaagtgctgttagcttccttagagtaatccagttatcggaaggatctagataagattgggcttttgtacgctacaatgttcatattctagaccttagggaaagggaaacccagtgtccctgccaagatgtgtggctcttctctgtggagtcatggtctcatggttcttctggttctggctgcctccactgacttcttgctttccattctgcaacttcatctctaccctgtctgcaatccattccttagttttaatactaaacaaaaaatttcctatttacccgaggttttgagttggtggcagtctacgatcaatgtttagggaggtggagccacatagtcatcttaagatcaaacatcagatattcttcttagtagtcttttggctacatcctttgtttctgtactcacttctctcttccctgtgcttgcctttcagagttaaaaaatatatgtaaaaaaaattctttctatgtccttctatagagcagcttaaccttcttaagctcctgcttcccaaagcccctctaagccttcatccagaacttttatgatttcctttttttcagacataaatctttggattatctgatatttggttttctttaaggataactttttaatgttttattgttttgtagaaaccaacacaaagagataggatataaattagcaaacagaccaaaaaaagaaatgaattaactgactgaaaaacaaagatcaacaggagcatcttcctcagaatgaagcccacaaaactgtgtcaccaggtgcagtgaacatactggtaccccgttcagatcccctcagaatctcctcaggctatactgcaaccttctttgaaggatggcccctgggctattggagccacctccagttagaaggttggagatgcctgggagttcacatcccccaaaatagctggtagccagccactgactagcatacaaaagcccagctccctagcctcaagacaggatgaactcacagatgtatcttatgctacacagctctccacaggatcagagtgagtccaggaagtcatctaaacctgtaccctgcttgtctgcatcccctttcctatcctgcttccttcactcccttgctagtttgacctaggtgcaatttcttaataaatcacttccacctgaaactttggctcagagtcctgggagaagtcagtcgaagacactaggtattccattttggtggacagacaacgtgggaattcatcctttcatacatgtacattgaatacctcttatacatactgagtactattaaaacaccttcatgtttatatgtatgatacagttcatacttgcatgaaaagtacaaatttattaataagatgtggagactcacagtatgatttgagaccacatatcacttattcatgcagaaaatattaaatatcccctaaatacacatggtgggttcccaaagagatggggaagaagtgcccatagcttcatgatcaggaaagtcttggagtgggtcttatgttctgggttttagaaggcagataacatttccaaacaaaaagttggaagtggagggtatgttaactgagggaaatagtatgggtagttggacatgtaaggttgagaacacaaagaaagccatagtggcaaacgggttcctgagaggatcccctgtcttctgaaagactgaatctctgctatataacttcaacctttactcacccacccatatctcatggtcatataatatgattcggatcagtgggtcattctgctcttgcataatggacacacatcttaggggacatgttcaggtatacagaaaacattacatattttttcctgtataattgttcttgtaaacctccattccactggggtggtagaaatgtaatcttcattaaattgtgtgtccctctagctacaccttctttctcaagttgcatcatctaagttccaggagcctttgggggaatttagtagggccctgataaccttcaactcagcatctgatacctaggttatcaggcataggcaaatcgctgctgagttgaccctaattcctatactcaagctgccttcaggtcccactgctattcccatgctacactatagcatgatacactctagcactctgggagttggctttcatgttctcccagagtgggtaagaggcaaggtctcatttttccttaaactcccatcatttccctttcccctcttcttttccctgtactcataaaataatatttagtgacaaggcaggagttggtgcaaatattattcagtttttttccctcccaaacattgtttattcattgagcactttccatccttaagggttttgaaactctgaagtgagaaagagacatcctgttctctttctgctctcatagctcgaaatggagggtggaagaaaacataaaaaataacagggcagggaatagagtgaggcatctgaggtacctacagcacaaaatgtaaggacatactcactctcaggatcatataaatgctcactctacagaactctgagaatgagagcctcctaaattttgtgccctaaacacatcacttgcctcaccctaatcccagacttggaaagaaataccaatcattaccaaaaaagcagttaagaataaaaattttagcctgacatagataaaataaatgtcaacagtggctctctcttcatagtggatgattgatgatatctatgttctttattctattgaatatttttaataattttctccaataaacatgtaataattctataattaaaaataaaactacataaaataaaattactgtaaaatattgacaattaggaaagctaggtgaggtatgtatgggggttctttgtactattcttacagtttttctgtgagcttgagattatttcaaattaaaaatttgtttaagtcatgaaaaatcaaaagctttattcaaaattttaaaaatatatattaaaatagttaaaacccccctggtccaaagtatgttggagaccgtcccaaaatatttgtaagtcttggaggtcaacatagtttctccaactttgcctatatgggctacttggtggctgtttggatcaccaaatttaggaaactttaaaaaaagattcatttacatttttatagtgaataaaggttagtgtgtgtgaaacagatgatgttacttgaagactttcgaaaagaatttctatacagcttgagctgtaggtcaagctctacatccagtggagtttttatttttattttttggtttattttctaatgttatacctgctaaagtagttgaccttaagctccactccagatcatttggactggcagcatgttttggttatcactgttagctactcctcaatatatgatcaagtgtaagccctgaaatcactaagcaatttctcactgatgccattttcaacactacatgaacatatgccccatactagaaaggtaaatatttcaacttggaatagagaaaaaatggattctttttgtttgtttttgtttttgagatgaagtcttcctctgttgcccaggctggagtgcagtggcgatctcggctcactgcaacatttgcctcccggattcaagcgattctcctgcctcagcctcccgagtagctgggattataggtgcccgccaccacgcccggctaatttttgtatttttagtagagacagggtttcaccatgttggccaggctggtctcgaactcctgatctcaggtgacctgcccttagcaaatttcaagtatacaatatagtattaactgctgtcactatgctgtacaatagatatccagaacttatgcatcttgtctagctgaaactttatactctgtgaccaaccggggctgggttggagggatgtgggttttaaatgtatgggtaaaatatgggatatgggtaaaaaaagaatacactttatgctttggagaagttttaggtttacaacaaaattaaacaaaaactgcagaaaattcccagatactttctaccacacatatgcacagcctctccaactatcaacatcttccagagaatggtagacttgttacaatcaatgtacctacattgacaactctgtgtcacccgtagtccatagtttaccttaagtttcactcttatgttgtacattcagtgggttttgacacgtctatactggcatgtatccactattatatgaaatggctatgtaactattctgaatggtattataatagtgagaatagatcctctgtgcttcacttatttgtcactccttcacattaacctctggcaaccactgatccttttattgtcttcatagttttgccttttccaggatgtcacatagttggaatcaggcagtatgtagccttttcagattagcttctttcacttagtaatatgtacctaagtttcccccctgtctttttatggctcagtagctcattctttttagtgctgaatatgattccatcgttggatgtactacagtttatccattcatctactgaaggacatcttggtagctgccaagtttttggcaattatgaattaagttgctttaaacatgagtgtacgggttttgtgtggacataagttttcagctcctttgggtaaataccaaggagtatgtttaattttctaagaaactgccaaactgtcttccaaagtggctatctcattttgcaataaatgagagttcacatccttgccagcatttggtattgtcagtgttttgagttttggctgttctaatagatgtgtagaggtatctcattgttgttttaatttgcatttccctaatgatatgtgatgtggaacatctcttaacatgcttatttcccatttgtgtatcttccttgaaaaggtatctgttcagagtatttgccaatctcccttccaacttaattgagacaaattaatgacaaattaaacttaatgacaaattaaaaattatatattttaaaagtgtacaatgtactattttggtatatgtatacactgtaaagtgattaccactatcaagctaattaacatatccattacctcatatggttacctttttttggtgagaatatttaagttctactttcttagtgaattccaagtatatgatatgttattgttaactatagtcactatgctatacattagatctccagaacttatttcttctgcataactgaatctttgtatcctttgaccaacatttccccatttcctctgtcctatatcccgtggcaaacaccattcattctaccttctgcttctatgagttcgacttgtttagattctacataaaagagttatcatgcagtattcatctttctgtgcctggcttatttaacttagcatcatgtcctccaaattcacctatgttgttgcaaatgacaggatttcctacttttttttttttttttttttgagacggagtctctgtcgcccaggctggagggcagtggcgcaatctcggctcactggaagctcacctcctgggttcacgccattctcctgcctcagcctccggagtagctgggactacaggcgcctgctaccacgcccggctaattttttctgtatttttttagtagagacggggtttcacagtgttagccaggatggtctccatctcccgacctcgtgatccgcccaccttggcctcccaaaatgctgggattacaggcgtgagccaccgcgaccggctgatttcctactttttaaaggtagaataatattccattgtgtatatgtgtaaatatgtgtgtgtgtgtgtgtgtgtgtgtgtgtgtgtgtgtgctgcaatgcatctgggaatgtagatatcttttcaagatactgattttatgtcttttggatgtgtttccagaaatggaattgctggatcatagagtagtactagttttaattatttgaggaagctctatatggttttccatagtggctgtgccaatttacattcccaccaaccgtatacaagaatttcaatttctgtatatgcttgccaacatttgctatcttttgatgttttgataatagccattctaaggtataaggtaatatctcatttcagttttgctttattttctttatttttttgagatggagtctcactctgtcacccaggctggagtgcagtggcacgattatggttcagtgcaacctccatctccctggttcaagcaattcttctgcctcaggctcctgagtaactgggattacaagcatgcaccaccactcccggctaatttttgtatttttagtagagacagggttccaccatattggccaggctagtctcaaattcctgacctcaggtgatccgcccacctcagcctcccaaagcgctgggattataggtgtgagccactgtgcctgccttagttttgattttcatttccctgatgattagtgatgttgagcattttctttcatgtactgtttggccatttatatgtcttctttttaaactatttttagttgtttaaatttatggcatagtatgtcttcatctaagaaatgtctattcaggtcttttccccatttttaaattgtgtttatctgttttctcgctattgagttcttgttcattttcttattattaacttttaagagttcattgtatatttttattaatagtcctttattaaatatgcattttgcaaatattttctcccagtctatggcttgtttgttttctcattctcttgacagtgttccacagagcagaagttttcattttaattaagtccagcttatcaattatttatttcatggaccatcactttggtgttgtatctaaaaagtcatcactatgcccaaagtcatctagattctctcctgtgttgtcttctaggagtgttatggttttgcattttacatttcgttctatggtctattttgaatcagttttcgtgaagggtgtaaagtctgtgtctagattcatttttttctatgtgtccagttgttccaatatcatttgttgaaaagactatgttttctacattgtattacctttgctcctttgtcaaaaatcagttgcctgtatttatatgtgggtctatttctgggatgtctattattctgttctgttgatctactgtctattcttttgccaataacactgcttggtgctgtactttatagcaagtcttaaaagtcgaatagtttcaattctccaactttgcttttatctaatattgtgttagttattttgggtcttttgggtctttgtataaactttagaatcagtttgttgaaaacaacaaaataacttactaggattttgactgggattgtgttgaatctagagaataaattaagaaaaatagctatcttgataatagtgagtcttcctacccatgaacatgaactatctctttattgttttagttcttcttggatttccctatcagagctttgtagtttctttcatatagatcttgttgctgcccttttaaaagtatatacatagaaagacatatatgtaatgtgttgcaatttatgtttaaagttttcccaactatttattttattactctacttgcataacatggtaaaataaaaccaagctattggccaatttctgaaagtttcccataaacaacaattaggtggtgacaattgctataaatggtggcaacttttgatcaagactgtcatggaagggccctgtagatatgtttcatttccaacaagaatatgacatcatggctaacataaactgtactaacattgatagttacagctggttacaattccgaatctctttcatgaagctagcaaggcaggtgaaataattttttaaagtcttataatggttaagatcaagaaatatagaaatacatggaaaagtgttaggagtgttcctgattactgattaaaggagactaaagagacatgacaattaaatgtagtgcattattctggactggcagaaacacagcaatagaaggtgaattaaaatccataaactttaatatggatagtgaactagataatagtattgtatcaatgttaaatttcctgattttgataattgcacagtgcttatctaagagaatctcctagtactttagaaatacacactgaagtatttaatggtacaatgtttcccttttccaaatgatacagaaagaatacatacatttgcatatacaaagtgagaatgataaagcaaatgcagacaaatgtacgcaaactgggtaaagagtatatgaaaatctgtacgagtccttgcaatttttctgtaagttaagaaaggtttgcaactatgggacaggcatggtggctcacgcctgtaatcccagcactttgagagactgaggcaggtggatcacttgagttcaggagtttgagaccagcctggccaaaatggtgaaaccgcatctctactaaaaacacacaaaaaattagcttggtgtggtggcgcatgcctgcaatcccagctacttgggaggctgaggcatgagaatcacttgaacccaggcagtgtaggttgtggtgagccgagattgcaccactgcactccagcctgggcgacagagggagacaccatctcacatacacaaacacacacacacaggtttacaactatgtctttgacatagtttcttgatttcattctaataatctagatttttttttttttttatctcactcaatagctgcagttagactatttggcctaaatatgtaaacataagaggaaaattttttaagtatcacatactgttctaacaatacatagctgctagatgggatatataaacttgaagagaaagaaaagtttcttcatagaatcttacaccattttgttctgctattcatgatattaactctgattaaagatgacagggctgtaagtagttttttcctttagtgaaggagatctgggagaagatggtatatctctttcttttcatgagaaattggaagcatttaggagtaaagggctgtgacatcagcaattttactcacaaatgatccagaaaataaaaatatgagagaggtccgggcatggtggctcacgcctgtaatcccagcactttgggaggctgaggcaggcagatcacgagatcaagagatcgagaccatcctggctaaggctgtgaaaccctgtctctactaaaaatacaaaaaaattagctgggactggtggcaggcgcctgtagtcccagctgctcgggaggctgaggcaggagaatggtgtgaacccgggaggcggagcttgcagtgagccgagatcgcgccactgcactccagcctgggcaacagcgagactccgtctcaaaaaaaaaaaaaaaaaaaaaaaaagagagaatgagaaagagagagagagagactaataaagcaaaggtggcataactttaacaagtggtgaattgcaataaagagtatacaagaagccgggcgccgtggctcatgcctgtaatcccagcactttgggaggctgagacaggcggatcacaatgtcaggagatcgagaccatcctggctaacatggtgaaactccgtctctactaaaaatacaaaaaattagccgggcgtgttggtgggtgcctgtagccccagctactctggaggctgaggcaggagaatggcgtgaacccgggaggcggagcttgcagtgagcggggatcgcaccattgcactccagcttggcgaacagagcgagactcagtcgcaaaaaaaaaaaaaaaaaaaaaaaaaaaggatacaatagttctttgtaccatctctttctctctcttgaaatttttctgttttttaaaaattatttcaaaattttaaaattacaggaaaatatcaacaaatatattatgaattctcatatagtcccttctcctcataaccctcattctctattatcactactaattccaggtaacatgatcgtctttataagttgtctacaatggcaaatgcctaactccacctcagtttgctactgcatttttctcagcctgcatctcaaacactgtgactacctatacgtgagtatgagtcagttgagaacttcaatgttcagagaaaatccatcaggattggtcagaatggccaggatcatttggcagcttatacaattaagcaagtgtgtagcatcaatatgccctttttgtgtgtgtgtgagaaggagtctcgctctgtcgcccggactggagtgcagtggtgcgatctcggctcactgcaagctccgcctcccgggttcacgccattctcctgcctcagcctccgcagtagctgggactacaggcacccgccaacacgcccggctacttttttgtattttttagtagagacggggtctcactgtgttagccaggatggtctccatctcctgacctcgtgatccacccgcctcggcctcccaaagtgctgggattacaggtgtgagccaccgcgcccggctgcccatttttaaatctatgctgttcagttgaaatcctaaaaacgtaacagaagctactttgcattgaaaacagattactttgaggttttctatttgcataaatactgagtgactgagggctctgcaactgctgtctgcagctgacctgatgtagtgccctttggcctctccagacttccagtctctgtgtttacaatatttattttcatgatttccttcagtattaagtcaaggtcaattagcatatcattcctcaccaaaacagtgaataaagcagtatgtggattgacattcagtccaaccttttttatttgcatattggtgccctcccttgctgtctatgtaatcagtccagatataaaagcacactttccagactagtaatattataaaaaataatattaattagtaatattactaatttattttattggatttcagatatttaagatagctaataagtaatttatatttagtagaggatttgaaaaggaagatatgtaatcatatggttatctatgctcaggaatgtttggtgaaaaatattttgtaaataatttagtgtaaaatataatcagtggaattagatgaatatgtttcaatcagtggagtatttggggactgatatggtttggatatttgtcctgccgaaatctcactttgaaatgtaatcttcagtgttggaggtggggcctgataggaggtgtttgggtcatgggctagatccctcttggcttggggctatcctcacggtagtgagtgtgtactcctgaggtctggttatttaaaagtgtggcacctcccctcccttgctcccactgtcaccatgtgacgtggctgctcctgtttcactttctgccatgagcaaaagctccttgagggccccatcaaaagctaagcagatgttagtgccatgcatatgcagactacagaaccgtgagccaattaaacttcttttcttattaaattatccagtctcaggtatttctttacagcaacgcaaagactggtctagcacaagagcataggcattataaaaaagaaacgtttgtatagtttctacagttttgtagtcaaaaagtgaagtgagacaagaaaagaggtgggatctgaccaagggtgatggagatcttgactgaaaacaggttgcataaccatatgattgcatgctaatgacttctgcccgtgtgaattatattgtaatgggcaatgttgcaggaaaataaaataagttgtataccagaggtaatggagcacttaggggtttattggaaatatgtcattagacaaagtttgaggaaaagacttaaaaattaaggctgggcacaggtggctcactcctgtaatcctagagctttaggaggctgaggtgggagaatcgatcacttgaggccaggagtttgacactagcctaggcaacatagtgagaactatgtctctgcaaaaaataaaaaaaattagccaggtatgatggtgtctgcttttaatcccagctactcaggaggctgaagcaggaggactgctttgagcccaggagtttgtgcctgcagtgagctatgatcacaccaccatactcctgcctgggcaatagagtaagaccctacacctataatatatatatatatatgtattaaattatctggcatagattttagataaaaggaatatactgcacctgtgagttcctcagtatcttggccaccatgtgcacctattgtttcttcccctggtgtagttacaacctgtggaaaccaaccaagaatctgtggatccatatggactcacttgtcttgcttatcagtgctaccatatggagaaaatctggaaagggggacaacgaagcttcctattctcactgcttttgagcattgacttgatatgaacatgagaggagctggctattctggctatttccccagtccttacaggagatgggagaccaaggtgagatggttcaaactcaaaaaagaaaacattctcctgtaagatgggctttgataataaatagaacaagaagtcattgagcaatcttccctatttgccaagagctgactcctgctctgcacagaatagctttgtccaactaaagagataaacatctgtgagaatacatacattataatttattttctacgtccaataatgtcatttgataaatcagttttgcgccaatagttcattctcttagctctccaagcttctttgtcattaattttgttgcgtgaatttccaagatttgttaacaacaatgtaattttttttttttttgagacagagttctcactctgtcgcccaggctggagtgcagtggcgcaatctcggctcactgcaagctccgcctcccgggttcacaccattctcctgcctcagccttccgagtagctgggactacaggcgcccgccaacacgcctggctaattttttgtattttcagtagagacggggtttcacagtgttagccagggtgatctcgatctcctgacctcgtgatccacccacctcggcctcccaaagtgctgggattacaggcatgcgccaccacacccagccaacaataatggaatttattcctgtttttgttacctagagtgcaacgttgaatgatgtttttctagtttgggtctcttctcctatgtttgtaacaagacttactagctttattagaagtcattattttgcactaattcaagaaagacacacaatagatttttaccagcaaggtcactgctcctttttgaaaacaaaattacattttgatgaatttataccagtaattgacaaagttttagaacagactatatactgtggactagggaaaaatgaatttctgagctccccacgaaatgtccaaatagtcatagtcatataaaaaatctagttgtatacacatatccattatatatttgtcctaaagatctgtgacaactcatcaggagctacttgtttttgtttgtttgtttgtttgttttgttttgttttaaacggagtctcactctgttgcccaggctggagtgcagtggtatggtatcggctgactgtaacctccaactcccgggttcaagcaattctcctgcctcagcctcccaagcagctaggatggcaggcacgtgccaccatgcccggctaatttttgtattttagtaaagacagggtttcaccatgttggccaggctggtcttgaactccaggcctcaagtggtctgcccgccttggcctcccaaagtgctggaatcacaggtgtgagccaccacacccagcaagagatccttgtttcaatccacttttaaaagtcttaagtcccctcaccgtccataaaacagttttttcctctccagaaagggatggggaagggatgaaagttaaaatttgaggacagctgttaactacgtttctcaagaaagtcacattaaaatctctgaacatcggcctgccgcggtggctcaagcttgtcatcccaacactttgggatgccgaggtgggtggatcacgaggttaggagttcaagaccagcctggccaagatggtgaaactccgtctctactaaaaatacaaaaatgagctgagtgtggtggcaggcgcctgtaatcccagctactggggaggctgaggcaggagaattgcttgaacccaggaggtggatcttgcagtgagccgagatcatgccactgcactccagcctcagtgaccgagtaagactccatctcaaaaaaaaaaaaaaaatctctgaacatcattctcagaaaaataaattgtattctattttattgttacaaattaaacatttaatacttgcacatgacttcaaaaaaactgttgcaaaatttgtggcaaatagttgggcagttcctcaaaaagttcagtatagagttactatgtgactcagcaattctactcctaggtatatacccaagagaaataaaaatagacaaaaatgtgtatgcagatttcataacagtattattcatgatagccaaagagaaaaacgacccaaatgtccatcaactgatgagttaatagagaaaatatggtatattcatacaatgaaatattattcatccataaaaaggtagggagcagtgatacatgctacaacatgaaccatgagaatacactaagtgaaagatgccaccataaaagactgcatattgtatgattccatttatatgaaatacccagaataggcaaatccacaggacagaaattagattagtggtgcctatgagctgggaattccctagagggagaatggagagtgactgctaaaggatgtggggtttcttttgtggcgacaaaaatgttctgaaattagatagtgatgatggtggcacacctctctgaatatactaaaaaaaacattgaattgtgcactttcaatgagtgacctttttttaagacagcagacttaggatgagttttatggtatataaatcataacccaatgaaactgttattttttaaaatgtgctaaatttttatttaataatgcaactaaagagcagagaggaacttgctcatgaagctaagctcaagtgggtagtggagttatgattggatgtcatccctgccaatctttactgccctaagcggggttatattgggggttggagcaaacatctcctttaaagccagtgtctggttgagaggataatctccccttccctaatgccttcccctcaaaaaagttggaggatctcacagcagaggtttaaggattatttaagaaaaggactgaaaccgtccgggcatggtggctcacgcctgtaatcccagcatttttggaggccaagggagacagatctcctgaggtcaggagttcgagaccagcctgcccaacatggtgaaaccccatctctactaaaaatacaaaaaattagctgggcgtggtggcgggtgcctgtaatcccagctactcaggaggctgaggcaggagaatcacttgaacccgggaggcagaggatgcagtgagctgagattgggccactgcactccagcctgggcaacaagagtgaaactccatctcaaaaaaaaaaaaaaaaaaggactgaaaccaatgtgatagtacctgaatgttgttcattatgattttccgttaagcagttgttctcaaccttgtcagcatgttggaatcacctggggagttttaacaataccaatgcctgggtcccacctccagagattctgacttacctgttctgaggtgtggcctgaggactggaactttaaaagctccccaagtgattccagtgtgcaagcaaggttggggggcattgccatggagaaaaaggagcagcagaatatttcactaattactgtttctttggagttctgaaatttccacttattgttcatttttaaaggcttgaaattgggcttagcccaaataaatgatgttgacaaatgcctagaatagctaaattattcttagtagtagtatttcagttactgttttcattactaacttttggcttccaagagccatgttattaagtttgacaaaagtaaacaatcacatagaaataactccaaaacactctggcaaagataatctatatctggttaactgaactttagtcaaaatgagcagttcagatccttctttaagactgaaattgctgatgtaccttcagaacagtgtagaaaaaaaagactgtaatacttataagaacgtaatcagctttctcagaaagtcacagttaatcttttatttcaaaagaatgagtaatattgtttattgctttttcttcagaaaactccaaagtgcttgagaaccacaaaccaatgcttctgaaatcataccttcagaaacacttttagtggctcatcatttccatcaacagtgaactatgcccgaggccacatctgtaaagctttttatggttcctttgacttatttaaatgtattttttaaatcaaaattttacttgtaaatgtgaacatttatgtatacatattgtatttcaataaaatattttaattatacacatgaataataattttttttttcccagacagagttttgcccttacttcccaggctggaatgcaatggcacgatctcggctcactgcaacccccgcctcccagttcaagcgattctcctgtctcagcctcccaagtagctgggattacaggcatgtgccaccagacctggctaattttgtctttttagtagagatgggattacaccatgttggctacaccggtctcaaactcctgacctcgggtgatctgcccaccatgaataatttttaaaggtcaaatagttcaataaacttgacagtaaaaaatagcacacctttccccatttttcctttccactccccataagtaacctgtttaagcatttttttttggtacttactaccatatttctaaataccagtttatgaggccatttttaaaaatttttcaaaattaaatattagctattcttttccaaatggaaattcagaatttatttttcttacatttccattttcctttcctcactttcacttcctctcatcccatttttccaatatatttaaatcacaatttgtggttagcttaatattcatagtaattttattatgaactatgtaactgtttattactgagccacatagaaaattgtgattatatctcctttctgtgcaattttttgtgcatgcaacctgtgaatatataattgccttggttttttgtttaatatttcacatatttagcattaattcattctcaaaatatttgtgagaatcataaaacttttcccaatggctataaacacatagaagtttatcagtgcaattgcttgatatttctcctggagccctctgttctgtcctagcctaggctgattgctttctaggtgggctacacagctgtcttgacttcattttactaaaattcaaggaattcccttctctggtttattgtatcttggattctgtagttttctccttcttggtttatacctgcatattgtctggattctatagttttctccttcttggtttatacctgtattttgtgaggcatatcctccactggaagataaattatttaagacctagtatttctaactgcatttattctacacttactattgagtggtttgtctatagaattctatgttgtaaataactttatcttgcattttagaagacattgctcaaagtcttctggatttcagtgttttcactgagcagttgtagaatgctttatttcaattgtagtaaactttcaagatgatgtatcttgacatagttcattgtaatgtatttttccaggcactcattaacccttgcaatctggaaatccatgtcctttaatttggagaaattttgtcttaactctttgaaaatgtctcccctctatttgctctgttttctctttccagaactcttatttgttggatgttggacttcctggactagatgccctcactaattttcatatttttttcttctatttttccatatctttgatttttgttctgctttctaggggacttcctctgttgtaattttcaacctttctattgcaaagggcctacaggtcccatgcaagtttgaaatccaatagggcagtcattgaaacttaaagttccaaaatgatttcctttgactccatgtctcacatccatgtcatgccgatgcaagaacttggctcccatggccttaggaagctccacttctgtgactttgcagggtacagcacccctcccaggtgctttcatgggctggcgttgagtgtctgcagcttttccaggtgcacactgcaagctgttggtggatctaccattctggggtctgtaggatggtggccctcttctcacagctccactaggcagtgccccagtggagactctatgtgtgggttcccaccccacatttcccttctgcactgtcctagtagaggttctccatgagggctccacccctacagcacatctctgcctggccatccaggtatttccatacatcctctgaaatctgggaggaggttcccaaactttaattcttgacttctgtgtacctgcaggcccagcaccacatgtaagccaccaaagcctggaacttgcatcctctgaagcaacagcctgagctgtacattggccccttttagccacagctggagctgaagcagctgggacgcagcacatcatattgcatagagcaggggagctgcatagagaagcggggggccctgggcccagcccacagaattatttttgcctcctagacctccaggcttgtgatgggaggggctgccatgaaggtctctgacatgccctggagacactttccccattgtcttggtgattaacatttggcttctctttacttatgtaaatttatgcagcaggcttgaatttctccccagaaaatggggttttcttttctattgcatcatcaggctgcaaattttctgaaattttatgctctgcttcctcttgaacactttgttacttagaaattccttctgccagataccctaaatcgtctctctcaagttcaaagttccacagatctctagggcagaggcaaaaggctgccagtctctttgcatagcaagagtgacctttactccagttcccaagaagttcctcatttccacctgaaaccacctcagcctggactttattggccatatcactatcagcattttggtcaaagccattcaacaagtctctaggaagttccaaactttcccacattttcctgccttcttctgagccctccaaactattccaacctctgcccgttacccagttccaaagtcacttccacatttcaggtatccttacagtaccaccccactcctggtaccaatttactgtattagtacattttcatactgctttgaagaaatacctgagactgggtaatttataaagaaaaacaggtttaatggacttagaatttgacatggctggggaggccacaaaatcatggtggaaggcaaagtgggggcaaaggcacatcttacatggcagcaagcaagagagcatgtgcaggggaactgccctttataaaaccatcagatctcatgagactttttcgctatcatgagaatagtgtaggaaaaacccatccccatgattcaattacctcccactggtccctcccatgacatgtggggattacgggagctataattcaagatgagatttgggtggggacacagccaaaccatatcactccccaaattgaactctgaattcagtgcaattccaataaaaatcccagcaggattttatacagaatttgacaagctgattctaaaattcaaatgaaaatgcaaaggtcctacaacagctaaaatcactttgagaaagaagaacaaagctggaagactaacaccacttactttcaaaaggaataaagctatggacatcaagacagggtggtattggcatgaagagagacaaatagagcaatggaataggatagaaagaagagaaatagacccatacatatatggacaactgatttccccaaagtatgcagaggcaattcggtggagaaattatagtcttttcaacaaatgcctccacaggaacaattgggcatccatatgcatgaaacaaaaacaaaacaaaaaaattaaaaaacaaagcctttggccaagcacagtggcttacatctgtaatcccagcactttaggaagctgaggttggaggactgcttgaggcttggaactcaagactagcctgggcaacatagtgagatcccatctcttaaaaaaagaaaaaacctgggtgtggtggtgtgcactggtagtcctaactactcaggaggctgaggtaggaggataacttgagcctaggagttggaggctgcagtgggctaggattgcaccactgcacgccaacctgggtgacaaagccagattctgtctcaaaaaaattttaaaaattaaaaattaaaaaaatttcaattaatggcttttaccctatacaaaaattaactcaaaatggatcgggacataaatataaaactataacgctcccaggagaaaacattaagagaaaatttttgtgactttggattaggcaaagactgcttaaatataatgtcaaaagcacaatccataaaagaataaattgatagaggctgggtgcagtggctcatgcctgtaatcctagcactttgggaggccacagcaggcagatcacctcaggtcaggagtttgagaccagcctgcccaacgtgttgaaaccccatctgtactaaaaatacaaaaattagctgggcttggtggcacaggcctgtaatcccagctacttaggaggctgaggcaggaagatcgcttgaaccctagaagccaaggttgcagtgagttgagattgcaccactgcactacagcttgggcaagagagtgagacttcatctcaaaaaaaaaaaagaagaagaaatttataaattggacttcaacaacatttaaaatgttctactcttcaagagacactgttaagagcatggaaagccaagccatagactcagagaaaatattttcaaagtaaaattatgataaagagccatatctaaattatattaagaactctctagtgccaataatagaaaaacaaacaacacagttaaaatatgggcaaaatatctgaacatacgtgtcaccaaagaagacatatggatgaaaagatgctcaacatctttagtcattaggaagatgtaaattaaaatcagaatgagataccattgcagacttattaaaataaataaaatttaaaagactgactataccaactgttgtcaaggatgtttctacactgctggacaataatcactttggaaaccaacttggcaatttcttaaaagttaaacacatacctatcatacaatcccgccattccaatcctaagtagttacccaatggaagtgaaagcatatatccatacaaagatttgttcacaaatatacgtaggaagtttatgtaaaagcccaaaacaggaaataattcaaatgttcatcaaataatggataaacagagtgtggtatgtccatacaacaaaatgttattccacaataaagaggaatggactattgataccttctacatctcaactctaaaataattatgctgaatgatagaagccagacatgaaagattacaaactgtatgatttcatttttatgaaattctaggatggaaaccaatgtatagtgaccagaaagcagatcagtgggtgcctgggaaagggtattggatggggaagaatctgaagaagggtttacaaagggaaacaaggaaacttttggggattataggtaagttcattatcttgattttaatggtggagatggatatacacatatatacacacacacacacgcatgcacttataaaactgtgcactttaaatatgtatagtttgtatgtcaagtgtacctcaataaatccattaaaaattcaagtatagttgttttggtgaagttttagaatgtagcaaaataaatagatacggttcatttgtcatgtttaactaaaaatcgaatcacataactttttgaataattctattctcatttcaaaaaccaccctttttttgcttttgcttttttgcttgctctctttctgtctatcgctcattaatacttccattcatgtatgccccaccttgttcatttatgccccatcttgttctccaatccaactaagttctgggttgggtactagggattggccccagtgcagtaaattaccaagagtggttggaatgttattgcccaaggattaattcctaagttgaatcaggtatagatctgtctctgaagcaagaaaatagactaagcaatcgttcaggttcttttctcttttatattttatatatatgtgtatatatatatttatatatatgtgtatatatatatttatatatatgtgtatatatatatttatatatatgtgtatatatatatttatatatatgtgtatatatatatttatatatatgtgtatatatatatttatatatatgtgtatatatatatttatatatatgtgtatatatatatttatatatatgtgtatatatatttatatatatgtgtatatatatatttatatatgtgtatatatatatttatatatatgtgtatatatatttatatatatgtgtatatatatatttatatatatgtgtatatatatttatatatatgtgtatatatatatatacacacacacatatataatatcaaagtcattagtcatatttaatgactttaaaatatataaaatatatatttgatattttgatatatatatcaaactcattaaattgtcatattataaatggttaatcttaaaaatgaaggagacaggtaaattagactatatatattttatatatatatttgatattttgatatacatatcaaagtcattaaatagtcatattataaatggtaatcttaaaaatgaaggagacggtaaattagactatatatattttatatatatatttgatattttgatatacatatcaaagtcattaaatagtcatattataaatggtaatcttaaaaatgaaggaggcaggtaaattagatagtgggtcttggcatttgcagcttcatatacacttctacccctacccccacccccaccctttattcaagtcttagtaataactgaaacactccttgactctacaggttcctgggagaggtggggtgagcatgaatgatgtgcatatgtaaggtatgcctaggacatgtgtgcacatgccagaggcacacctataccatgattggtagatctagattgaaattattttccccagaattgcttcaatcatgcattacttattttaataaaaggagcctctggtcttaccagttatattttacttacaaccccttacaacattaggcaaataatgtttttaatttaaaatgtttttgttctcacagtgaatgggagagtcccaaaatgttcaggaatttttcttgagtataattccaaaatggaaacccccagatcacaaagatatttaaacagaaatcagaaggctccaatctggagtagcaccttacaaatgaggtaaagcactttactgaagtgtcaaatgaatcaaggaggaaaaaggaagaagatgggagagaatgagcccattaagggtagtgtccatgttttattacctctgtattcacgttgccaggaacagtgggtagacatctgttggacatatgggtgtgatttgcattcctttcctcttactctggtactaggacaccccttttctgtaggggagccatttcatgtggttctggtgaggctctccatgttcactcactcatgaccaggcctagccattcttctccatggaaacagtgattggttcagacataggcacgtgaaccaagctggaccaattagagtactctccagggcttttcttgcttttttgttggaatgagagttttttgagactgacatagctgctgattataagagaaaaacatgagtccctgagaactgtgtttgagcccccagatccaactgtagttgaaggtaaccataatccttttttatttgagctactttgagtttttgtaacttgcaacaacaaaaaaatcccaactaatgcaatcagaatgatttaataatacccttttaaaatacaattttaaaaataaatataaaggtcagctgttttccaactcaaatgaaaacaaaatatgagaaaataaaatttaaatacatcttgggagagtatagtttaaaagtaggaacaagtttaaaatagtaacatctcttacacaatgaatagaggtagggagggaatatacacaattcttttttataatttttagaaatgatcattcatcagaagtgatttagctacctagaactgaagaacaagtcatatcataagacctctgagaatgcaacaatagcctatatgcctaagtttcactgaacttaaaaataaaaatgaagcttggccaggcgcagtgacgatgcctgtaatcccagcactctgggaggacgaatagggatgatcacttgaggtcaggagtttgagaccagcctacccaacatggcgaaaccccatctctactgaaaatacaaaaattagccgggcgtggtggcaggtgcctgtaattccagctactcgggaggctgaggcaggtgaatgtcttgaacccaggaggcagaggttgcagtcagccaagattgcaccactgcactctagcctgggcgacagagagagactgtcaaaaaaaaaaaaaaagctacattttctttagtattctaattacaatgactttgagcttctgcctacccactgaagaacctaatctctgctcatatatgccctgtctgttctcatagttccccaggtgttgtctcacatgatgcggacaaaattactctcactcttctgctcctgcttctcattagcttccttgactgtaggggttctccaagaagagtcctttctcccgagttccctattacctcccagggctgccagagctgtgtgggctctcaagtcaaggtggggagaatgcccgccccataagtgcctattgcatattgtcagctgagtgcattaaagtctcataaagctaatgatgaaaacaggctgagccataaacttgaacgtggtcacacacacacagacacacacatatatttatacactgctctttagggcatagaatataatcatttttctaaaatagtctgcctatagtatgaagagattttatcatcgtcatactgagcaatttagtaatgtgaagtctttcacatctccatttcaaaagaagatttttggtttacttaaataaatgggattagcataatttatcaatttcttctttttgtattctttggatttttattttatttatttatttatttatttatttatttattttttgagatggagtcttgctctgtcgcccaggctggagtgcagtggcatgatctcggctcactgcaagctccgcctcccgggttcacgccattctcctgcttcagcctcccgagtagctgggactacaggcgctcgccaccaagcccagctaattttttgtatttttagtagagacggggtttcaccgtgttagctaggatggtctcgatctcctgacctcgtgatccacccgcctcggcctcccaaagtgctgggattacaggcgtgagtcagtgtgcctggccaactattttattttttgacacagtgtttcgctctgtcacccaggctggagtgcaatggcacaatctcggctctctgcaatctccgcctcccaggttcaagtgattctccctgcctcagcctcccaagaagctgggattacaggcgcctgccaccgcgcctggctaatttttgtatttttggtagagatgaggtttcaccatgttggccagactggtcccaaactgccgacttcaggtgatccacctgcctcggcctcccaaagtgctgggattacaggtgagccaccgtgcccggccttttgttttatttttttgtgtcaacattttaccaatttaagtgaagtatagaacagttacctccctataattccctttacccactcccattgacaatataattgtctaaaatgtttcctctacatattttgggaatcacattggccaatgttataatttttgcttcaataatcaaacataatttagaaaactcaagaagagaagtctgttgtatttatctacatttttacactttccattgttcctttttccttcctgatgtttcatgattctctctagtttttttctgtttaaagagttcctttaggccggaagcggtggctcacgcctgtaatcccagcactttgggaggctgaggcaggcggatcacgaggtcaggagatggagaccatcctgactaccacggtgaaaccccgtctctactaaaaataccaaaaattaggcgggcgtggtggcacgcaccagtagtcccagctactcgggaggctgaggcaggagaatggcgtgaacccgggaggcggagcttgcagtgagccgagatcgtgccactgcactccagcctgggcgacaaagtgagactccatctcaaaaaaaaaaaaaaaaaaaaaagaaaaaaaagagttcctttagccattcttttagagttggtctgctggtgacagattttttagtttttcttaatatcagaatgtcttgatttttaccttcattcctgaagactatttttgcccatatgtaaaagtatgggttcacagtttttacctctctttctttcttttccttccttccttccctccctccctccctcctttctttctttctttctttctttctttctttctttctttctttctttctttctttctttctttctttctttcttttttctttctttctctttttctttctttctttctctttcctttctttctttctctttctttctttctttcccttccttccttccttccttccttccttccttccttccttccttccttccttccttccttccttccttttctctctctctgtctctctctcctttctctctttctctttctttcgacagggtctcactctgttgcccaggctggagtgcagtggcacgatcttggctcactgcaacctccgcatcctgggttcaagctattctcctacctcagcctcccgagtagctgggattacaggcatgcaccaccatggccagctaatttttgtatttttagtagagattgggtttcaccatgttgaacaggctggtcttgaactcctgacctcaagtgatccacctgcctcggcctcccagagtcctgggattacaggcgtgagccacggcatctggcccacagttctctaaacacttcaaaaatcttgtcccacttccttttggcctgcatggttttgtatgagaaatctgttgtttgaattgtttttttttcctacaggtaaatcatttctgtcttattgctttcaaatttttcattgtctttggttttccgaagtttgattataatgtgtcttggttatatttctttgtttttttctgtttaagcctcaattagcctgtgaaatttataagtttatgtcttaatgccaaatttaggaaaattttaggcatgagttttttgaacactttttcaatctcacactcttattcctctctgataatacaatttattggtttttgttaaggttccacaggtctctgaggttctattgatttttttcttcagtgtattttcttcatgttgttgaagttggttacattttattgatctgacttcagattaattgatttattcttttgtcttccttagtctattattgagcttatcctgtgagttttaatattttattgtatttttttcagttaaaggttttatttggctcttctttacatattctgtttcttcaccaaagctttctacttttcatttgtttcaagcatgttcaaaatttctcatcgagtcattgtatgatggctgctctaaaatccttgtcagacagttcaagtgtctgtgccgtctcagtgttgccatctgtgaattgtcttttctcattctagttaagatcttcttggttcttggaataatgaatgatttttaaaatgcaatcctggatactttggttattatgttgtgaggctctggatcttatttaagtctttggttttatcaggtttcctctgatactgcaccagtcaggggaaggttgatgcgccttgttactgccaagtggaagtgaaggttcaagcttttcatgtggtctcccccgaaaatgtggagaatggaggggcttgttactgcatgattagggtgacaatcctaggtgccccacctggtcttctctgacaccatcacagtgttgggggaggaggagaggaggaatacctcatgccagctgggtgagagtggaagtctacaagggtggggatggggacctcaatttttcctgtggcatttcactacagtaggacaattattgtctaagttttctctcttgctaggtttctcttgttctttcccttggtgagaaagaacaggcttttcttggacatttttccccttttatttatgtctgttggcatttctggttgccatatatatatatatatggttcagcctaatggctggcacatagtaagtgctcgatacagcattgagctattattatttacaacatagcataacctagatataaaccagattgtaccaacccatggatcagcaggctgtcacttcttgtttcaacgttttgcactatctaatatattgcagaagacagtatctcaagtccacttctgaataacccacacttgaatccaacctttcctgtttgccaccttatggtctcaattctcagcaccaaaactggccctttcctgctagtcaccatttcccatatcataactgccccaggtagttgcagccctctgcttcatcaagtgttcaaagatgtcttgcttcagtttcccccacagcacctcatatatcaggcttaccaaaagttttagcatattattagagtattgttatagaaaaaaataaaacattaaaactgtttaccaaggccaagtgcagtggcttacacctgtaaccccagcactttgggaggctgaggtgggaggattgcttgaggccaggagtttgggaccagcttgggcaacatagtgagaccctgtctctacaaaaaaataaaaaaattagctgggcatgctgatgtgcacgtgtagtcccttctaattgggaagctgagggggaggatggcttgagcccaggagtttgaggctgcagtgagccatgattgtgccactgctctccagcctgggtgacagagcgagaccctgtttcaaaaaataaaataaaggccgggagtgatggctcacgcctgtaatcccagcactttgggaggctgaggagggcagatcacaaggtcaggagatcgagaccatcctggctaacacggtgaaacctcatctctactaaaaaatggaaaaaattagctggtgcgtggtggtgggcacctgtagtcccagctactcgggaggctgaagcaggaggatggtgtgaacccgggaggcagagcttgcagtgagcctagatcacgccactgcactccagcctgggcgacagagagagaccctgtctcaaaaaaataaaataaaataaaataaaataaaaattgtatatcatcagtcatcattactcctaaatcatccatactgtaaaatgttgattattttgtatcaactaacactctttgctttatttttgtcttttgctttataggttgttagaactgtactgttttccctaataacctataaagcgaaagacaaaaattatggctataatttttcaaacagcaatattttttcttgtccctacaatactagaaacagcctacaacaagggagtattaaaaatatctttaaacaaatttttattttaggtttgggagtatatgtgaaggtttgttacatagataaacacatgtcatgggggtttgttgcagatattattatatcacccaggtattaagctcagtacccaatagttaccatttctgctcctcttccccctcccccctcccacctcaagtagacttcaatctgttgaaaaacatcttttaaagtatgtttttttctgtgtcattccaccatggatttaagcatcttaaggtaacatctaattaataacttcctaaaggcttaattaataaacagatgtaaacatcttaagacataactaataaataattatgtaactctaatttatataacttcatatcctccaaacagagacacattttctttttatgtggccaagaaatatttacaaggcatgatgaatataatagtccatataaaataatcaggctgggcattttggctcacgcctgaaagaaattgaagaggacaccaaaaaatggaaaaatattccaatgttcatagattggaagaataaatattgttaaaatatacatactactcaaagcaatctataaattcaatgcaatctctatcaaaatacaagtgacattccacatatgtttactgcagcactgttcacaatagcaaagacttggaaccaacccaaatgcccatcaatgatagactagataaagaaaatgtggcacatatacaccatgtaatactatgcagccataaaaaaggatgcattcatgtcctttgcaggtatgtggatgaagctggaaaccatcattctcagcaaattaacacaagaacagaaaaccaaataccgcatgttctcactcataagtgggagttgaacaatcagaacacatggacacagggaagggaacatcacacactggggcctgttggggggtgggaagctaggggaaggatagcattaggataaatacctaatgtagatgatgggttgatgggtgcagcaaactaccatggcacgtgtatacctatgtaacaaacctgcaggttctgcacatgtatcccagaacttaaagtatcatttataaaaagacaaaaagataaaaaataatttgtaaaatatgttaatggatacacaataaaaagcatgtaatttgtgacatcaaaaacaaaacaaaaaacaaaatacccagtgacattcttcacagaaagagaaaaaaaaaatcccaaaatttatatggaaccacaaaagacccagaacagcaaagctatcctaagcaaaaagaatgaaactggaggaataaaaagagctatagtaaccaaaacagcatggtactggaataaaaacagacacatagaccaatggaacagagtagagaactcagaaacaaatcaaaacacgtacagtgaactcatttttgacaaaggtgccaagaaaatacattgaggaaggcagtctcttcaataaatggtgttgggaaaactggatatccatatgcagagggatgaaattaaactcctatctcttgccatatgcaaaatgacataaaaatggattaaatgcttaaatctaagacctcaaagtatgaaactactacaagctaacattggggaaaatctccaggacattgatctgggcaaaaatttcttgagtggtaccccatgagtataggcaaccaaagcaaaaatggacataccatatatgatacatatgatatgtatcatatatgatataatatatattatattataaaacatatcatatgtttgcatatatatagtatcatatatatatgcaaactgcccatctgacaaagaattaataacctgaatgtataaggagctcaaacaactctataggaaaaaaatctaatattctgatcaaaatgggcaaaagattttaatagacatttctcaaaagaagacacacaaatggcaaacaggtatacaaaaaggtgctcaatatcactgatcatcagagaaatgcaaataaaaaatacaatgagatatcatctcactctagttaaaatgacttatatccaaaagacaggcaataccaaatgctggcaaggatatagagaaaagagaacccttgacatcattggtgggaatataagttagtacaaccaccactggaaaacagtttaggtatctcaaaaactaaaaaatgagctactatatgatcctgcaattccactgctgggtttataccccaaagaaaggaaatcagtatattgaagagagatacctgcactcccatgtttgttgcagcactgtttacaatggctaagatttggaagcaacctaagagtccataacagatgaatggataaggaaaatgtggtacttagacacagtggagtaccattcagccataaaaagaatgagatcctgtcatttacaacaacatggatggaactggagatcattatgttaagtgaaataagccaggcacagaaagacaaacatcacttgttctcacttatttgtgggatctaaaaatcaaaacagttgaactcatgaacatagagtgtagaaggatggttaccagatgctaggaagggtagtggggagctagggggaggtggggatggtaatgggtacaaaactagttagaaagaatgaataagacctattatttgatagcataacataacctatatgtccataattaagggaccaattaccttaatagctttggatattaagaatattcaacagcctttacaaaaggaacagcactatatgtactggttaggagctgtctccaagatacagtatcaaataaaaaggcaaaggaaagaatagtgacagtgtatgataccatttgtgtataaaacaaaaataaacccacaaaccacatatttaatatagttattatacatatatgtattatatgtgtatatttttatatttctggaagtttacccaagacactggcaaccttgattatcccctcttagtgaactgggtggctgaaggaaagacacaagaaggagtattacttttcactctatgtcctcatcttacatcagtttccctataattagagtctgagacagagattgttgagtctgtgctcttctaagaggagtgaggcaaggaggacagggcctggatcaaaaatcaagcaaggggccaggcgcggtggctcaggcctgtaatcccagcactttgggaggccgaggcggatggatcacgaggtcaggagatcgagaccgtcctggctaacacagtgaaaccccgtctctactaaaaatacaaaaaattagctgggcgtggtggcgggcgcctgtagtcccagctactcgggaggctgaggcaggagaatggcgtgaacccgggaggcggagcttgcagtgaggcgagatcatgccaccgcactccagcctgggcgacagagcgagactctgtctaaaaaaaaaaaaaaaaaaaatcaagcaaggttgtggttttagctggagcctagcttctacttgaaaccctgaagagctctggagtgtgaatagttccatcgagttggtcctacctggagacaaaggggccaggcttttgtacctttctcagtcagtcattggctgtgagctgcccgcaggaggaggagtaccctttcaggagaggtggctcctattggccgggacaattctctagaaaaggaggcagctctgagcaattagcaattcaccttcagagccgctaagggaccagattagaaaaagagatctgtgcctgatacgtgtctgatacaacctcactgtattttctgaaatctataaaatatgtgtttacctcctcaaaaaaaaatcagttaaaaaatcaatattacagaaggatctcttttggtggttttcatggattctaaattcagcatgtatgccaaaatttaaaacagtaaaagttagccttggaaatccttagcaatttttgggacccaaactggtcattttttccactggtattggaacagattatgtttctttggaccagcactacatttaatagttggcttgcatttaggtaaccttctgtttggaaaatctacaacattaaacattgagctcatattcatcgatctgagtccccaggatgcttagaggaactgaagacgagtagatattttaatcccttatctcaggctcaccccagaatggactggtagggagatcgagcatattatttgtctttatcccttatttttccatgtctaattatgtggttataaatgtagtacatgttatacaggaaaaattttccaaaaattgaacaaaaggcaaaaaaaataattctactaagtggccttctaaaatcacattagacattttctaatagacccacctgagggtgatattgctcaggaaatgtgactttatgaaagttattaatagacgttaacttgtaaaacctggtaaggtatcagtttttccttctctctggtggagaagttaacccaaaggttatagttttattgactggtcactttttttttttttttttgagacagagtcttgctctgttgcccaggctggagtgcagtggggcaatcttggcttactgcagcctccacctcctgggttcaagcaattctcctgcctcagcctcacaagttgctggggttacaggcacccgccatcacacctggctaattttttttttttttttgagatggaatcttgctttgtcacccaggctggagtgcagtgacaccatcttggctcactgcaacctccgcttctggggttcaagcagttctccgtctcagcctcctaagtagctgggattgcaggtgcccgccaccacgcctggctaatttttttgtattttgagtagagacgggggtttcaccatcttggtcaggctgttcttgaactcctgaccttgtgatctgcccaccttggcctcccaaagtgctgggattacaggcatgagccaccatgcccggccacatctggctaacttttgtatttttagtagagagggggtttccccacgttagtcaaactggtcttgacctcctaacctcaagtgaactatccaccactgtggcctctcaaagtgctgggattacaggtgtgagccaccatgcccagccttattgccttgtagcttataaccagttttatatctaattttttttttgagacagggtctcactctgtcacccaggatggagtgcagtagtgcagtctcagctcactgcagccttgatctctgaagctcaggtgatcctcccacctcggcctcttgagtagctgggactacaggcgtgcaccaccatgtccggataatttttgtattttttgcagagatggggttttgtcatgttgcccacactggttttgaactcctgagctcaagttatcctcctgccttggcctcccaaagtgctgggattacaggaatcagccatgtgcccagctcatatcttgtataacaatctgatttcagcatttctgttcccactgacacatatattccagtttctcatattctcatcaaactactgtctttttcttctggtttcttcattaattaaataaaactttgacatacactcactatatgagattcatacttttaacaatttgtgaaaatacgcttttcagtataaattagcacattgtaaatatatgtggttaaatggccataccatgtagcttgctataacataatacattacatgacggtgaatcctagtggaataaaacactaccagattcaatgtacaatatcttctctcttgaaggcaggattataggtgtttaaatctgagtttgtgactattggcttggctgctgaagtatttgacatacagacccaggtagtgctttgaaaaatggctataccaggaaagagaagaaaaaaataaaaggtattcatgaatttttttcaatgcatttcccccctcccccgaatcctcttggcagaactctggggctagggttgtcagatttagcaaataaaaatacaggatatcaaatcacatttgaatttcaaatgaataattaatttttagtgtaagtatgttccaaacattgtaagtatttttatttgaaaaccctacatggggcatctcaaagtctggatggggttgcaggaagcaggtgggggaagcaaggtagttgccagaagtgccagaaacacaaggggtcattggcagaatttgagtccagtgctgggcagtaacaaaggccaggtcgtggaatcctgttctcaattccaaggagtgaactgaggaccagagtgaaagttgaagtcttgaatcaagagctgggtgatggctcacgccagcattttgggaggccaaggtgggaggatctcttgagctaggagtttgagaccagccctggcaacatagtgagacttcatctctacaaaaaatttaaaaattagctgggtatggtggtgcatgcctgtagtcccagctactggggaggctgaggtgggaggatcgcttgagccagggaggtcaaggctgcagtgagacatggatgtgccactgcactccagcctgggcagcagagtgagacactgtctcaataaataaataaataaataaataaataaataaatacaaatggtcaatcagcacatgaaaagatgctcaacataattagtcaccaggaaaacacgaatcaaaaacaaagatacaacttcacatagtgcttggatggctataataaaaatgtctgatagaagttgcagctagaactgattggtggctgttggccatctgagttttcatagaactgctcaccatggagccagtctgcagccaacacatccaacagaaaccacagtgtgcccagcatcctggtgcaatgacagaatctaatcaagcaggactcacctgtccacactgaagagtatctatagcagtataatcaccacaattccaatgtggagattttcaaataccaaccaaataaattgagcaaagaattagcagagctggttctgtttatggcacagattgttcactgctacccggagcatccaagtaactttcctcaagagtgcaaagatcttctctcctaccatagccctatcttgggtccagattttctaatgacattttgcaaaactttgatcttgctaagaagaatctcactaatcttggtgacacacagcctccctgcttgggaagctgaggtgggaggattgcttgagcccaggagttcaagacctgcccaggcaacatagtgagaactcgtctctacaaaaaataaaaaattaactgggcagggtagagtgagcctgtagtcccagctactcaggaggctgaggtgggaggattgctggagcctgagaggttgaggttgcagtgagccatgattatgctactggactccattcagcctgggagacagagcaagaccctgtctcaaaaataaataaggttaaattaaaatttaaaaaagtagatagagagtagatttgcatacagaaagagagtagatttgcagttgccagagattgggagaagagggaagcaggagtgactatttaaaaatatagttttcttggctgggtgcagtgggctatgattgcaccactgcacttcagcctgggtgacagagcaagaccatgtctcctcaaaaaaaaaaaaaaaaagtgtattgatgaatatttgatagactactattattttttcataaactttaaaaaagtatcatattattggtatttagggattggaagtttcttaaaattttgagtaaggaataaaatttgttgagttaaaaatgacaatgtgtggaattgataaggatgtagaaaatacatactatcaatagtctgctgctaaggatacaaattggtactaaatttctggaaggcaacttggtagtatacatcaagattttaaaaatgtatgtaataattgacttaacagttttaattctagaaatatagcctaagaaaataattgaatccatgtgcaaagttctttgtttattgtatcactatttcttcatttagaaactatactgtaagcagtgtgaatttttgacagcattaagtttgacattcacacaaagacatacccggtggccataatgatattcattatcatggaaagatgtctaaaatatactattggtgaaaaaatcaggtatcaaacagcatttatggactaatcccactgaaatcatagagttcattctttccttattttttgcatttttgcagtgcacatgtgttatcacttctctgccttttggctaagatcaagtgcggtgcacatgtgttatatttataatcataaaaatcagtaaagctatttccatcttaaagaaaaagatccctcactttgcaataatgagtggttatgcctcccggccttgtcttctttaactactagacaagattcatgccttggaattcctctgaacttccctactacactacattacaaggaaggcaatgtgggtatctccctcctccgtgacaacttaagagatgcaaggtcagggcacaggtcacaacagagagggacactgatggccaattctggggcctctcatcagttgtcccattccaggtttttaggtagagggctgctttgctgcttcaaggttaagcttgcctaatactcctctaggagctttaacgagctaagcacaaatcactccactgaactcaccaaatgctatgcctccctcagccttgcagactttcccaatccactgacatcactctactaagccagtccatcccatcccccctgttctgggagaatcctacataagctttcttcaagtggtctctaaaaccatttttggcctcactttattagaggagaaggaggcgcttgctgatatcagtatttcttaccaactctgtttccatcacagtaagtatcaggtatgctaaaagcatgtgtttgcctggaaaaaagttccttttacttagctgctctagggtatctctatgattttgttctgcaaccttaaggatgatataactaaaaagtaggagtatagaacatccccaggtttaacataagctgcattaattattataaccttccctcctcccagccaaataaaaaatcagactcagaaaccccactgatcttatgcatgttggtactcccacatagtttacttttaatacatgtctattagatatcattatataaagttaacattgcagggaagcttaaatgtgtcatttgtacaccatggttggatcttgatatgctggatattttttaaaaaggctctactacaaccaaagttagatccaaatccataaacaggtagataacatttcttttttatttttttgagacagtctcactctgttgcccaggctagagtgcagtagcatgatctcagctcactgcatcctctgcttcctgggttcaagcgattctcctgtctcagcctcctgtgtagctgggattacaggcaagtgccaccatgcatgactaatttttgcatttttactagagatggggtttcaccatgttggctatgctgggctccaactcctgacctcaagtgatccacccacctcggccttccaaggtgctaggattagaggcatgggccaccacacctggccacataggtaaaatttcgatgtattaagagaaaaggctgggggcagtggctcatgcctgtaactttaggaggctaaggcgggtggattgtttgaggccaggagttcgagaccaacctgggcaacatggcaaaaccccgtctgtactaaaaatacaaagaagaaaatattagctggtcgtggtggtgtgcgcctatagtcccagctgttcgggaggctgtggcacaagaattgctggaacccaggtggtggaggttgcagtgagccgagacctcaccactgcactccagactgggtgacagagtgaggctctttcttaaaaaaaaaaaaagaagaaaaattgcattctacacagagcacttaagttcataattctgtgagagaagtatttatataagactaaaaaaattatagtaatcaggagaaaagaaaaaagtggaaaatttgtttgcctcaaaattgccaaccctgggcatatttcataaagcttctacaaaaaatggtttacgaagctgaaaataaatgtgactgaatcctagattataaaaattaggcaaatctcagtctttggaattatctattatgtgctttttcacactgactctgggacagtctgaagttggtagtgtctgttaagctcctctagcttgccaatccaggtgcctggtaccttcccagaactgcctttttcatgtgaccctgatattcattcctttcccagtgctcttcctgggtaacctgaaaaatagccccaggatagtgaaaagtagtcttctttctcatccagagattaagtgcattttaagcatggtcatcttctaaaggaatgaatcatcctaatcaggaaaatctgaggcaccagaacaagtagttatattttgctcggaaatgcttttagggatactgaatgaggtggtatgtacccataacgccagctactggggagcctgaggcaggaggattgcttaagtccaggtgtttgagaccaacctggacaacatagcgtcaaaaacatttttttgagaccctgtctcaaaaaaaaaaaaaaggaaaaaaaaaaaaggaaatgcctttaggtgctcctttatattgttgtgagttttgttcccatgagacaggctctatagtatctggctcttttcctaagcactgcaagaaagctaaacacaggtcactctgccaggcctaccaaagtatgtcctcagtcttccctaccgcaacatcactccctaccaagatagcccaccccaccatctcacactgggaagattctgtttaagttttcttgaatctttagaaacaattttggcctctctgctgggggaaggagtagagaatgctgttatctggggactgatacttccgtttgttcagaggaatagctcagtggactaccattcttggtaatggtatagttgacccttggaaaacatgaatgtgaactgcacagctctacttatatgtggatttctgccaccccaggaagagcaagaccaatccttcttctttctcctctttctcagctactcaaagtggaagatgaggagaataaagacctttatgatgatccacttccagttaatcaatagtaaatatattttctcttccttataattttactaacattttcttttctctaacttactttattgtaagaatacagtatatgtgttatatactgtatataatacatgttatatgaaatatgttttaatcaaccatttatgttatcagtaagtcaatagtaagctattagtcattaaaagtttagggagtcaaaagttataggcagattttccactgtgcaggaataagcgcctctaactctgtgttgttgaggggttaactgaaattcctacaaattttcatgaaaagtttaattactttttgtgtgtttctgaacataggctccctcttgtggttcataggatatatgatatataagagataggaaattttatctgcatttttgcagttgcaaagattacttgggcactggtagaaagatgattatagctgaaggcattgatgattttttttttttgagacggagtctcgctctgttgcccaggctggagtgcagtggtgcaatctcagctcactgcaacctccgcctcccgggttcaagcgattctcccgcctcagcctccccagtagctgggactacaggcgcatgccaccacgctcagctattttttgtatttttttagtagagacgggatctcaccgtgttagccaggatggtctcgatctcctgacctcgcgatccacctgcctcggcctcccaaagtgctgggattacaggcgtaagtcatcgtgcctggcctgcactgataatttttaaatgagtaatgtaaagacctaagttaacttatttaagaattatgcttgtatgaagacccagtaggcaagaaattatagcatttgaataaagaaaaatctgtttaaccagcattttaaaagtaataactggccgggtgcagtggctcacatgtctaatcctagcactttgggaggctgaggtgggcggatcacttgaggccaggagtttgagaccagcctggccaaaatggcgaaacccatctctactaaaaatacaaaaaattagttgggcatggtggcgcatgcctgtaatcccagctattcaggaggctgaggcaggagaatcgctggaacccaggaggcggaggttgcagtgagccaagatcacgccactgcactccggccaaagtgcgactctgtctcaaaagaaaaaacaagtaataactaatatttattgagttatttaatgttccaggtactattataaacactttatgtaaacaattatgtaactttttttttttgagatggagtctcgctctgtcactcaggtgagtgcagcggcatgagcttagctcactgcaacctccacttcccgggttccagcgattctgccgccttagcctctcgagtagctgggattacaggcatgtgccaccatgctgggtgaatttttttgtatttttagtagagagggggtttcaccatgttggcctggctggtctcgaactcctgacctcgagtcatcttcccgcctcagcttcccaaaatgctgggattacaggcataagctaccacgtccagcattatgtaactttttattatggagaatttcacacttaagaaatgaagaaaaaagcaaaaagagcttccatatgtgcattatccactttcaactatttatcaacgtttgaacattttgctatacctatttatctatcactatcattccccccgctcattctttttctggagtatttaaagcaaatatcagatgtcctataattcacctgtaaatatcataacattcaaagcttttaatatatattagctattttagtccttgacaaaaagtatatattattattcccattttatgtatgtataaactgaggcaaacagtattcagtgacccgcagggctcaggactcaaaccctggagtctgaatgcaaagctttataagtacgtcatttctgagattaggctgtggcttctgtctggggtgccctctctctctctctttcctggatcactagtacttgaggaagccagcttacatgtccagcagccccatgcagaggcctgcatggtgagaaacagggcctctagccaacagccagttaggaactgagggctaacaacaaccacatgagagagcttgggagcagattctccatcccttatatagcttatattttagtgggcaatatagacaatgaacaagtaaacaaataagcaaacaaacaaacaaaaaaatatatatataatgtagtttcaggtagtgattaaatcatataaagagaaataaagaaggataaaggagcagtgtgtgatgcggtgggagacactctttttgatggagcaataaaataaggtatatcagttcttttacttttggtacaaataagagaaaacccaactgaatgtggcccaaaccaaaaaagaaatttattatatcacataacaacaagtccagaggtaggagcgctcttagttagtaacaaggatatcatcagggaaccaggttctttctgctttgccatcgttggtatatcagttttgagttccaaacaaaagaaaaatagaaattctggggcagagtaagtttttagctgaaaagatataatttgaatacaattttagtgtaaagtcttgagtatttacgcgtttataggtatataaaaggaagcacagatttctgaagcctgtgtctccaaccaaaggcaaggatgggacctctaaaagcagaaatcacacattttcacaaggaaaaatgattgcttggtttaaacaaccccttggattgtcagctcaaagttggttggttacagtagagtttggcacagctgactgttatgccccaagtcagtttgttgaatccagatagtagaggcacaaatttatcatcaggcagctttcctactgactctgatgagctttctgaaaagtggttactttggttccatcttctggagctctgggttatacagtgtgcaaatctgaatgcacatactcaaagttcagcaaaaatttattttattcttctcttcatggatgtaagatggctgcagcagttctagatgtcagatccagatacacaatattaaagggctatcttgtattatgctgtaacacagtgatttattaagtcttcattaatccctctcagcagttatatactggatatatactggatataatgtactgaattaaaaatgtgacattcttttatcctctagcagtgaagcagtaaaatattggtcagaatgagaatcatgggtaggtctaatcatgcaggaacaggagattctaaataagttgccaaagaaattcatttcgcattagattatcttcttttctaggcgaatgttatttaggagctgtgtttacataccaaataatccctgaattcaaggctgttgtgtgattactgaacatgttaaagagcttacttccttgcactgcctccctacaagatccatgtcaagtcctgtctaactacctgtacaaaacttgaggaggaaagtgggctttcagcaagcacactcttgggataaaagtagaaaataaaggccagaaatcatggccgtttcctccagagaaaataccagaacatatttaaactcaggggtggtatgctgtttctggggaatgtgccctgaggctattttgatacacgaattaggagtatctttagtgataatttcaacatactacatatgttctttataatttggaaaagttacggggagagtggagaaaacaggaagggattgttagcctagaaaaaaggttgaaggagtgaggggggatctaggggccacacagatagaccaagccagtttcatgagcttacctggggccaggttgaaatggttcatttgaaccacatctctgcctcaggttttctgtaaatttcattcattattgcaactggcttgccatcacctaattcaattcttcttcaatgaatctggcagtgtacttcttagaaacaacatgaatgatggcttaaaccagttttatgtcaaatatcccttcctggtttagttcatgttttgggggctctttttaacataagcagcaatatataccttttaagatatttagaagctttatagtccagtttaaattttggttaactagttatacagtttagattggcaaagcagatacaatgccagcataacatttattcattcaagaaatgtttactgagtgcctgctgtgtgccataagtaagatagctgtctctttaaggttttaataatacctgtttagcaattattctttatcgctactgaagctgatagatgctatctgacacagtagattttaggaatatatacatattaatcatgtttctgacccataatgtaatagttcatgctcatcaacattcaaatatttttattcgaccagcctgggcaacatggtgaaatcctgtctctaccaaaattagctaggcatggtgacacatgcctgtagacccatctactggggaggctgaggtgggaggatcgcctgaacctggggaggtggaggctgcagtgtgccaagatcgcaccactacacttcagcctgggcaacagagagagatcctgtctcaaaaaacaaaaaacaaaaaacgaaaaacaaaaacaaaccaaaaaaaaacggctagagcgcagtggcgcaatctcagctcactgcagtctctgcctctccagggtcaggcagtcctcccacctcagcctcctgaggagctggaattacaggcacattccaccaaacctggctgatttttgtattattttggaaagacaaggtctcactatgttgtctaggctggtctagaactcctggactcaagtgatccgccctccttggcctcccaaagtcttaggattaaaggtgtgagccaccatgcctggccaaaaatttttttaaaaatttgaaaccagccaggcgcggtggctcacacctgtaatcccagcactttgggaggctgaggcagttggatcacaaggtcaggagatcgagaccatcttggccaacatggtgaaaccccgtctctattaagatacaaaaacttagctgggtgtggtggcatgtgcctgtaatcccagctacttgggaggctgagccaggggaatcgcttgaacctgggaggcggaggttgcagtgagctgagattgcgccactgcactccagcctggcgacagagcaagactccgtctcaaaaaaaacaaaacaaacaaacaaacaaacaaaaattgaaaccatacacacaggctcacacttacatagacaaaaccctcttttgacccactggtttctattctcctttccttaccatagagtttctattcctgccatctttactttccaccctcatactctcttgggcccacttagattaggctttcattccaccaaaattgctcctgaaggttgaccttaatgatagcaaatttaataatcaaatttcattcttcctaacagcactttgcgtgattgatcattctctcttttttgaaatattttctatactttggactccaggacaccattcttttatggttctcctcctatggttccagctgctctgtctcctttgctggttcctcttcgtttacctgacctctaaatattggaaggacctaggcttatatattggtgcttttttttttttagctgtctaccttatgatctcatccagtcctacagcttttttaatctttatttttcaattttaattttattttgttaaaataatacatacatatttaaaaagattaagtagtaccaaaaaggttatgataaaatgcagcatttcccttccccatccctctctactttcttccctccttcctagagacaactatttttttatgcttttagctctctctggcatttacacctctacctaatttgtaaataataggcatatactatctttagctattatctatcagcttcatattgtagtagatgagaatttatctgtcttacaatgtcattctgtcttctgctatccttaatattctcaatatagttatattacaatagttggtcaaatcaataatcaatgtttacattattacatatatgcgaatataattcccagcagtgtcgcagtgttttatgattgtattttcaatatatcttccagtttgctatctgctggaaacccattcactgatcttaaacttgatttatggtttctttccattgtcaaatccaatctgattctttttaaaacatgctctgttgcttgttatagtttccagtttcctgttgaaattttcaagcataatttttgtgtcctttaacatagtaaatatagttgttttattatttgtgtttaataattccaatatctggattctttcagggctgtttgacatcatttatttctgttggtttttgtttttgttatctagccttatgggttctagttagattctctgggtccttaatctgtctttctacatttagatttattccctatttggtgaagcatatccatcaagttaaaagtatgttacaatggcagaaacatggtaaggacagcggttgacatggctctctctcataccacactgccccaatcaggactgctgtgcagttgtcatttgaatatcacaacttcaccaccagcatggagagtcttttcctttttctgtgttgaatctcttattttctatattccgtattttcttatttctcagatgactctctcatcttagtacaggcaatgtgattgtgtgatgtagtagacagaatactggttccctaaaatgtccacattctaatctctaaaacttgtgaatatgttgccttaaatggcaaaagagactttgaagatgtgatcacattaagaatgtttaaattgggagattatcctggattatttgggtggtcacaggtagtaatgaaggtctatataataggatagtaggaggtatatgtgtgcatgtgtatgtatgcatgagagaaagacagacagagacagcgagagatagacagaagagagagatgtgctggttttaaatatggatgtaggaaggaagggaccacaagacaaggaatgcaagcagcctctggcagcgaggaaggtaaggaaatagattctcctctagagccgctggaagggaaacagtcctgctaacatcttgatttaggaattctgatctccagaactgtaagagaataaatttgtgttgtcttaagccactaagtttgtagcaattttttatagcagcaaagaaaatcaatataaatgataattttttcagttttttttttttttttttttttgagacggagtctctgtcgctcaggctggagtgcagaggcatgatcttggctcactgcaacctctgcctcctgggttcaagcaattctcctgcctcagcctcccaggtagctgggattacaagtgcccactatcacacctggctaattttcatatttttagtaaagacagggtttcaccatgttggccaggctggtctcgaactcctgacctcaagtgatctgcccgccttggcctcccaaagtgctgggtttacaggtgtgagccaccacgcctggcctaattttgttcagatgttacaagtgtctatagtcaatcttcacattgccagtttggttggttataggatttctaggttggaaggcattttccatcacattgaagacactcttccattgtcttcttccttcaaatgttgctgagaagcccagagtcatttttattatcattccttgtacatggcctgttttttctccctctccagacacttagaacattatctctttgtctctaatgttctgatatttcacaatgtatgggcctataagagtagaaaattccacatgtcagaaacctgatgctttaaaattccataaatataaccaaaacacaagcaaaaaattggggaaaatatttgcaacttgaaaaataaagggttattactcttataatagaaagcactcttagaagaaaaattctacaaaagaaatattcaaaatagccattttaaagagtacatctgtaggtctagaactgaaagggaaaaaaaggaaaaaagtacaaaagtgtacaaaaaatcagccaagaaacatatagaaaaatccatagacttactagaaataaaattaatgcaaattaaaactgtgaggaacaatttttcatctttttaattggtgaagactaaaaaaaaaactcaaaatagctaatgttggttaggtttcagtactttcatacactgttgttagaaatgcagtcaaccatctcttctagatgaggcaaaattccgtaagccagatcaaaagctttaaaaaatgtccatgttaggccaggtacagtggctcaggcctgtaatccgagcacgttgggactgaggtgggaggatcacttgagcccaggagttggagaccagcctgtgcaacatagtgagaccctgtctctacaaaaaataaaacaattagctaggcatggtggatgtgcctgtaagtcctagctgcttgggaggctgaggcaggaggatcatttgagcccaggagtttgaggctacagtgagctatgattgcaccattgcactctaccctgggtgacagagtgagactcttgtttcaaaaaaaaaaacaaatcagtacttagaataatcagtactttgttggaataatccaacaaaataataatgaatgacaaatgcacataaagagttaactaccatcttggccatgttgtttacaacatcaagaaagtggaaacaggtcaggtggggtgacacatctgtaaccccagtgctttaggagactgaagcagaaggattgtttgaggccaggagttaaagaccagcctgggcaacatagcgagaccccatctctacaaagagtttaaaaattagctggggatggtggtgtctgcctgtagtactggctactcaggaggctgaagcaggaggatcatctgagctcaggagtttgatgctacagtgagctatgattgcaccactgcattccaccctgggtgatggagtgagaccctgtctctcttaaaaaagaaaagaaaagaaaaaaagagtagaaacaacctaaatactcaaaaatagacaattggcttaagtcactcccatggcaatgggatgtttcagcagttttaaagcaaataagaaggccactagcctgaggttgtctctgcaccctgagcccttacataagcaagctgaagccttatttatttatttatttgtttatttatgtatttatgtatttttatgagatggagtctcactctgtcacccaggctggagtgcagtggcatgatctcagctcattgcaacctctggctcccgggtttaagcgattcttctgcctcagcctcccgagtagctgggattacaggcacgtgccaccacaccgggctaattttttatatttttggtagacagggtttcaccatgttggcctagctggtctcaaacttctgacctcaagtgatctgcccgcctcggcctcccaaagtgctgggattacaggtgtgagccaccgtgcccagcccaaagcctaatttagaggtatttcttataactgacttaaatagacaaacaaaaatacagccctaaccaatcacaaacagccactgagtgaattggctatataactaggtgtctcccatcagattatacccaaataaggcaaacacttagctgtagcaattcaggtaatttcttcactttgcttctgtgttcagcctataataggtaggtgcttccagagcagagcccataacctcttttggtcttggtgcttcccaattcatgaatcattcttttactcaaataaatgtgttaatttcatttaaacttttttttttaacagcaagatatcatattaaatttatcatataaaaagtggccgttattggtaagaggttgacttggggaagtgaaatgagatttggtgagaaaaaaaactctctgcactctgtccatcatttattaatagaatgttttctttctagagatgaactatttctacttctaaacattgaggagatacaaagaagggcttttggctagatatggtggctcatacctgtaatcccagcactttggcaggctaaggcaggagaatcacttgagtccaggagctcaagaccagcctgggcaaaaagcaagaccccattactattaaaaaaaaaaaaaaaaaaaaaaaaaaagaggctttcagcaatgatagtgataaaattacaaaaaaaaaaaaaaaaaaaaaaagcaacagtaactaacattgagtacttactgtgttctgggcagcctgtcaggtatttaatgtattttatttaactcccatgatagccctttggggtaggtagtattctttatcatctttaggtgtgaagactgaggcttagagacgttgagtgaacggcctagagtgagtgacacagctgataaatattgtagttagaatttaaactctggaagtcaggattccagacattcttatccactgggctgaactgcctcgaataagtaaagcatctccgttagtggagatcccctaatagccctctgttctgggagacataccgagggatcattttaattaggtagatgtaaggaaacacaggggaaggttgtagctggacatgtgggaattgacaatgaagctcttttcatcattttctttggtacatgaagttcaaaggctgctgggagaaagtcagcaaattttcccaaagactaagcttctgggaaggcagttactgagacccctgatcacttcctttaggagggttaatattgctatatcacctctggactggaatggccctgacctgacgtggcagcagcaaaagacaggagaaattcgccatggagaggggagcctggactgcttacctggacttaacaatcctggcagcaacaacaagtttctagctcagttcctacaaattttactctagcatcacacatgtgtcctaggaaaaaagccctttgtgtttgtaactttggaaccatagattgtcagagcatttacattttttttttcttggtgacagagtctcgctctgtcagccaggctggagggcagtgatgtgatctcggctcattgcaacctccgccacccggggtcaagcgattctcctgcctcaaccttccgagtagcgcgtgatctacctgccttggcctcccaaagtgctgggattacaggcacgagccaccgcgcccagcccagagcatttaaattttaatagctccatcctgcgaaaggtcgtgctgtagtagatattctgtgtctcaacagtgacaccttgtggggcagaggtagcagaggctgggggctgtttggactggagtagttttctatctttcttaaagtcagttataagcaggattgatcttttggactctgttcctgaacttaacatggaaggacaaaaacacgtagaaaacatgatgtactgtgtacacctaatcaatttgaatgttgagttttgatttcactcacaattcattcattaaagattaaaagtacaatgatacactacttttcatctaacaggttaataaatattaaaaagtaggacagaatttagtgtcagtgagggtataagaaaactatcaaaaactgttactggaaataaaaaatcgtgcaaaaaattggaagataatctatgataacatatacccaaatttaaaatgcacatattctataatccagtaatgccatcattaagaatttaggagtgttgctgggcacggtggctcatgcctgtaatcccagcattttgggaggctgaagtgggtggatcatgaggtcagcagttcaagaccagcctgaccaacatggtgaaaccccatctctactaagaatacaaaaattagccgggcatggtcgtgggcgcctgtaatcccagctacccgggaggctgaggcaggagaatcgcttgaacccaggaggcggaggttgcagtgagctgagatcgcaccattgattgcactccagcctgggcaacagagcaagactctgtctcaaaaaaaaaaaaaaaaaaaaaaaaggaatttaggagtgttttctaatgattttttgtttgtttaatgtatcaattaggatgcagtcatttgtaaagaacaacgatgaaaaaacccaattcaaacatgtttgaacaatggaggggatttattaggcaatggaccgagatcccagaaatagagtggacttcacctggggtttgactcagcatctcagagatatcatcgtccacctagtttctttctaactccgttttctggcttctgggacatcaaactaattccctatcaaagttataagatggctgacaacaactcccaaggtatagtggacatatgttttctttatggccacaaggcacccttgaaaacctttcctatggagagttctccatcttataagtccttattttctcaatgtgaaaatcagaaattgtttcccagtctcccttgcagctctgtgaaatctggtgacatgaagatgcaatcaccatgcagaaaccctcctggcaagagtggcagtactagctccagaagcagcagttgcagaagttcaggtgaaagtccctagggaccagcacccttgccagtggggtatttgtgctcattgggagcaatggtggtgttttctttggagcagttctacaataggataaattgttgtgtggccctgaagccggattctctggtcttccagagagtctatgaactcattgatatcctttaataaatttgctttctgcttaaattatccacagttcatttctattgtgtgcaagaaccctaatacacagagatactttttttcagccacatctagagagtggggtaactttcagaaattccctcaaaagagctaagaagcttccttctctgttatctctggcaaacctctttttacatctctatagtcagaattgggtcattttttttttttctgtactactggggcttgaggacgggattatgataatgatctaaggcctgagccacattcttatcccttaaggcttaagacaaagaacaaagagggagaggcgaggacacccagggtgagatcaggaggatactaacttcagagaggggtgaatgggtgaaagtatattggaggtagaagaaccacaatgcctaccagacagagcaacttacatcaaaccctttgaacttccaagcttgctcctcacatgtgtgaagaagtctgcataaaccactatattatgttgctgtttgtcaccacctggaacatctggacagagtccccaggataggatacaacttcctttccatggggccagtcacattctttgctgtcttgttccttcattctgcctttaatgagggtggggtcaataaagaaaatggcagtaaatttctctttagtttaatggaaaattcctctggaagttcacccctcattgatgtactccacttccttatttttctcccctattcttaggagccaatatctctgcaacaatgcttccttcttctcacctttcaaagcaagactttattcattctctgaacaacccaccccttccaaatagatcagactatacccctagcggtatatttctcaaaatttggagcctgttctgagtaatatgcttttcaagcgaattttacccttagtactagtgacatttagggctggataatatttttgctatgagagactgtcctgtgcattgtagaatgtttagaagcatctctagcttctatccactagaggctagtagcatcctctcccaccaagttgtgacaaccaaaaatgaccactggagagcaaaattacccatttaataacaagtaagctagaataatactctgggggagactgtgctgggtgagagtagaggagttctcttatattccaagttagggtggagaacgtggggaactttatccaggtttcaccaaaaagtaaaggacaggtgaaggaactcacttctcttgtgagtcatcaatgaacttctttgctctcctgactgtgctgcaggggactgctgaatcaccatctcccaaggacaaatattaattttcatagagtacagcctaaccacaaggtagaagatacatattttcccatctgtccttctgtcctgtaattttacaaggccatctctctctttctctcttttttatgagacggagtctcgctttgtcacccaggcagtagtgcacaatctcagctcactgcaacctctgcctcccgggttcaagtgattctcctgccccagcctcctcggtagctgggattacaggcgcctgccatcacgcccggctaatttttttgtatttttattagaattgggttttcaccatgttggccaggctggtttcaaactcctgacttcaagagatctgccctcctcggcctcccaaagtgttgggattacaggtgtgagccaccacgcctggccatggccacatctcttataatgaggtatgacaaattattattcagcacagacttaatccacctatcttgcttccaaatgtatcttctttggatcatccctgagtaacactttttaaaattcccttagctactcacagagttggccaaagataagaaattattacttggaaatgtaatcccatagtttcttttttatgatggtggttgctgtgttacttggtacacagatattttgggttagctgatacaaaagtttgatatttcaaactcttatctttattgtggcttttagctacatttttttttctggataattttagcctttagcattatgaaatgtccttaattacatttaagcctttttggtctgaattgtctgatatcaaaagaacgaccctgcactcctattgtttccatttgtctggtgttttagttagttcaagctgttatagattgggtggcttcaacaacatttatttcttacggttatggaggatgtgaagtctaagagcagggtaccagcatgattgggttttggtgagtgccctcttactgctttgcatatagacacctttttactgtatcctcacatagcagagtgagagaggaagcaagtgctgttgcgtctcttcttagaagggcactaatcctattcatgagggctctgtgctcacaatctaattaccttccaaaggtcccacctccaaataccatcgcatttggaactgaatttcaagaagtgactgttgggggtacacattcagtccacagcacctagtatgtctgtctattcctttctatttagcctttctgaatcattttgttttaggtatgttgcttgcatgtaccataatgatagtgtatcagttagcttctgttgcataacaaaccatgccaaaacttaaaaaccagccatttatttagctcataattctgtaggttggcttaacagttctggtctagattggctcagttgatctctcaggtgcttgcttctgtgtctgaggtcatctagggtgttgcctggttgttggatgatctaagatagccttgttcatatgtctgacaattagcagactgttggttagggctaggagagtgactcaaccacgtctctcataatccagcaggcaagacggtacacatggaggtcacggggttgcaagtgcagtaagagaggacaaaccctgatgactgaagtgtctgcttgcatcacaactgctaatgccccattggccaaagcagctcacatcaacgacctagacttaaagggtgcagaaaaagactccacttcctggtgggaagatctgcaatgtcacactgcaaaatcatgataaagggagaggaagagtttgtggccaattttataatctatcacattgggttttcttttgtgagtcattttaaaagtctttttctttacttccttttttctttacctccttctgctattcgattttttaactttaagtgacattcattgatatcatttaaatatcttttgactcccatcaattgcctatttaccaataaatttacttattttacttttcctttctgatgactgcaacttactatgaaatggatccaaaaagcaaggtagatttatgggtggatagagggaagattagatggacaaatgtgagataaagcatgcatagtaaaatgttaatgttagaatctaggtggtgggtaggtgagtgtttattgcaaaactctatgctgtggctgaaattttaaaaatgaattgtgaagttgaggcaggagaatccctggagtccaggagtttgagaccagcctcggcaacatagggatattccgtctttacaaaaaataaacaaataaattagccgggcatggtagtgtgcacctgtagtcctagctacttgggaggctgaggtaggataattgcttgagcctgggcctggaaggttgagggtgtagtgagccatgactgcaccactgcactccagcctgggcaaaagagccagaccctgtctcaaaaaaacaaaacaaaaaaacaaagaaaagaagagaaaagaaaagaaaagaaaatattggaagaaaaagaacacaggagccagcttgagggtgttcatatcagtcaaatcttggacaatctgagcgtcaaaataaataataataacagattataatctaccaaattaaataaaaatctatgggtccatgctggtataaacatataaatgaataaataagggagaaaagaaaattcttctttctagaataatgtcagctaatagatataggcagaataatggataagaaaattaccattttgcaatcatcacagaaatattagattcatggaagaatcatcgaagtatgctaaaactagtggaagaaagtttaatgtggaacagtatgtttaatagcctcgaattatattcccacaaattagttgttaattacaaagggaaaagaataatttttccaacgagaaccctggtggtttttattctatctaatcccttcaaccttttttttccctctattggatcttcctcctgcgcccctccaccctctccttattctgggctagttgtactttctgcttgctgcagagctgccattttaggactttccttaactgctttcctagacctcctcctatgaactgtttgctgaactaccttatataagggtggattaaagacctctgtaaatatatacaatagattaatagattggtcatagaattctcttgaactacattttgtttggcacacagtataagctcaaaaaatatctgctgaataacttagtctggtcatccaagtattaccaaaactttgtaccatgaagcttgtaggatttggttttcatttaatgtatggttataaatattaaataagtgaagacaaatgaaattacatacattttgtatatatgcttactttttctttttaaaaatttatttatcttattacagtgttccacacgttcagagaaacttctctattaacgaactacagacatgatatctgaaagtaatctttatgcatagttttcttctaagaaactcaaatgtgttttatatgaagaaccactaataaccatttacttactactctctgctactaagtcttgaacagagagctaatgtatgcctaagggaaaaccgattaaagaaacgttcttatatagcttcaaaaacgaattaacaacgatagtcagggtgaaaggggaaggtgctcctctttaacttgaagtgcttaaacaaatattggattttagtgaaaacaggagtcttgaaatgtatccttaatgtccagatactcacaagataactttcaattatccagaattattttttactctatagagcaattcttccaaaatagtgcatagatttattctcagaagttatcttattcaagtaaagtgactctcatccaagagagacactggtagcaaagggcagtagttagttaaatagcagtgaaactgatattagagaactgccaactgatggaaatttaatcagcagtatatggaattggaatgggcttatacagggagtaattctgaatataaggtgttcagcagttttcgtttctttaaaattttttgtacaaagtggaaaaaacttacacacccatatttgaaaaatgggtaatttttctttcattcattattattttttaaagttaaataaattaaggagacaaatagttctctatcgcatgttgtaaaaaatccagggcccctgtcccttaccattgccttttttccattccttacatgaagtgtgtcttcccaggtgacacgggagccatccttgatgttttttgtttcatcaagtctatttgggtgttcctattctatgcttcctcccctctagattcccgcctctacctcatactctaggtttatcctgagtgtggagtagggaagtgtgaataccacatttacattttccttttgttcttcaccttttctctcttagactgttccgctcagcaccaaaaggactttctttcttgcactgcaggaacttcccttacatcaaatccttatactgtttactctcatttattgtaaaaatactacagtcttctgaatctgacttctgtaagcctcttttctccttaataacaaagactcctccaaaaatcataagtgcttactttcaggctatcgtctccatgtggacttgaaacacactattttgaaactcaaagctgccttcagcagggttctctccattcgaagaggcaactatttccactggttcaatcagtggggttaatgataggcccagaaccaggaattttcaagaaggaaagtccactgacttaatattctccaaatgtactcgttatgctgagaatacacactaagaacatatggcatttcattacataaatgaaaaacatcatcataagcaagtttggaagcagtgaaacacacccttggaaggcattataaatgctccctaatatctgattctcccttcccagtcccattgcagtttggtggagccatgtgaaaggttctagctagtgaaatgcaagtggaagtaggagggctgaggtagtgacaagctgctgcatgatgctacagatttcctcttctgcagtgaaagtggaatctcatgttgggatggcagagttacaagatcaaagtggtctggattgctcagacactggttggaggacaactctaagcctgttccatattagactttgtgtgagcaaagaacaaatgtttattagtatctttgagtttaaaattgaaactgagattttgaaattgtttattgtcagaacataagctagccaatcttgactaatataccataattctttgcttattggcctattgcctaattagctggagtgcttgttgttggtgaaagtgtgttattttggaagtagagaatatattttatatatatatattttttttttttacaagggtgaaacttatttaatgatatttattgaatgcctgctataccaagtgctagagatgcatcagtatacaaaacacacaatttttgccctcatggagcttacattttagtggggaagtcagataaaaattatatcaacaaacaaaatacttgcaagttagggtaagtgttatgaaggaactaatggctgcgctagaggttaacaagggagggaatctactttagatagtatgatgatgaggagaggagacctttcaactgagatatgaagaaagggagaaaacattctaggtcacatgaggcaagaaagatcttggtgtgtttgagaaactaaaaagaccattgtgactcagtggtaacaaatgaggaacaagaggcaaaatatgaagttgcagagaaagatcatcatgttgtggcagggagtttggttttcattccaagccatcagatagtatcaccttaatcttcctttggtcaatgccacaaaactaaccacatctatgttaactttcttttctccgccatctgcctcaacaaatgtcatgtccctcatctttctgatggctaatcactccctttgtatcctccctcctctggttaccctttctcctcttttcatatactttgcttcttcgttatcttcccaatgggtcagtcctgtcaaccaacctacaagacaccacccatcccccaccctcttccatgggttatcaactggtaatgattctactaaccactcagatgttcaggccccaaaaccaggacctatcttgaccactctcttttctttactttcctatgcagttcattggtaaattcttcagttttaaactcaaagatattatcagtttggttcactcttgctaatgttagctttcctgatttcgtcttgatttctgaaatggtctcatgatttgcctccttgcctccattctttccttcctctaattttttctttatgcatcagccaagggtggctacttattttaacatagaatagcttaattaaaataaacaaaaatttttataaattgtggtaaaataggccgggtgcagtggctcacgcctgtaatcccagcactttgggaggctaaagcgggtggatcacttgaggccaggagttcgagaccagccgggccaacatcgcgaaatccagtctctattaaaaatacaaaaattagccaggcatgtggtgtgcacctgtagtcccagctactcagaaggctgaggcaggagaatagcttgaacctgggaggtggaggttgcagtgggctgagattgtgccactgcactccagcctgggtgacagagtgagactctttctaaaaaaaaaaaaattgtggtaaaataaacttttactataatgaaagtagtctatgtgctgcaaaagttacaatgaaaaagataggcaaacacaaagaaaaaaatacacatttccacttccaaagattaccaatactaacaccttagggtataagcccactatttttttagttgtacataaatacatatatgtgcatttttaaaccaaaatgagatgctgtaacatactatttcgtgacttgctcttttcagttaatgatcttttccatggcaatacagttctattttatccaatactcagtccatctacattcatatttctttaatggtcctgaaaatgcattttatagacagtctgttcaaaccaggatccaattcaaactgttatgtcccttaaatttcttttcataaagcagttgcttttatcatgacaaattgttgaagagatgggccagttatcctgcagaatgtttcaccttctggatctgtctagttacttcctctggcatcatttagtttgttcatctatctgttgtattttttataaactgtgttagatgcaaaggcttgacagattcaagttaaatatttttgcctggaatataccatgatgatactgtatactacatcccatcaaaagacaaactatccgattgagctacaacgtggcctttaaaaaatgtaaattataagtgtatatagcttcctctgcatttattatacaatactaaacaaattcttcaacttggacaacaagtttctgaatgatttgatgcctgcttactcatccaactttattccatcccattctatttgtttttaaaggtcttgtcacatgtttcgtttctagtcctgaaacatggttaagtgcttgcctcctagggcctctgccgcaggcttttggtttggaggctctcctttgccactccacccctctccactcttctcctcttctgatatcaagcatcttctcaaattacaggtgtcgtttttaatttatttaaaattttgttctttctacaaaacagcaaccagagacacaggttcattttcagttaacctactcggagaaaacctactttatcttatttaaattagggtcctccaagcgatcttaacatctcctaagtcccaagcaccctgtttttttcctgatactttttccgtttaccttaaggtctgtgtcaacctgacagtaagctgcacgatggcaggggtcttgcctactaggttccctgtgcacagcagcccgtcaacagtagttgaataaacatcataggtcacaataaccctgggactgcctcttggggaggtagccgcaaactctcgcaggtggcagtgacaccagtacttctccggggggttgttcgagtggaggaatactcttacgtgaaagtgctcagtacaccactgcggcaggaaggaggaagggaagaattccagatggggagaaagtaatattttgcagcacagtacagggtaaactgggtccaggtgggcgtagccgccgcgacaccttcacgtgaccgcggacagcttaaggaccccgcatccagtgcgcctgcgctggagctcccggaagttgccggacccggaacgcaggcggagcgcaagtctgtcagccagtcagtccgccagtccgccagcccagtacctctctctcctcggccctcgtaagctgtccgcggtctgtttggcccgaacggcggcggaggcgctgatcatggcgacattcatctcggtgcagctgaaaaagacctcagaggtggacctggccaagccgctggtgaagttcatccagcagacttacccaagcggcggggaagagcaggcccagtactgccgcgcggcggaggagctcagcaagctgcgccgcgccgcagtcggtcgtccgctggacaagcacgagggcgcgctcgagacgctcctgaggtgggcgcggggctgggagtgggtaggttgtctgccagccgtcgctcgccgctcctcttcccgtctccccccttccttcaatcctgtaacctgggcggagccgccccgtcccggcctgaccaggcgcgtaggtgtggtctgcattctttgctggtgagcaggacccgccctgcaggcccgctgtgactgcccgcttgtcctgcctgcacgtctgctctagcccttggtcggcgagggctccgtggatcagatacctgggagcagcagtctgccctgtactgatctcttttgccacatttacttagaactagtcttcacttttttgggtctctaactgaagcttcccctttcgccccatttttccatcactgtctttcttgggccacattttgatttcataatagtagttgcttgaaggcagtgggggaagtgggggaattgggacactggaccaaatgtctgatcagctcatcacattgtccacatgaaatggaccgtcttcctcagttcaaaataatcaaatgatagatggagaattctgaaagttaggagctacaactatttgaaataaaactctagttacatagttgaaccgttcaaggtaggttgtttaaaagcagtttgttcacaaacagatatatacacagtagagtaaatttgttattttagcaaacgcttatttagctcatgctgatttaatgagggttcctttcatgatacttaatagttataagaacattttttacgattttatagttaaacatttcttttgcataccttgttaatctcgttttctccgtatagtatattctacttgtttcacaggagaatcacaattgtattccaatccaagtagcagaaacccaggctaaactagcttgagctaagaaaagacttattctgccgggcgcggtggctcacgcctgtaatcccagcactttgggaggccgaggcgggcggatcacgaggtcaggagatcgacaccatcctggctagcacggtgaaaccccatctctactaaaaatacaacaaattagccgggcgtggtggcgggtgcctgtagtcccagctactcgggaggctgaggcaggagaatggtgtgaacctgggagacggagcttgcagtgagccgagatcgcgccactgcactccagcctgggcgacagagtgagactccatctcaaaaaaaaaaaaaaaaaaaaaaaaaagtaagacttattctgctaactgaaaagtctagggatattccttccttagctttaggtatcactggagatcgtcttgcctccgtgatgcttccctcgaaagctttgttcatgtattgagagggatggctgtagtgtaataacaatcgtccgcaacactcagtatcttacagaagggagtgcttttctccttagctctggtggaagtccatgggaggctcctgggtttgtttgcacccatttatgatggtgggaaatgggctaagttaattgcccttatctgagtcatccagccggtttaatttctccttaccccatggatcaaagcaagatgagtccggactggggaagggttggttctccgaaggaaggggtactgaatagattgctcagaggaattaagaccccttggtgtcaaattttagagctacaactgttgggctgcaaggatcattagtctaatagcataagcattttttttaaagttaacctagaaatacttagccattctttagaattaacataattaaacaatttcaaggtaatttttatgtaggcatgaatagcattcagtgaggattttccattagtaatattaagaaaacatagttgtggtataatgagccctgtgataaaaatcttgttgaatatatcaaatttggttccagccctcagatttggggtcttcagaagcacttggtgcatgggttttaagctaacagacatgggaggttggtggataatggtttggatacggttctcctgtcaactttaaaacttaattcatttgttccttcctttattctttttaccagacttaaatgtgtgaactgttcctaggtagtggacctgttgtagatatagtctctttgaaactaaccatgtttctttagtcacctctgtataatcccctcctgccacattaattcaacaaatattaagtattttcactttttgggcttctagaggggttagggtaagcttggagatattactaaagtttataatggaggtaggtacaaaagttttgtaggtatatacgctgtaaaattagatgtgaatcagttgtgtgatgttcattcaaatccggcagaatatcttatttttaataattatgtttggataattgtgtaaacttaacattaattttttaacttaatgaactttttaaactaatgaactttgaaaaacagagtttaaactaattcctaaataattgaagccagcttgataagtcctgatatgcagctccatatattgctccagtgatagacttgttttcttattactaacttgtaggtgttctattaaaatttcctaaaatatacatttatgcatattataataatgagaatgagtacttaaaaactcatttgttctgggtgtggtagcatgcactcataattccagctgaggcagaaggatcactagagcccacgagttggagaccagcctgaactacatactgagacgctgtctcaaaacaaaacaaaacaacaacaacaaaaaacccttttatatgatacttcttcctttataaagtggcttttactaaaaattgattagaccttggtaaatggtgacctagggtgatcaaatgggaaccctgctggttttttatttttattttgtattttatttgaagctccagatataccatttaccagcattgtgtaatttcttttgtggtgatcagtttctttagagagaaagcttctagtcttccatgaaaaagtctgcttatcagctttctaaattttatcctggggaatggaggttggggatcttaacaatcatgtatgcagtctatcaggtacatctatttttagtatgacacctgcattagggttaggttcatttctgtgtggtagatcccaaattatctgagttaagattttattttgtaaaaagttggcaggtaggtagttctggtagcccagggctggtgtagtgtttctgtggagttaattggggctcagattcctttcagctttctgctgtttgaaacctagaatattgttctcaggtccaggttgcaatcatatccaagttccaggtagtaggatggagaaaggcacggggctcgccctttagggtgtttcctggcaactgttccacaacaccctgcctatatgttaccggccattttgtgtgtccttctgataggatgctaggaaaaggaattttcattatgagcagctgtatactcagctaaagggacacagttttgttaataaggaataggatagactgataatgatgtagtcaattagcactccctaccccacttagcagtgcttgatctccaccttagttatatttgatatctctgacatttttttcttttttcttttttttttttttgaggtggagttttgctcttgttacccaggctggagtgcagtggcatgatctcggctcaccacaacctccgcctctcgggttcaaacgattctcctgcctcagcctcctgagtagctgggatttacaggcatgaaccactctgcctggctaattttgtatttttggtagagacgggctttctccatgttggtcaggctggtctggaactcctgacctcgggtgatccacccgcctcggcctcccaaagtgctgggattacaggcgtgagccactgtgcccggccaatctctgacgtttttttgagagtgaacctaccttcagagtagaggatctgggagcctgaagttttctttgaaggattttcaaccataccttctcgttccagcctcacattgaactaccttcagaggtacctcatgtttcttaattcagatccttttctggcttctctggcatgatttggcttctgctttggctcccttccctcttagccagttagattttggctttctctttttcattcacttttcaccttttagtaaattttgttgaaacctcttatatcctgtgtgtcatttcccgttctttttgtccatgttcatgtacatcttttacatttttaaattcttgttttagtgggttttggcggggagcaaagaaggatgtttattcagatttatttgtttaactgtaagaggaacttgtttgcattttcagctctccacagtgcttgtaacaatttacattctcatcagcaggtatatgggagtactttattcttccatatccttgctaatacgtactgattaataatttaatttattgctttttgctaaactgatgggtgagagatagtacctttagtttgcattcctcttattttactgaggttgaacagtttttgtttactggccactttgtttctttttctgtgattgcttgttcttttcttttgcccattttctattgagttgttttttccttactaatttgtaggagttgtagcattttctggatatttatacttttttcattaggtatgttgcaaaaatcttccaatctgtttcttgtctctcaactgtgtttattctatcttttgtcacatggaagttctcccaaaagtgttgtcatctcataatctgtagttaacattttttttcttattcctaatgttgtgcatgtgttatgtgtgattttcctccctcagatttgccaaaggtttggagccaccttttctttgtttaaaaccaaggctttttggttggttttctgcccttgtcattcatttttttaaaaaatgttctttgttccttttttctatctttttgtattgattggttagttttccatctttttggtttttctaatatattttaggactgtgtatttttttctcagtctgtattggttgcatcctactgactttttcatttgtaaaatgaagttgatggaatactcttttaatttctgaaatattttctacatggtagtgttttatagatcagtaaagaaaatgttctgttttacttcataactgttgtttggattctcgttgttggtttggtggtgaacatactctttgcagaacttttccttgtcccacggccatgaaaatttaggcttgcaaacggtttgaagggtgagtaaagcagggttttattgggtgaaaaggaagaaaagggggaaacaggaactctcacaaagctagagtcccagttagagcacatcccgcctgcagcttgaatctcaggttccgcacaggaagaggaggggccagtctcctccctatggaatttcccaaggctccaccttagtgaacaggctggttggaatttctccagggaccccctcccacctggctgtctcaatattgagataatattagcacaatgacgttgctacaatttgttaaccaaatactaatggagagtctgtgtgaaccatactgtaggagacaatgtggaggatataaagatatacttggtccctggtctcaaggaatatctgtaattggcagacctttttggctccgtaattttattccacataggtgaataaacatatgggaagatttaaaatctgatttgtttttctgtgttttgacttttctggtgtttagtaaatcttatcaggactatcatcattctgtgtatctgtaagaagaatcttctgaggtgctttacacaggagatttaagcccacaaagctatctttatggcagaactggactaagatcctgacctcttgattccccagctagttactttttgccatactctctgctgcagtagtgcttgattaatgatttttcatgtgttaaattgggtgaagaaagaagtgtgaaaataaagttcacaaagaatctatgaactccagccaatatctctggcccagcttttctgattctcttgtttcatcctctagttggtggtctggagttgcacatccctaaatacagattgcagctgaatagggttgtgtgaattagcattgcagtattattttggccatgtggattggttgttcttgatccccacaccttccccttaaattaaaaaattcttttccggccgggtgtggtggctcatgcctgtaatcccagcactttgggaggctgaggcgggtggatcacgaggtcaggagttcgagattagcctggccaaaatggtgaaacactgtctctactaaaaatacaaaaagttagccggtcatggtggcgggtgcctgtaatcgcagctgctcgggaggctgaggcagagaattgcttgaacccggaaggtggaggttgcagtgagccgagatcacaccactgcactgtagcctgggcgacagagtgagattctgtctcaaaaaaaaaaaaaaaatttttttttcctttttaaaaattaaatatagaatttaatctttatttaaaaattttaacatttttgtttttttaagacagggccttggctcagttgctcagctgcccaggctggagtacagtggcgccacaatagcctactgcagcctcgatctcctgggctcaagcaatcctacttcaacctcccaagtgggtgcatactaccatacctggctaattattaaatttttagtagagaggaggtcttgctgtgttgtccaggctggtcttgaactcctgaactcaagcagtcctcctgtcttggcctcccaagtgctgggattacaggtgtgagccaccatacctggccaatttttttttttttttaaactagaatttctttttttgttttttgagatggagtctcactcggtcgcccaggctagagtgcagtggcgcgatcttggctcactgcaagctccacctcccaggttcacgccattctcctgcctcagcctaccatgtagctgggactacaggcgcccaccactacgcccggctaatttttttgtgtttttagtagagacggggtttcaccgtgttagccaggatggtgtcgatctcctgaccttgtgatccgcctgtctcgacctcccaaagtgctgggattacaggcgtgtgccaccgtgcccagcctaaactagaatttctaatgggaatttgtcctgtacctatttgtggtatttcaaagaaatgtatttatttcctagtttctttttccccatgagatttttaagttgagttattatatatttgtgccaaagtggttgagttttataaaatactggagaacatatataagtacttctccattgttgcaaaacagtaatctgtaactaccatttgtcatacatgtactcctgtgtgtccaggaactattttaagcacttcatatacagtaccatttattcctcacgcttaaaggaggtattattactctttaggaaaggttcagagaaattgaataattttttcatgatcacatagctaagagttgggattcaaactcagggctatctgacttgaaagactgtgacattataccttttaaatatatttgggattttatagttttggttaaaaaaattcgcttatttctaaaatagaatctatgaagacaccaatttttttgcaccattattttccacaatgtgctagtttttgccaactcctggcttagcatactggctttccctgtgcctacttatacaaaacttgcagcctaggtctactttgttagagatacatcctaggctagagtctgctgctatagtaaagtgtacttaaatgttaaagagaagggtgtggtagattctcttgtttctgtggattccctatctagagaactttgatgcttgtgatctgggctgaactatgagggataataccttgtggaattatattgaaggagtagcttatggtagttggatctcctggaacagattttgctcatggtaactgcagttagcaatggctgctttcttttgtaaagcatttgttgatctctctcattttgttggggttttctccatgctgatcagacattgttgatttccagtgattgccctcctgttgtacttttatttcaacttctataatctgtcctaagatagccattttactttgagggtttcatcacatagcttctaatcattcagttacaggatataaatgccctgttccccccatacagctcaggttttgttagttggcctcaaaaactttggggtgaagagaatgggtataaaaattttagtgcattcagtttagccattcttcttttcctcacccatttgcagaggaagtaacctcatttcctactactcccttccttgtttactttatagcaagggtcagcaaaataaggcctgctcagctgcctgtttttgtatggcctgtgagcaccactccagtgggttagcattgtgagtgttggagaactagcttagctgtttgcctctgttccattctcccctttgcttctagctcctgtcaccctggccagtggccatgctttattgctgcccagacttactgtggtgctgcctacaccagagtaaatattctgcttggcgttggcttggcactaaatggtataatctcagtctggaaattggtgactcagcaaattatctcacctacggccccctggggcaggtgcccacagtagactctccctgagaattttgatctcattggggtagagtaaaactgaccatgttggtcactcctcctgtctccctatggctcctttccatcagacaggtactttttctttggagaatgtctccaggatggcacctgggcagccgtgtgccacaattttgggatggcccaacctaggcaaaaaaggtacagggcagggcaggggtttttcctcttgttatataagtagttacatacttattatatgcttgatttagcctttttcccagcagagtctagaatatcactgttcagaaaaagtttgccagtcctggctttatagccatattggcctccttgctgtgccaagcacacctttaggcgttgttgcctcagacctttagcacttgctgttcccttcttatgggcttgttctttgatagctcctgttcattcacaaaccagaattttaggttttatttttcagagatagaagaaaactttgcattttaccgattcatttgcttggggctagcaacaaaacagagagcaaatagatctagtctttgctttcatggaatttagaatcctttgagagaaaagacaataaacataatcccaccaataatatatcacaaattgtgttaaatcctatgaagaaaatgttcagggacctgagagattataaatggaggggcaactaattttaaaaaggggttacattgactgtatttttttgagacaagatttcacgccatggcccatcctggagtacagtggtgggatcacagctcacttcagccttgacctcctgggctcaagtgatcctcccaccttatcccgctgcatagtccctttgggggactgtaggcccaccaccacacctggctgacgtgtgtatgtatgtgtaaagatgaggtctcactatgtgcccagggtggtctcaaacccctaggctcaggtgatcctcctacctcagcctcccaaagtgttgggattacaggcatgagccacagcgcctggcctagattaactttatcacttctgctgccaccgtggactccattgatccgtgctagcatcatctcttgactggattactacggtagcttcctaactgatctctctacttctgctcgtgcacacctgcagtcagttttctacacaacagtcatggtgactgtatgaaaataagtcatattgctgttttgtccaaaccttttgatgattcacactcttacactatatagtaaaactcagaagtcttacagttgcactcaaggcatcattacttctttgacttcatcacttactattttctcccttgctcactctatgatcatattggtctccttgccatgccagatacattcttaagtaccctcttgtcccagggtattggcacttgattttccctagattggaaattctcagatatctgcttggctcacctcatcacctttttcatgccttttatggtcatgctgttttagagttaaaactttttttcatgtagtcaaatgaccatgttatttaaaacgacaaccttcttacctctcctcatatattcactttattcctcttgtctctttattctccatggcacttaccactgtcttctatataatatttttgcttttttgtcttcccctctaaaagcttcacaagagcacagatttttagatgtttactgctaaattcttaatgtcctaaaactggtgcatagtaagctcttagtatatatttgttgaatgaatgaatgaggaaaactttctttgataacaatgtcagcctagacaatagtgagaaatggtggtaaaaagagtgaaggccctgagcaaggagagcctataatttagtgactcgaatgtatagtgaatatcctgagatgaggctggagagttggatgatagccatatcctgtaagaccttcaacatttttggatgtaattttaagtgtaatgggaatccaccaaagggtttcagtacttaatacttcagagtttatttcctgagtacaaagatattctcctgtataaccatagtacaactttcaaagtcaggaagttggcattgattcattattaccatttaatctgtagaattcattcaaatattgctgattttcctaatattatttacaggttcaggatctaatctagaatcatgcagtgcatttaattgttacgtctctttaatctccttcaatctggaccagttcttcagtttttctcgtctttcatgaccttgacatttttgaagagtacaggctaattactttttagaattttcctcaataaaggcttgtctcattttcttgtgatttctgcatttttgcataggagtaccagcgaagtgatgctgtgttctttctagtgcatatcaggaaaaataagatgtggatttgttctgtagtggtaatgtttatttttatcgcttggttaagatggtgtttgccaggtttcttgaccttacagttaataagcttgttgtactaattagtaaatattttgtggggagatactttgggactatgtaatatcctgtttcattacacacttttcattattttatcatttattgatgaatcttaccagaattagatattatactctgaaaggtaccaaatggtaatttttctaatttcatctagactatggtaccgtaggatagagttttccctattcacctgtttatttacctccgaatggtggtcttttcctcaatgggctcttattttttactgttattttatttagattggttcagtgcttagccattgggagccccttaaagctacctcctgtgcccttttgacatgtcctcatcattttttgagtacttccttaactttctggcatagcaagatgttttagacttgaatattgaattttttcagtctcagcccttgagtcagccatttctctaaggagcacttggctcattttaatgcaaaagattatctgggcagtaggtgtgcttattgctactgtgaagtgttactgcttataggccctcttagcatatacatttaggaaatacatagttacacatttatacttgtttttatttctctctgctacctttaaaaaatgagttaaaaactagctgggtgtggtgacatgcacctgtagtcctggcagctcaggggctaaagtgggcagattgcttgagcctgggagttcaaggttaccgtgtactgtgattgtgctactgtactgcagcctgggcaacagaatgataccctgtctgtaaacaaacaaaaaaagttcacattgatatctccagttccagtttaaaactgtggagttattctaaccttctgccttctcatgtttgtggatttttttttttttttttgagacaggttcttgcccaggctggagtacagtggcgctgtcttggcccactgcagccatgacctccagatcaagtgatcctcccacctcagcctcatgagtagctgggaccacaggtgtgcgccaccatgcctggctaatgtttgtatttttagtagagacagggttttgctgtgtttcctaggctggtctcgaactctgggctcaagtgatccacctgcctcagcctcccagagtgctaggattacaggcgtgatctgctgtgcctggccctttcaggtatttgtatctctgaccttgggaaacttggcttccattatcttcaatgtatttacttaattggatagtttttcctgtttataaccaaactcatagccatgccagccaaaagcttggtctcagatatgttgcccactcctgctgaaaatttgcccccagaaataatcattacaaaaatacccctgatgaaggggtgggggaagtataagggaaaaaggaaaggaggaaagattagaggccagttagaaagcttggcctgacccttttctcctcctttccctgccagacttgctgactgacagctcaccctgatggggggaagtctgctttatattttgtgatcattctggctgctatgcagaaaacaggtcggaaagaatgagaaaggagatggagaggttgtctaggaaacttttggatttctagctgaaagacagtggtagctttgatgtgctgtgtggcagtgctggagacagatagagatgggcttacccaaaacatttaaaagtcggtaaacctgtttttaattggcagtttaccagagatactaatttgtctaatggatacaaacttatttattttagtaagaaatagtatttttaagaaatattttggttttcagagcagatgttagtttgcttttagccaataacagttgataaatatttttctgtggtggtgggtatgactttttgttcatagtttttcactgcatatattttttaagcttctggtttacgtattaaaaaactttttttcatataaaatagctgctcaaagtaagcatgaataatttttgtatcattttaaaccagttgtaattacataaatgcatgtaatatttagctctggtaattattaattctgctctattttttagatattatgatcagatttgttctattgaacccaaattcccattttctgaaaatcaggtaagtcattaattctgtcttaaaattatatggtaatagcacccatttccttctgccaatatcttcactgtctttagagttttatgagatagtgttataaaaataggagcttttagatctgtctaatgcgaatatatgtgcttctgaagaaagaatctcctggaattctgttcatgtcattcttcagtcacttctggggctcatgtagagcaatggtttgtttttctttggacttcattttatgtcagtaggatctgttgactgattaatctgctgtgtcctttcctttgactttttcagaattaggaaggaaactgcacaattcaggaattattagtctcagtttatgtgctttaaaaattattcgcacaagttacatttgcatgtaaaagttgcaaatgctgttttgattaaatgttaattacatgaatgtcaactattttctccttaaaggctagatgttgaaaatgctgataatttcttatagttttattttggagattggataaagattttaaaattagtgatacttttaaattttaaaatagttataagaaaagtactttaaacattcttgtactaaagtttttacaggtgaaataattatatgttgagatttcctttaatatattcctggaaaaaaagtgtaggtggctggaggcagggcaaattgggaggtagatgaaccaagaagggcaaaagactaaagctgctgatggatgtactggagttcattctctttattctctttagtttttctgtatgtttgaaaatttccctaatcaagagtttagaaatttttgtattagattgcaataaataatttaaatgaggtttatttctttctaatctttgtatgtgataatacatatttcaggagcagagagagagttttttaataaacatttaattttcatgtagcatatggaaaagtgaacaaatcacgggtatagcttgaatcttacaaagtgaatatgtctgtataaccaccacctagataaataaataaaatattaacctattccccaaaataaccattctcctacttttgtcatcatggaatagtttttaatttcatcttctaggaaacctgtagtacttacttttatttcccttgcttcacttagcttatttgacaaggatctactacttattttgttccgttgaagtcattgtgtgtttataaagatgaataagatagtgtttatgattaccaaggcagaatgaccatttgaaatatcccagtgccagtattttactttttttagatttcaatttaaaaggagaaggaaaggaagttgggtggttataggagataatattttgagcttttgtcctttttttcatggtggatttttcttcaaagaagacttaatatttaatgagattcaggaaggttacctaattttctgttttctttcattctatccagatctgcttgacatttacctggaaggatgctttcgataaaggttcactttttggaggctctgtaaaactgggtatgtaatttttaataaaagtgataggaaaattggtctaactactttgcattgtttttagtttttaaaattgttatcctaatgactctttgtaaatactaaagttttttacatttcattctctttttagcttcaacttttaatgcaattttgaaatatttgtagagagcccatgccttgccaggcactgtcctagttataaaaatgaataaaaccgatgtacttagtttttgggaagatagttgatcatttaaaagtgtaatatgtaatagcctatgaacaaactcatggaagcatatatgaggaagaaagtaattctaccttttgaaagcagacaatgtttgagttaggccttgaaggatggatttgtagaaaataatattacagatacaaaatcataaccataggtcagaagggtgaggacatttgatctaccagctccagcaagataacctctctgtgccttaattttcttatctgtgaaatggagataatactatttctctcattggattctttttttttttttttttgagacagagttttgctcttgttgcccaggatggagtgcagtggcacgatcttggctcactgcaacctctgcctactgggttcaagtgattctcctattcttctacctcagctgggattacaagcacccgccaccacacctgggtaatttttttagtagagacggggtttcaccatgttggccaggctggtctcaaactcccgacctcaggtgatccacccatctcggcctcccaaagtgctgggattacaggtgtgagcccctggcctattccattagattcttatgtggattaaatgagtgaatacatgtaaagtcctaagaacagtgctttattagctgcaatgaataattatattattatataacattgtaatgtatatgtgatatatgtatatttcatgtatatatgtatatttcatgtatattatatgtatatatgtattatatatgcacatataatgtgtattatatgtgcatatataatgtgtattatatatgcatgtatgtatatatgtgtatataatgtgtattatatatatgtatgtatatatgtaagtatataatgtattatatacatatatgtatatatacttacatatacacacatatatagtatatttgtatacatatatacatttatgtgtatgtatagtatatataatatgtatactatatgcatgtattattcatatacatatatgtatatacatatatacatatatattcatgtacacatatacatatatgtatatattatatataagaaatatgtatatatacacatgcattatatataagtatgtataatatgccttatggtatatcctttttatagtatacatatacattaagatatgctataatatatactatataccttctaagatatagatgtataatatgtattatatagtatgtgcataccatatacatacatgtatctatatatcttatataaggtttatacttatatataggtgaggaaatggaaatatatattttatagtagatattatatataatgttaatttaataataattattgttatggcttgtaaccataggttgaattggggattatggagggtgatgatattagaaagcagattgtggagagttgcaaatattatgctcctgactttgtacttttccctcttatataataatagtgcatgtttattgggcatttattttacccaggtactctggaagggacttcataaatagtcttactgaattctccaatagcttaatgaggaaaaggcactattattgccagttgaacaaactggtttagaaagattacgtgattttctgaagtcatatggttaggatttaatgaagctgggatatgaatctagaaggcctaactcccgggactagagagaaacagaccagtgaggagactgatgagagatgatgaggttagacaagctagtgtgtgcaagttacagaagagagggatttcagacttttcagaggtgaagttgactgaatttgctgactaccagtcagaaggaagagtaagagttgaggcttgactctgagatttaataagttggtttgacctgttggatatttattcctctttagtagaaaggttgactctgatttttctgtgttatgtctgggtagacatttctctggcattttgaaataaaggatttaaagctcagaagagaaagatatacattcgggaacaattattaggtgataataaatttattccttctggcagataattgactgagaaaagtatcaaagtcagagctaagtaatataacattcaggggaaatagaggaagaggttctgggaatgaggttgagaaaaagctttcatatcttacaggaaccagggtaaaatagagatgtgaaggaatgccagaagagtttcaaaggtgatgtggtccagtggttcccaaacctggctgcgtattagtattacctgggaaaaatgttaaaggtttatctttaaagatgaagatacagagtgccagatgtgataggagaaagttttggagtagggcactggaattagtatctttggaaatatctccgggtggccgggtgcggtggctcacgcctgtaatcccagcagtttgggaggccgaggtgggtggatcacgaggtcaggagtttgagattatcctgaccaacatggtgaaatcctgtctctactaaaaatacaaaattagccaggtatagtggcgcacgccttgtaatcccagctactcaggaggctgaggcaggagactcacttgaacctgagaggcagaggttgcagtgagctgagattgtgccattgcactccagcctgggtgacagagcaagattctgtctaaaaaaaaaaaaaaaaaaaaaaaaagaaaatatctccaggtgattctgatgatcatcccaggtccaggctggaacatccttgacagagtcattgtggcagaactcaagtcatgtaaggttggagaagtcactggatttagcagagagaagtttctcttggagtatcctgaataagcatcagattgaggggtgaatgggaggtgagggaatggaaacagtaaatgtgggttgctcatttcaggaaatctacagtaaagatttggggacaaagggagcatcattctgagagggagccaaggtgcagaaaaggatttttagtattgttatgacttaagaaatttggtaggctgagaataaggagcagatggcaggagaactaggagacacttgagtgatgaactcaagtatccagaagaactgggaagcaaaaaattagatcataaacaggaggtggttcatcaaggcatttctagtagcaaaaattggtaattaaatgtccttcagtaatgtcttggttaaataaaaggctactcattcatttgaatattgtgtacttttggaatactaagaataaaaatgcatatatgtatttgttgatatgtaaagttatatcaatggaatattgaataaaaggcctgccttagttcagagttgttgcattgtacaactctagggtccccggaattgggctccttgggacactcctcatacagaactcagagtaattcctcctccctcgagttgtgcactccaggcaactcgagtgtggtatagtatccactttgtgaaaagttatgtgtgtgaatgtttatgtagttatttgtgagataccaaaaaataaattctggttaactctggaagatgagatgttgggtgatttttaattatttttttgtagtttagaaaaattgtttgaattttagaaagctgttattttcatgagttattttcgttttgaaaaacttagaggctggaagtggtggctcgtgcctgtaatcccagtacttggggaggccaagacaggtggatcacttgagcccaggagtacaagaccagcttggggaacagacgaaactctgtctctacaaaaaataaaaaaattagccagacatggtggtgtgtgcctgtagtcctagctgtttagggggttgaggtgagaggattgcttgagcctgggaggttgaggctgcaataagccatgatcacgccactgtacttcagcctgggtgacagagtgacaccttgtctcaaaagaaaaaaaaaagataaaagaaaaacttaaaagagagcaagtaagaaacaagaatacagttaaatacttagaaaggcatctttgaaaaaaaggaaaattaaatattgttttgaaaacctggtttaagtttagatggatagaaaaaaataaaggaaaaaaagataaaatagctcttatatgtaaaatctcataaaagctcttatacatgacaaattgtcaaaataaaatgagagactacagtctggtatgataatatttatgggcaacataatagactgagatatgtatccaatatataaacagtttacttttatttcttgtttggaatatatttcattcttgttttttttttttttttttttttttggagaacagtcttgctctgttgcccagggtggatggagggcagtggcatgatctcggcttactgcaacctctgcctctgaggttcaagtgattctcgtgccacagcctcctgagtagctgggattacaagcatgcaccaccacgcctggcgaatttttgtatttttagtagagacggggtttcaccatgttggccaggctggtctcgaactcctgacctcaagagctccgcccaccttgccttcccaaagtgctgggattacaggtgtgagccaccacgcctggctgatatttaattttgttccttgctctctcctgccacactggcctaatgtatatatttattgaattaattaaaattatattcagaacttgaagatattgatcccttgcttttttttttttttttttttttttgatagggagtctcactctgacgctaggctggagtgcagtggcacgatctcggctcactgcaacctccgcctccaaggttcaagcgattatcctgcgtcagctttccgagtagctgggactacaggtgtgcgccaccacgtccagctaatttttgtacttttaatagagacagggtttcaccatgttggccagaatggtcttgttctcttgacctcgtgatctgtccgcctcagcctcccaaagtgctgagattacaggcgtgagccactgcacctggccaatcccttgccttttagtatctagtgttactgatgaaaagtctgatttttgttattttataagtgatctgtttctttgctcttgggaatatttttacagtcttctctttatctttcatgtttagaaatctcaaaagacttaatgggatttcattttattcgtgtgtagggcatttctttttggcccttttagtttgaacacttatatctcccttaagctctgggaagttttcttatatttctttgataattttcttgtctcttttgtctctctttctttggaatactttattagatgttggttgttctgagttgttcactcgtaatttttatattttttcttgactttctgttctttctgagattgcctagatattaattttaaaacttgaaaaaaaattttttttccttcctccgcccttaaaacttttgaaaaaaatttaacaatcaagtttttaatttttaggagctttgtcttattaatttaaaaaatccttttcttttatggatgtactgtctttgaatctctttaaggaatgctaattgtgatatttggaatataatcttttatgactggaattgtctttatttattttgggcttagtttttcagttcgcattgctcttcctttattttgctgcaggcttttttcacaacctggttattttggattttccatatgtttaataaagtaggttagagtagctggtgtttatgtctgctttagtttagaatgaggagactagaactggtttggaagcaagttgaaaactggcctttattacctaggaggccaccaaagtactgtaacaaggagggctttactttatggtacaactctgtggcacaaacatacaaatgtagtgttgttctgattctcctagattggtttgttcagtgttttttgtaaggagccttattttgcctagtggtcaatgccttgcacattatgcaagatcttgaattccaaactgattgaattctgtgagtaatagggagctattgtagattcttttttaaaagttatttttcaattgtgatacaatatacacaatatgccttcttaaccattttaagtgtacacttcagtggtattaagtacatttacattattgtgcaaacatcatctcgagaactctttttcatcttacaaaacaaactctgcccagtaaatgataacttcacagactgggggcggtggcttatgcctgtaatcccagcattttgggaggccgaggtgggaggattgcttgaaccaacgagttcaagaccagcctaggcaacatagtgagtccctgtctctacaaaagatacaaaaattagccgggtatggtggcctgtgcctgtagtcccagctactcaggaggctgaggcaggaggattgattgagtccaagaggtagaggctgcaatgggtgtgattgcactagtgcactccagcctgggtgagagaatgagaccctgtctcaaaagaaaaaaacaattataatgtcccattcttccctcccccctcaacccttggcaactagcattctttcagtctctgaattaaactgtaggtacctcatacaagtagagtcgtagactgcatttaaaaaaaatttcacaacatgaaatttattatcttaatcatttttaagtatacagttcactagtgttgggtgtatttcatattgttgtaaaatacatctccagaactttttcatctagcaaatctgaaatattgtactaattgaacaacaatccccctccccctaccaccatccctgataaccatcattctgatttctgtctctatgaatttgattactctaggtaactcatataagtggaatcatacaatatttgtctttttgtgactgacatttcatttagcttaatgtcctcaagattcatccgtgttatagcatatgatttccttcttgttcaaggctcactaatattccattgtatgtatataccacattttgtttatatattcatcagatcacagacacttgggttgctttcatgtttggctttgtgaataatgctgctatgaacatgggcatacgtatatctctttgagactctgctttcatttttttgggggtgtatactcaaaagtggaattgctggataaaatagcaattctatttttaatattttgaggacctgccatattgttttccacagcagttgtactttttctaatttttattttttattttgagacagggtcttgctctgacgctcagggtgaagtgtagtggcatgatcatagctcactgcagccttgaactcctgggccctagtggtcctcccgcctccgagtagctaggactatagacatgcaccaccatacctggctgtttaaaaacaattttttttttttttgttgagatggggtcttgctgtgttgctcaggctgacctcaaactcttggcttcaagagatcctcctgcctcagcctactaaagtgctgagattacaggagtgagccaccatgcccaaccacgagtttgcgttcctgccaacagtacaggaaagttccagtttgtctatatcttcatcaatgcttattttctgtttgttttttaataggagctatcctaagtggatgtgaggtgtgtagattttttttttttaatcagagttgggttttagcccagctaacctgctagccctttgagaaatgtatttgcatgagggagtaaagcataaggccagctaggaggtaattgcattgacttagatttgtggtaatgaggaattggtttgattgtggtgggacaatgtgattttgagaggtgacagaaaaatggaaataatttattcaaatttaagaaactgagagaaatgacatgaaaatgacttttacatttgaatttgattgtaatagaaatgtggaagtaaagggaaggagagaaagaataacttactgttcttcagcgttttgggtgatgggaatattgttgtggaaataaatgcctgtaagggcagcttgaaatatgggagcatatgacagcaagaaaacaggtctggaaacttgtttttgtgagagtcagcgggatgagagaggtcatagtatttctctttgaaacatttgttttctttagaaaaaataatctgatgaatttttccttctcaattttttacagctcttgcaagcttaggatatgaaaagagctgtgtgttgttcaattgtgcagccttagctagccaaattgcagcagaacagaacctggataatgatgaaggattgaaaatcgctgctaaacattaccaggtatgctgaaaagtagttactacaataatggtcaacactaaattggattaagtggaaaataatttgcatttaggtttatagatacttcttacgcaacagatgttttctaaaacgaatgcacttttaaaatgaatttattcttactgttaaagcccttagataaactgtctatagaccaggtctgttattcctcattgttttataccgagcacctagcacagtgcctggcacataatagaggctcaataattgttggttgaagaaattatgaaatgtctgagatttcatctcaggcatttagggtaaatccattttaaataaattacctaattaaaaaaaatttgtacattattttcatatgttttcttagagtgagacacacttgaaatttcactgttgttacaaaaataaagacaagaaattggcaagaaaataaaattttaactttgagacttgtggagaggtcatatttaaatatggtcagacacataatgttcataagttgcctaatctgttttacgtactgatcatttactaatatggcatgttattttgtggcagtttattttattttatttatttatttattttgagacggagtcttgttctgttgcccaggctggagtgcagtggcacaatctcggctcactgcaagctccgcctcctgggttcacgccattctcctgtctcagcctcctgaatagctaggactataggcatccgccacctcgcctggctaattttttttgtatttttagtagagatggggtttcactgtgttagccaggatggtcttgatctcctgacatcatgatccacccacctcggcctcccaaagtgctgggattacagatgtgagccaccatgcccggccagcagttgtttattatttattcagcttttttttgttttggttaaaagaacagtaaatgattactgttaaataatatatatataatcatgttgtcattttatattactttctaatttacaaagtgttttcatgtacattatttgactctcagataaaccttgtgatgtatgtcatataatgtcattccgattttacatacgaggaggctaaaggtccgaagtcttaataaagcagtctatttgggtttcaatagttctgattccaaatttcatgtaattccaaatgtccttccactgtttcactcccaaacctcccatgaaatttgcttgtctcagaggtagtctgctttttcccgttgtttatgtttagggaagaggtgagtgatgctgttctgagaaagtaaaaggaaaatataccgtaagcaaacaacacgctccaaattgtggcttgccttacagttttgaatgggcatagatgacaaacataatgcatacgctatttctttttgaggctatacatggcaaatattttaaaatgtgaaaacgagctgggcgtggtggctcacgcctgtaatcccagcactgtgggaggctgtggtgtgcggatcacgaggtcaggagttccagaccagcctggccaacatggtgaaaccctgtctgtactaaaaatagaaaaattagctgggtgtgatggtgggcgcctgtagtctgagctactcgggaggctgaggcaggagaatctcttgaaccgaggaggcggaggttgcagagagctgaggttgtgccattgcactctagtctgggcgacaagagcaagactctgtctcaaaataaataaaataaaatacagtagtgaaaacgaagtaaaattttatttagcttttggttaactgtaactcagttagttagtatatgagattttagaaaggtcattctgaattatgaaagaaacattccattctgtgagggttcacagcagggcacctggtatcatggaaagataactggtggtattagacctaggtccttgtctaggctgcttgccacccagaagctttgtgccgttgggcaagttctttaacctctctagtacctccagttccttatctgtaaatgagagactcagacactttgctgttgtagactttgattcactagtttactgaacaagttcagttgttcattcctagcagatactctagtgttataatacttactgactgcagaaacatgctgttcattttaatacatttgactttgagttttctctgtgttgtctatttatctaactcatgacacctttttttttttttcttttttgagatggagtctcgctctgttgcccaggcaggagtacaatggcgtgatcttggctcactgcaacctccgcctcctgggttcaagtgattctcctgcctcagcctcccgagcagctgggattacaagtgtgtgccatcatgcccagctaatttttgtatttttagtagagacggggtttcatcatgttggccaggctggtcttgaactcctgacctcaggtaatctgcccacctcagcctcccaaagtgccgggattaacaggcgtgagccaccgcacccggccaactcatgacaccttttaatcccagactgatttatttctttttcttagtataatttgtttcatgaaagcaaagttattttagtattaacaaaatataattgagatgaaaaatctgatggggaacatttcactagtgagctctgaaggccagacagaaatcactggcaatgggtagtaatgctgttcctcagaggactaggtgtatgtactacctggggtgtcccctaactacggcatgtttaattatttgaaagatgaatttgtttgggaccaaagcaagagcattgcagtactaaaaatattttaatgtttatccccgcctctattctcatgttaattttgaggaagtatatctaaaaatagtttaatcagattgttccattagtttactttgtttttccttgtaatttacttttaatctttgttaaatctcttgttacgctatagagttttagaaagataaccttattgtctgtaggtcagatgttttagattggttttgcataatataaaaatttaaatatattaactgttcactgagttaacatttgaaatgacttttatatgtaacagtaggaaattaagtcttgctgagttcctataaagaaattctttttcccccctttagtttgctagtggtgcctttttacatattaaagagacggttttatctgccttaagtcgagagccgaccgtggacatatctccagatactgttgggaccctcagtcttattatgctggcacaggctcaagaagtattttttttaaaagccacaagaggtaactccaatttatctttttgttgcatgtgaaaaaaagtgataaggcttttaaattaagaaagtgattagaatataatatgttcaatgtcgagctgtccttcttgaacttgatacatgaattatggaaaattttcagctatccttttctgaatttgtggcacaaatttacatttaagaatgtaggctgtgtttgaagtcatgaaatagatctttagtaattgtctttaaacactccattctggaatagtatttatgtatgtttttaacatgtcagacatttattcgcaaatatttattggatacttactctgtgccagtcactgttctagtttctagataaacggagttagaaaacaacttaggttttggcgacgggagagatgataagcaagaattaagtagacaggataatttcataaataattgctataagatttcagaaataattgctataaaaaataagagaattatatgatagtggctggtggtatggttatgggatagggatataggggaagctgggctaattttagattcattagtcaagaaggctttctttcaggaggtcctctttaaagtagacctaaatgacaagaaggagtcatccaggcacagtccctagccctgggaatgagggaataagaataattcttataaggcatataagttagcatgagagattgaaaatgggctgaatatgtaatatgggctgaaactgaaaataagagataagtcatcatgtggaagaaataggaattggaatacttttttcttttaaaataacagcttatattgagatagaatttatatacactcaagttcaccctttctaagtatacaacataagatttttagtatattcatagagttttgattaccactatcttattttagaacattaccatcatcccagaaagaagccatgtacccattagcagtcactcctcactcccctttcccccactgctggcaaccactaatctattttgtctgttctaaattttgtgcagaaaatgtgatttcatcaagaaagatgttttcagatgcgtgtacaaacttgtgacctcagtgtttatactgagacatgtcagattagctcatatttattttaattataatggtcatattgtattccagataaaatgaaagatgccatcatagctaaattggctaatcaggctgcagattattttggtgatgctttcaaacagtgtcaatacaaagatactctccccaaggtcagttattgtttttataaacacttgcttactttgcatgtgaaatatttagacttttttgtgtataagaagcaagttgaaacttataaagaaatttgaagttttaatagagttatctgaagtatatagtagaaatagtttttttttttttttaatttaagatgcatgaacaattcttttatgtttaggggatgcctttgtctttaccttttactaaacttgtttttccaagctagaactctttctggaaaatgttgaccatctgttttcaatacttttatcaaatcaaggcattgtgtagttctgaatcattggtgatttggtacaagcatgtatacttgagcatgttgatgattcacacttttaattattgtcctgttttcttaaagatgagccttaaagcgcaaaaacagacataaagaaaaaaggaaaagaaaacttaacaaattcatctgatactttgattagaattcagttttgccaacagggataaaaaattgggctgctaatggacagctaaggaaagcaaccatcttaaaccacatatcacaggaagtataatgttttaatgtaaacctttctgaagtgacaattgtaaagactattcagtgatgatcatttgttaatgacaaagcaaatcactagtaaatttggaatgattaataaagaaaacttaaagattgagtgaaatatatgtttcaactacttccttcagaaatgttcaaggaattagtttcatcatatggtatctgttacatgattttttttggtaggggaatttattgatttgtaagtcatattcaggaatctttgtacattaaaaaattgcagacaacttgggggtgaagtaaaaatgcacataagtgcattaacagtacttattactcagaaaatgatcaataaggaattaatgtgacgattcctggggatttaagatacaccaagagcctagtagaaatttgcccaggattcttgggtattaacagccttcctcttaaaaagagacttgggatctcctctcatgtttttttcatctgaaagacctcatgttcagctgcacagtgttccgttacatcctgttgggccattagttcagtcctgtcatggagagaagaaagtcacctacaaagacttggaagctacctctgcagcattcctggtattccttgaaaatctcctgtttcagaaccaagttgctccagccttaccttgagaactggcatgagtgtagtttgaaatttagatgtcttttattttttcctttttactaataaagctcataaggtattttcatattctagttataaaactgaaaagtctgcaagtagtgatccaggaaggtaggaaattattccctgggagacaggaaagcacacaaggtagtaattcagtttttgattctcttacattttttgtttagatagtgattgtctagcctaattccttggatttttttaatatcatatacttcctaaaagcagtgaggttacaggttagattttgacgttttggaagagccaccactagtataattgctttcctgctttatgtctttggatcttttgaaattaattttgactggaattattttcaaaacaaataggcaaaataacactttatcattatcattggtcatatacttagtgcatttgtctatgatatgtttttgagtatatgacactgaaatattagtgtatctatgatactaaatcatttttatatggctaaaatcatcttcagtaagaactctcttaggatatgaatttaagtgaaaatttactgtcttttttttaaaacatgatgaaacagtaatctatagagcaatttcattagtatatgtgagtaatgatggtttagttaactctacaggctgggtaagggctcataagaaagcttctaaagctctgtgctttgtgttcctctgtgaatgtccattctacttctctttctaataatgcatgcttttctttttgtaaacaaaatgttgacttcatggatcaattaaagagaattgtaaaaacctaaattggcttcagttaacagttaaaaaaaaccccttcaattggaagaaaaaaaatttaattcatagatttcaatccacacaaaatcatgtcgtcttctctgtttacacctaatgactaaccttaatctctaaaccattaatggggtgattctaatttctgtcttcttttcctttttcttcctgcatcccatgttgtctgtggtggtttgtgtggttggactctcccctggtcagtatttttatttccaggaggtgttccctgtcttggctgcaaagcactgtatcatgcaggccaatgctgagtaccatcagtctatcctggcaaaacagcagaagaaatttggagaagaaattgcaaggttacaggtgagtctcttggtaataaatatttaagtaactaacttggatctctcttttttttcctagtgagatttccaagtttgcccataaaaacctttcccgttcatcacccctatcagcagggacaagtgattgtttttatctttagactttactgcatgtttttttgaggtctcatattttatctaaaaaatagatgcaaaatttgcattcaattctcttttttatccatgtttattttaatgtaaaaataattctaaattaattgccatctccagattgtttttgtctttagactttactgcatggttttttgaggtctcatattttatctgaaaaattcatgcagaatttgcattcagttctcttttttggtcatgtttattttagtgtaaaaataattctaaattaattgccatgctccaggagtatgtgtagtgtttaacttgtggcctggtctttgtctaaactggggcatatacttccacaacttgaggacgacagtggagagatgtgtgtgcatatatatatatatacacacatatatctcttgtgaacagcagagtaccttctatgcagttgtgttcatactgttggcattggggttgtcagaaacttgctgtgacattatggcacctgaggcaacttgccagcaggagcaagagctgtttgtatgagttgtttgtgttttgagtattggtagacagaggatagaaagatgacttatggcatttgagttagggaagtttaaatatgtactgatttttagaagatactatggatgtcttggttcattttgtgctgttatagcagaataccacagactgggtaattgataaagaacagaaatttgtcacaattctgaaggctgagaagtcgaatatcaaggtgctggcatctggtgagggcctttgtgttgtgttacctgtggtgaaaggtagaaaggcaagagagtgctagtgagtgagagagagcaagagggagccaaactgctcaatgaagcccctctcttggtaactaaccctctcccatgataatgacattaatctattcatgagggcagagccctcttgacctaatcacctcttattatgcccccacgtcccaacactttgggattgggaacacatgaactttgggggacacattcagaccataacaatggaaatgttgtttaggaggttcagattaattaattagccttttcatgggaaaggatctcacagtgaccaaatcagagaaagtctttttaaaaaagtcagacccagatgtgtctggggcttcactttgattacagtaacttagatttatatataaaaatgattctgaacaaggaatttgtgggaaggattctttttttaaggctagcatatttaaattgtaagtttagtttctttattttctggtttctgggactattagatttaagtaagcccatatttagtctctataaatcagtcagagaaagaactccttttgaaatttaatctcatttttaagtacccctgaaaaaggaaactatttcagattcacacaatgggagggaggtaaatacttttcctcagttatagacacatagattttgcagctttagttttacagctttagttataggttaaagttaagacagaagttgggtgtgatggcacctgcctgtagtccagctacttgggaggttgaggtgggaggatcgtttgaagctagtagtttgaggccagcctggacaatatagtgacaccccttctcaaaaaaaagttaacacagaacacactcactgatccatatttcagaggacagttattctttccggtaggcatgaaatattttttaattgatttgcactcccaagaagacaaacagaacagacaagaagttgaccaataaaccatattcgctgtagtttctcacttagtagagaataataccccatgattctgacggagatcttaggaggtcacactattaaaccaactttctagttatggctactagcaaagagaaataacttattggtcctgtgcaaaccagaaatgaaaataaaatcacaatcaggaaaatcaaaacaatagataaaatggcagcaaaggtaaaataactgcttggaatcaatcacttctggggccaagaaaaattgtacctgagcttaatacagctcatgagttgcacttcttgaacagtgcagtttatgtggccccagaagatggatcttcttggtcatcttggtggatcttcaaagatgatgaaatacagttttcaaaaagatacagaaacacacacacacacacacacagatataaaaacatgactcacatagaatgactacatgtcaaagatttatttgactcattaatgagggacctagcaagattgtaaatctgattttgtgcaagtattgttttcttagttatggtactaggttgtaggtattaaggagattgtcattatagaatacttgctgatgtgtttagggatgagggcttataacatctaacttcagtttcatgtagttctgcaataaaagaaaaaatagtacttaattatgtgtttgtatgggaaaggaatagataaagcaaatgtggcaaaatggtaattgttgaacctagctaattattttgtgggcttgaaatttttcaaaattgggaaaataggtatatataaggttatatagttcaattcctgttcctctttttccctctatcctgttccctccatccattattcctactgccccatagttaatttccattaatttcttgttttttttctttctttgaaatagaagcaaatatatacatagacagcacacacacacacacacattgcacattctcacttgtcattcttactgaagtggtagtatgctattaatatatacagtgttgtgtaccttcttttctcatataacaatgtatcctgaagatctcttcatcttaattcagcaacagggagaccatccttagagctgcattgtacttcactgtgtaagccacagtttattgctgtctcctgttgctggatacttgaatgtttccaagatttcactgttataaacaatgctacagtaaaaaatcacgtacacaagttatcttgtacttcagcaggtgtcttagcttaggctgccataagaacaccataaactgggtggtttaaacaacagaaatttattttctgatagttctggagcctggaaatccaaggtcagggtgccagtatggtcatattctggtgagatttacagatggccttctctctgtgtcctcatatggtgaacagcaggaggaagccctctggtgtctcttcttgtacgggaactaatcccctatgaggccccaccttcatgacctcatctaaaccccattattttccaaaggtcccatgttcaaataccatcacattaggagttagggattcaaaatacgaaatttggggagcacagtcccgtacatagcagcaggtatatcttaaataaattaatagaaatgggattgccaatagcaaaatataaatatgtctgtaatttgttacatatttggattgttgatccacttggaatttatcctgatgtgtggtgctagatatggatccagtttttaaagtcttcttccaaatggctagcccattgtccccaaaccatttattttataatagccttgtttacctcactgatctgacattctgactttatcacacattagattcacggtatatattgggatctatttctgcttttattgtttcattgacttgtttatctgttcatactccagttccatatcattttagttatttatacttgagactgttttaatgtctgataggtattatctctcattttttgaatttttctgcctgtccttgcttgtttcctaaattttgtcattttctgggttttcctgactattcttgcatgtgtttcttcatatgaattttcttttgtttaactatgatggaaaacatatataaaagtgtagttgtgtaactatgatggtcaaacatatataaaagtatgaatcattgaacttctgttacccaacttaagtgattatcagtatttcgctattttgtgttttagttatttctcctttcctcatttttttggagtattttacaactatctcacgtatcatttcattcttaagttttttagcctgtgtctctaagagataaagatttaaaaaaattaaaaaacaaaaatttaaaaaattaagaaattttgctagatgggtcattatcccaatctagcaaaattaatattaatattaattagtagttaatagtcataatccagtattatccacatctagtttagttttccctgatttttttctcaggggtcttggtttgttcaaatcaggatccacacaaagtcctcactttgcatttgattgatatgccctctaaatctttaatttgtaacagcctcctccttcccaacttctgtgttgttttcttcactttttcttgttctgtatgttttttactatgatttctgtgatgtctgttttcccttttgctccttgtataaatgtctcagtcttgctttcttaaataaatttgtatttttctttacttttgtgagttctgtcacttcctgtttcatattcttttgctatttggctatcactcactctggtttgggccatccagtcctctgttcttttggtactgtcattgtgttcttaagtgttttagtttagtttagtttttagcatgctgttttcatctgctttgcggcaatatttctttggtgagctttcattatctactggaaagatatactgcttgttttcagttttttccttatggtttttttgtattgagagatgagttgacttttcagttacttaggtttgaatgagattgattttgctgggggttcctgtgcagggaaatgggcaggggttagctttacaagcatcattgtgttaagggctccctcctaaggtccacttctctggctcttaaagcctaccctggattaggaagaatcccactacctctgtacctgtgcttccctgaattcctcacagcctttgcatttcaagttgatgcatctacttttagggtttatattttgctggcattttctgagtgcttatgccctttcttctccctccctacttttctgttctctctttctgctccccctagcaaccctgtctttttagttaatctgtctacttctttttctcaccagctctcttgggatgaggcccctcagcatcacatttttttctgtggtcccctggtggcatgataggggccagttggctttgcctttaccgtcacctggcaaggttttctcatcctgttttgttgttttcagatttgcttaaagtaattttaacttagggtggcacccttagcacttccctttcttccccctctgtgtatagcgtacctacggttctggtactagtgtttgctatttgggggagggttcaaccacatttacaaatcaaatttgatttacaaatttaaaaagtgatttaaatttgtgcaatttcccgtttcctagtttacactgaagggtagcttttgttttgttttggttatctttctctaagcatgataccagctttggaggttaagatttttatcatgttaaggaactataatttctattttacgaagattttaaaaaatcaagaatattgaattttatcaaatactttttcaacatctatggagaaatttgattttttaacttattattttggagaattatataagtagattttctagtattaaaccatttttgtattcttgttattttggtgttttagacttgccttatctcttcatctggtcattttatagatgtagatgctttctatatgcctgagaatataatgtgttctctatttgtggagtctagtgttctctatgtctggtaaaccaaactcgttaattgtgttgctcaaatcttctataatcttacacttttttttaatctggtccagccattgctgagacagatatgttaaaatcttccactttgattatgggtaaatgtgtcaatttctcattataattgtttatatagatactattacatgcaaaatataagaaattttacatctttctggcaaattggcaaatattaaaagattatgtattatatttatccctaataatgctttttattttatatggtgtcactatatctaataccacctaaatttgtatgcggcttatgttcatttttttataaggccaaacttaaaaaaaaattcttattgatgttgacatgttgttcacttcctgtgttgttggataatttttttcagatccaccctttcactgagagttaggccgtttgaggttcctgccttcatgtgaaggagtgaaagaggtgcatctcaattctctgtgttgtgtggtttccagacccttgtttcagttctccatgagggcctttaataagttttaattgctaattctttggatgtagaaataacccaacagccagacagggcacagtggcgcaagcctgtaatcccagcactttgggaagctgagttgggcagatcacttaagatcaggagttggagactggcctggccaatatgatgaaacccgatgtctaccaaaacatacaaaaattagcttggtgtgggggtgcacgcttgtaattccagcttcttggaaggctgaagtgggagaattgcttgaacctgggaggtggaggtcacagtgagccgagatcgcgccactgtgctccagcctgggcgtcacagagtgagactctgtctaaaaaaaaagaaggaaaaaaagaaagaacccaacagccagctttcttcaatgtcagtttatactgatgggctcatggatttcttttattatcttgataatctgcctgtgtgtttatagagatagctgttatgtattatccttcagttttcgggtattttgtgatcggagaatttccaggtaaccctgtcagccacattgctggaaatgcaagtcttcagattaaagattttttttttgaaaccaatgcttaaatacttggtggggaaagagaaataaaatcacctccctcttttttttttttgttgttgacgtttttctttttagcatgcagcagaactgattaaaacagtggcatctcgctatgatgaatatgttaatgtgaaggatttttctgacaaaatcaatcgtgcccttgctgcagcaaagaaggataatgacttcatttatcatgatcgagttccagaccttaaagatctagatcctattggcaaagccacacttgtgaaatctaccccggtcaatgtacccatcagtcagaaatttactggtatgtcagttattcagacacactttaatctcatttttctctagtttactctgtttttcctagctaaaaatcacataattgctgttgtatgctttgaatataatttgtattcatgttgtttaaaatgaatatgagaataaatattgtgccagtgcaatgttaagatggaaagtaaacaataataaagcatatgtaaagtatacaatagttagaagacttgaaactgtgtgtttgattaagactgtagcacttgtcattttgttaacttttgttatttaagatgctgccattaaaaataaacaaatatggctggatgtggtggctcacacctgtaatcctagcactttgggaggctgagatgggtagattgcttgagctcaggagttagagaccagcctgagcaactggcaaaaccctgtctctaccaaaaaaaaaaaaaaaaattaactgggcatggtggtgcatgcctgtggctttagctactctggaggctgaggtgggaggctcgcttgagcccaggaggtggaggttgcagtgagctgagaccgtgccaccatactccagcctgggtgacagagagagatcttttctcaaaaataaataaataaataaataaaataaatataaaaataaaccacaaaaatatatatttttttcttttcttttttttttgagacggagtatcgctcttgttgcccaggctggagtgcaatggtgctgtctccctcactgcaacctctgcctcctgggttcaagtgattctcctgcctcagcctcccaagtagctgggactacaggcgcctgccacctcgcccagctagttttgtatttttagtagagacggggtttctccgtgttggtcaggctggcctggaactcccgacttcaggtgatccacctgcctcagcctcccaaagtgcttggattacaggcatgagccaccgtgcccggcctatttctttaaacatgtaaacttctggagtggtatttgtatgagataaatacatgttattatattgtagatgtatacaacagatggtagcctctagctgagattccaaggagaatattctgttactgggaaagggtgattatatgtttatttagcaaacacaaagtgtttaccatgtgccaggcactctttaagcactttacaaatattagctcatttgttttcagaagtgccctgagatgggtactgttattatccctatttgatgaggatactgatgcacagagtggttaagtaatttcctcaaggtcacatagctaggaagtgttggagccagaaatggaatcctgctgccgtgacccactcagtcaattttttttttttttttgagaccgagtcttgctctgttgcccaggctgtggtgcagtggtgcaatctcggctcactgcaacctccgcctcctgggttcagacgattctcctgcctcagcctccccagtagctgggactacaggctcctaccattacactggctaatttttgtatttttagtagagatggggttttgccaagttggccagactggtcttgaactcctgacctcaggtgagccacctgcctcggcctcccaaagtgctgggattacaggccttagccactgctcccggcccctcattcagtttaatcaacagatgaacagtgtcactgaagatccctcaaactcagtgatgaacacatctgaaaaagaaagaaaattaagttcaaagaagaaacttttcattgttgccgttgtccatgaatgtagtgatctaaaaattctctttatcattgtgctttaaatagtgatttagttttgatctttaaatgtcaatagacaataaatatttatagactatgtgaatattggaaagaaaatataaacagtcacttttacagttcgggtttttgtctaaaaattttgttgtaatttctcttcctaattttagatctgtttgagaagatggttcccgtgtcagtacagcagtctttggctgcctataatcagaggaaagccgatttggttaacagatcaattgctcagatgagagaagccaccactttggcaaatgggtaggtagagcttaattttagagcctaaagttttccgtttggttgttctttagtttatgaacattttagtttctgagcttagagctaaatgtcaagagtatataaaatagaaaatgtagacacacacttacaactatttttgttggacactgtatttatgaagctctagcaaatatagttggaagaaattatagaaacaaggtgaggatatgaggactaaaaatttgtattttaagaggtatttatttggaaatgagaagtagaaatgaactcagatacatggtacatttagtgttctgaaccaatttttgtttctgatggactgaatactaagaaaataattcattggtttaaaaaatttttaggtatattttacacacacaaaatacacctattctaagtgcacagttcaattattatatgtatatgtgtgtgtgtgtgtgtatgtgtatatatatatatttatgtatatatatatattttttgttttttgggacagggtcttattgtcaccaggctggagtgcagtggtgtaaacactaaacatggctcactgcagtctcaaccttctgggctcaggtgatcctcctgcctcagcctcctgtgtagctgaggccacaggtgcaagccaccacacctggctaattttttgatatttttatagagacaagatctcactttgttgcccaggctggtcttgaactcctgggctcaagcgatcctcctgccttgacctcccaaagtgctgggattacgggcatgagccaccatgcttggtcatttagttagttttgataaatgtatgtacccatgtaaccggcactatgattaagttagagaacattactgttaccctaaaaaaattctctcatgcccctttcccagtccttcttcttttagcccctggccgctattgatctgctccctgtcttaagtttagttttactttttatacaatttaaaacacgtgtaatcattctagcatatgcatatacagtacttacagtatgtacagtatatacttagaatgtgttttgctttttttcacttagctactgtttttgagattcatctatattatgtgtatcagtttcagtcttttctatggctgagcagtattccattttatggttatagggcagtattccattttatggttatacggcagtattccattttatggttatagagcagtttgttaactctttcacctgttaatgggcatttcagtttctgtgaacattcatgtataaatcttcgtgtggacatattttagttctcttgggtaaatacttaggagacaaattgttaggttgtgtggttagcatatttaattttatacaaaattgccaggttgttttccaaagtggttgttccattttatatcctatctgcactgtttgaaaatacaattgttctgcatcctcaccaatacttggtatgtcagtctttttagttttagctactttagtgtgtgtgtagcagaatctcactgtgatttagtttgcattctcctaattgctaatgatactgagcagcttttcatgtgcttactagccattcatatattttctgtaaagtgtctattgaaatctttttctcagtttttaaaagtgagtttttcttaatagttaaagacttctttacatattttggaggcaagtcctttgtcagatacatataattgagaatataggtgaccctgaacaacatggggttatggatgctgacccccctgcacagtcaaatctgcatataacttctgagtccccaaaacttaactactaatagcctgctgttgaccagaagccttaccgataaacagtcaattaacacatactttgtatatgtattatatagtatattcttataataaataagctagagaaaaaatactattaagaaaatcataaggaagagaaaatatatttactatgattaaatggaaatggatcatcataaaggtcttcatccttgtctatttcaagtttgagtaggctgaggaagaggcggaaggagggttggtcttgctgtcttacaggtggcagaggtgaaagaggtgaaagtccacaggtacacggactcatgtagttcaaatctgtgttgttcaagggccaactgtatttctcttgtagttggcttgccttttcatgtttttagttttgattaatgcatggattttaccatcatttttctctaacaagaaaggaatgtaagtttactctagcatatgataaacaggcagtctgagattttacagagcttattttctgaggagttcattgtattacatcatttcatttgcctttttgtcgttacatagtagatagggatatgtacctcccttcgccatcatgtaactgaaataactgaggaattgttattgtgctacaaaactgagaacagatgaagattctgtaatgaatacttagatcatctattttctgttgacattttgcctagatgatgtgaaattataactattgattctgttgaaagagagcaaaaaagaaaaaaataactattttgtgtattgtttctgacttgttagagatgctgtaacaatcaaaagtataaaagactgcttttttaggatagaatttttgacttttaattacttagactgaaagaagtttgaactgtaagccgacgatacctaatatattttaatgcggtcatagtttttcttattttttgacttttttttttttttcccccgagacggagtctcactctgtcgcccaggctggaatgcagtggtgagatcttggctcactgcaaccttcgcctcccggcttcaggtgattcttgtgcctcagcctcccaagtagctgggattataggtgctcaccactacgcctgactaatttttgtacttttagtagagatggggtttcaccatgttggccaggctggtctcgaattcctgacctcaggtgatccacccgtctgggcctcccaaagtgctgggattacaggtgtgagccactgcaccagcctattttttggcttttaattctgaattgtgggcttcattttttaatgattttggtttaattttatcaatcactgattttttttgtttttctgttaatctttgctttgctttttttttttttttttttttttgagacggagtttcgctgtgttgcccaggctggagtgcggtggcgcgatctcggctcactgcaagctccgcctcccgggttcacgccattctcctgcctcagcctcctgagtagctgggactacaggcgcccgccaccacgcccggctaattttttgtatttttagtagagacggggtttcaccatgttagccaggatggtctcgatctcctgacctcgtgatcctcccgcctcggcctcccaaagtgctgggattacacgcgtgagccaccgcgcccggcctttgctttgcttttaattgatagggcttatccagtttttctgggtgctaactccattgctgttgatttggttatagaatactaaattaaataaagtaagtattgatgaggagttaaattgttttagacttcagtataacatagtatctcattttttcagggtgctagcttcccttaatcttccagcagcaattgaagatgtgtctggagacactgtacctcagtctatattgactaaatccagatctgtgattgaacagggaggcatccagactgttgatcagttgattaaagaactgcctgaattactgcaacgaaatagagaaatcctagatgaggtatgttttataagatttgcttttcaagtataaacactgtgatcccttgatgtccagcagggattgggactggagacttcctcatgctagtacagtgtagttagtattcatcactttggtgaatttactgtggcccagagccttctctttagcataagagaaattctggttgagtgagaatgggtttcattcttatcttaagggtaagtaagtacacactaatgaaactcaaatgaccactgtgtaaaactagtatactgtgagaaatcaactgtcatacaaactgttcagtctttgtaattattgatttattttatgcatagcatgtagcaagatttttctttttaatttaatttgtcttaacctggaaggttaaaccctttaatttatccctaatttcttaaaatatattaaatatatttgttttatattatttatcttataattccaatatctgtagtttttgtgggtttgagtctatgatttgtaatttttgctgattcttgcttatggtggcttgttttctcttgtgttcagtttttttgttactgttttttaaaactttaaaaaatagtttcagatttacagagtctttgcaaatttagtgtagaaagttcctgtatatttttcacctagcttccctgaaagttaaaatcttatgcggtcatggcacatttgttaaaactaggaaattgacattggtacagtattattactcagattttaccagttattccaccagtgttcctcattctgttccaagatccagtacagaatactgaattgcatttagtgttcagtgagttttgattgtgcattcatatttcctgtacttatttgtgggaattcattgagatctgggtttaaggtgaattctagaaagaatttgtgtttgcttctgccataaaaaggcattatatacctggtacctcctcaaacttaagaggttttttcctttcttttataatcttttaattatagtagtaatttatcttaagactttgtgtcacacagatagtgcggtttctagtcccaagttcaggcttttgatcaggaatctcagataatacttcttgttttttcttttttctttagagccaaggtccagacaggcatgttttcttttgtagggcagttttctgttttaaaaattcatccactgagaatcacctgtttggaagtataccagtttgagggtggagagtgcttttgatctgacctctcaccttttattgtccctacctatgtttcttgttgacttttcatgttctaaattcacaatccaagtcaatggtgaactacacagctggtgaactatggatggtgggccagtgctagcttgtggcctactttttttgtatggttcactagttaaggataatttttatcttttttagagcattgtcaaaaaagaagaattctatgtaccgtagactgtggcccacaaaacctaaaatatttactctgtggtgtttgacacaagtttgctattctttgtcctaagctatcagggattgtcatacattgttggtgctagcactgtgtctactggtagattagtatttccttgtgtttctggccccctactatcctgtcatcttatctgtgcattaaaaaggcatttaaaaatatattaaacataattttctgtttgttgtattggaatgaaagtctaaattttatattttttaatgtaattgatcagttttccccttttgtttatggcttctatttatttattttaatcttaaaactttctttaaattgatatatggatgtaaatagtctcttatttattcctccttttttttttttttactgagaaaggtgatagctaattcacccttaaatttataagactttttgttaaatgcattataacttagatgtctgcaagaaaaaagtcgatttatattctaacctagtattcccatctcaccaaattctcacttatattgtgtatgaacatttattaaatgtattaaagtttttataccagaaatgacatttcagggttctttttgcttccttttaaagtcattaaggttgttggatgaagaagaagcaaccgataatgatttaagagcaaaatttaaggaacgttggcaaaggacaccatccaatgaactgtataagcctttaagagcaggtaaaaatgtgtataaatgaccttcatttgaataaattcccaatttcgacccacgtttttgcttgattaaattaggctcagttgtaaattcatttttaccgaaactgtttttcctcagttttagtataaagattaaaaaagttcacaaaagtaatctgccaattgtcagaagtacagatttttaagaaaggtatgaagtgaaaagttaaaatgatcctccaactttcattttctgttccaaactctgtgcatattttattttatttattttttttgagacaaggtctcgctgtgtcactcaggctggagtgcagtggcaggatcacagctcgctgcagccccaacctccagggctcaggcaatccttctacctcaacctcctgagtagctgacactgtagacatgtgctaccatgcccggctgatttttgtattttttgcagagacgaggttttaccatgttgccctggcttgtcttgaactcctgggctcaagtgatccacctgcctccacttcccaaagtgatgagattacaggcttgaaccaccatgcctggcccctgtgcatattttaaaaacataaatgagagcatattacatttatggctttgtaatttttttcatttagtagtgaatcctgggtggtaaaaaaaaaaatgagctttaagttattttgaggccaaatttatgcttcttaagactttgattattaagattttgtgcttgctgagataaatgctatcttcatggtggctggagattagttttatttatctttgtaaaaagttcatatattattgagatttttctaaaaatcttttttttttttaagtcacattgctcttttgacagaggaatacttttaaaataaatggaccagtttttggagagaatgatttcttcttcattcatgagttataggaaaagattaatattaattaacttttatttggcagatagtaaccaccaaatgtattttaaggtatagctatgcttttgattttataagtgattttgtcatctttctaaaaacgagaacgcaaagactgtcaggagctgtttttattatgaagtgaattggggtctatagaaggggaggataagtaaagttggagactagaactcaacatataaccagccgataaacgttgctgttagaatcacttctgtgctctgcaaacttttattttctcccagagggaaccaacttcagaacagttttagataaagctgtgcaggcagatggacaagtgaaagaatgttaccagtctcatcgtgacaccatcgtgcttttgtgtaagccagagcctgagctgaatgctgccatcccttctgctaatccagcaaagaccatgcagggcagtgaggtaagaaggacactttgatgtaggttgtcatctgcttaagaaaaccacattcaagccattttatataatgaactgccaatttcttattgtcaactttaaaaaaatgcagaaataaattggggttgttatatttaaagtagtatatagactgtgtaatagataattatactaatattaactgtcctgtaatagtaacttccatttattgaatgcccttttttgaactaaattttagatacttcataggtcaacagtatttaatttgggttttataaaagagagaagcttggaagtatagaaatttcctgaaatgaaaggactgggtatagccagatacacaaattctttatttcttacattattctatactcctttccaccttgtttcaccggaactacctttgaaaggaagattgacaaggtgtgcatgttaataaatggatagcaccatcatggtatttctactgatgacaggaaagagaaaattgaatagtagggcatctgatttggaaagtcctaaaagaagagaaagtgcaagtataatttaatgacctatcacagggagatagggtaagttagtaggaaaagatagaggtcccaaatctctgcacaggaaaacaagcgaaagggcaagaaatactgctgaaaacttcttgaaaaaagtgaatttcctgggatagtaagttttgaaaagtttgagttttgttccttatttgtctttccatagaagcattttatatatttcatgtatttattccaagacctactggatatctgctctgtgtaaggcactatggtaggtacattggaaaattaacatacaaattacacacaggctttaccctcaatttatgatccattgtggaatattagtcatgtacaaggatgactgtaatatagggaagaagtttaaaaatgtcacagggaaagtataggaagtatgttacgaggatttagatgaagtacttaaatttcagtaattttggagtagttctcttcagaggcttcttaagagattggcacattatgagaacagagtggataggcagaaaaagtaaacgtgtaggatcggagaagggctgagtagtggctgtgtctagagagttatccgaggtacagaggatctgcaaagacagcttttactcctgatttcttgtgacagaaggtttacagacatgttgagaatggctggaatctgtttgtttatttatttattcactaagtgtttgaaggcctactattccagaacagtgctgagcaccttggtccctaacataaagagacaaaaaactgctctgggttacctttagtgtagagtaaatgcacaggtactgggcacctctcaaagggaagagaaggctacatagttgaatgtgcattgaacctggatctaacgggggaacccaatggaacaaggaatgtgagttattgttttgaggacataggggagaaaaggaggtggtcagaagattaacttgtgaagaacaacgaacctgaagaagaaactgcagacccttcgaacagcaataaattttggtaccttttttattttagaaaaagatttctggttagtactttctttgtattctttttggtgtcttgtacatgactcagaattatgtggctttcgtcctttgattcttctgctttcagtagaaaagcaaaaatggtttgtgctaagcaaaatctgcattagtatgcactgatatattgctattttattcagttatatcagttttattaatccttacttgtgttacacaggagaaaggaacttttatagtcaatacgaagtaattttatggaagctagattttcttgacggggtaaccacaaaaatttcagtactctctgtatattcgtttgtcatgtgccttaatcaaataaggcaagcatcaggtttatcaaagctatttcagactggttataatagttgatgacggattttagccagaatttttatgataaaaactcagttttttgattgctgattagagtgatgcaaatgtacatgttttattaaaaagtccaagtttgatggtagggctgttttttcttttattgtgaagaagcctactgtctggttacttattttcagtctctttggacatctggttttagacattgagatactctgacaaattttgcagactagtggtaatttgtatttaaagatttttgtattaaatacctaggatcactgcttgtgattggttgcctatgatgtactgtggcctgaagtccagtctatggttggctggccaagccttggccctaatgtatatggggctgagtctagccagaggaaggaacatgtatttttttgcacaaggttgatgttcagttatactcaaagtgttacatctgctgggagtaatggagggggtacctttaaaaaaaaaaaccctttacctccttacaggtagagcataaagagaattgtttaaaactgtgtgccctcccagaggagtgccttttttggattcacagactagtggaggatctgcaaacacagcttttactcctgatttctcatgacagaaagtttatagacatattgacaatgactggaatctgtttgtttatttatttactcaccaagtgttttttgaaggcctactattccagaactgtgctgagtaccttggtccctaacataaagagacaaaaaactcctctaggttacctttagtgtagggtaaatgtatcaagtttctgcgttcgttgctgtagacatagttgcttatttgccttttctgaaaataaaatgacaaggttataaaagtaaaatagaagattttgttgagggcatttctttctttcttttttttttttgagacggagtcttgctctgtcacccaggctggagagcagtggcgcaatcttggctcactgcaacctctgcctcctgggttcaagcaattctcctgtctcagcctcccgagtagctgggactacaggcatgtgctactgtgcccagctaatttttgtatttttagtagagacggggtttcaccatgttggcctggatggtctcgatcgcttgaccttgtgatccacccaccttggcctcccaaagtgctgggattacaggcgtgagctaccgcgcccggcccattgagggcatttcttgtctcatattgtacttggtgctgttaaatgccacagaggattttaaatctaaaactggggtcaggaagctgtggcttgtgggccaaatccagcctgcctcttctctttgtatgttctgtgagctaagaatgagttttacatttttaaaatgtaaaactctactttctacttcattttttaaatggctgaaaaaaagtcaaaagaatgttttaatatgtgggcattatataaaattgagatttcagtgttaatacatttttgttgaaacatagctgcgctcattcatttacacattgtctttcacactacaaagcagagttaaaagagttgcaacagagactgtggcctactgaggcaaaaatatttcctgtttggtcctttaccaaaaaagtttttaagttcctgatctgaaagacaaagtattgacaacctaggtgatgccattcctgccattctgtttgacctcatctcctgttctgccttttgtttactatgcttcagccagagtggcgtttttttctttcctttgatcctgccaagcttgtgcctgccacaggacttttacatttgcgtttccttctgtgcagggctttcttcccatttccgtggctgttacctctttttcattagtcttagatgtcacctcttctccatctttgtcattgtctacccacattattctatttttgtgtatttgtttaatcctcccctttgcatatttatttaatcctctctggtccccaaatgaaggaaaagactgtttttgttagtagttgtgtccatagcatctagaatggtacccaaaacaaaagtatttgtttgaatgatcatcactggcagcctaacttaataaagggatacatttaattgcagttgaaaggtagctggagttgtgtataagaaataaatatgctaggattctaattatttatatactttgataacatgttaaacctcaaatttgaatttataagaaaatttaggcagtggttttcttattatcttggtcattcatttgtggaagcagtttaattcattttctacttcatttactctgttaaaatgaggccagtgccttataatctgaaatatgttaaactagtgtactgcatatgaatttttttaaaaagatgttcataatataagggatctctatctttgtgtggtagtccacaagttcgttcataaattcgttgtttgaaatggcatttttttttccccagaaagttagaattattgcatttttgaatatcacagaatttgttaactatttgaccctctctgtatcagtctggttggataccatggaagttgtggttagcttttcttcctaatctaagtaatatgattgaatacttaccctttgttagaagttatgttgagcactttatatagattatctcagtctgcacaacagtcctgaaataggtactattatgcccattttgcagttgtgaaaattgaattttcttagtagtaacctgtccttgattgcacagtaactaagtccattatggtctctaagggagtatagtcagagttgaagtgttttttattttctatgtaattacatttttttatgtaattacgtttcactttgttagacccatttgtttccatattcaagttttgaacttaatctcgttttttgagtgtgtaaaaaatgttcatgattcaaaaggtacatacagagaagcctcattccttttccctctacttctttcctgtatacttgctgtaagtaaccatattcgttagtttctggtttgtccttactgattttctttttgcaagaacaacaacaaacaacccccaccccaaattatgcatacatatgtatacatatatacatattatgtatatgtatatttattttctgattttccttctgtcttactcaaattgcagcatactgtatatgcttttgtatcctttttttctcatttaataatatgtcctggaagtcacttggaaggaaacttttattcacatcgtctgatatcaagttctgctaggtctttaaacagactttgtcatatccacccacgtatgattctttctcctcctccttccttttagagtttctgtggtttgatgctttctagactctaggaatcatatttctttctctttccacagccttctcccctgtaccctcttctttccctccctccctttctccttcccttcccccttccttcctctcttccgcccctccctcttctgttcctttcctttccttccattttaaaattaggatgtttaggagatatggatgtaaacaaggccaaaaaggaaattcacctacatttagcagaaacctcgagtctctggtcttcacaaagggatgttactttggacattcctatcaaggagctaactaagactgtggaagaaagagtagaataggaatttttagaaacaggcagttggtaggggaatccatgggaattggaattgctgctggtagtgagaaagacaggggtggagacagggctcgtgatgtcctcttcttcctttgtctttcccccagttttctttctatgagcatcattggggcaagcagaatagagagattgggttgatgttcttggtggtcttagcaaagtatgaagagatgagtgaaaggggcagcttgaaagtgctcattagaaggcacttgaacactatgaatatgaaggggtatttatgaatcaggtgggtataggtcagagagtgtcttgactgaatacaagagataaatctctgttttgtttttgtattttgttttgagacagggtttctctctgtcacccaggctggagtgcagtggcatgatcatggctcactgcagccttgacccactgggctgaagcaattctcctgcctcagcctttggagtagctgtgactgcaggtgcacaccattgcacccaactaatttttttttttcaatgtagaaatggggtctcactttgttgcctaggctgatctcgaactcctaggcttaggtgatcctcctgaagtgctgggattgcaggcatgaacctctacatctggcctaaaactcttaatggtatgaagagaggcacaagaaccctctttccttttcctctcccagtatataaaataaatgtggtatatacacttatatctgtatctttctctatttctttctccatctaccatgcttgcttcatagctgtctctatttctgtcttcacctctgtttctctatatctctctcagtctctctaggcaaaataggatatctacttacctagcaaaatcataccttcccctgcttcacagccatgattgggagggagtagaatgtagagtggctaagagattggttttggaactagtcagacttaggtctcaaatttcacctctgccccttagtagctgtataaccatgtcacttaatttttctgagactcgttatccctatctttggaatagaggtcataaatatatataccccatggggtattgtaaggaatatatgaaattatatttctgaagtgttttagcatggtgcctaacacataagagttcagtaaattgtagatgttggctattgttattaatgctgcttttgttttaatatgagtcaactgaaggtacagtgtctatctatataaacctgacgttcaatttatatttggctctctgagaaatcatctctctctcagcccgaatgaacctttatatattatttccttctcgaaattggctttttttttttttttttttgcagttaaactaaggtgtcttttttgtttaggttgtaaatgtcttaaaatccttattgtcaaatcttgatgaagtaaagaaggaaagagagggtctggagaatgacttgaaatctgtgaattttgacatgacaagcaagtttttgacagccctggctcaagatggtgtgataaatgaagaagctctttctgttactgaactagatcgagtctatggaggtcttacaactaaagtccaagaatctctaaagaaacaggagggacttcttaaaaatattcaggtgaaatttatatatttaataagatctgtgttttaaaaattacagaaaagatatgtctggactaaacctatattcagttaggaaaatgacattggagaatatctgtagttaagagtagaacttaatacatgtatattttgtaaaattaaacttggcacatcagttttatctatgaaacaaagtcacttcttttttttttttttttgagatggagtctctctctgtcgcccaggctggagtgcagtggcgcgatcttggctcactgcaagctccgcctcccgggttcacgccattctcccgcttcagcctcccgagtagctgggactataggcgcccgccaccacgcctggctaattttttgtatttttagtagagacggggtttcaccatgttagccaggatggtctcgatctcctgacctcgtgatcctcctgccttggcctcccaaagtgctgggattacagacgtgagccaccatgccctgcagaaacaaagtcatttctatggctaaaatgttgcatattacttaggagtgcttgatacttcagatatttttcatggttccaagtttttaatagctttggttttttttccatatgggaggaaaatcgaaattagttggaattactgatacctttaattgtatggctaacatacatacagacttcagtcattttttaaaaaaataatgcaaagtaaatatgttgagaagtttgaagttagttttcgtgtttacagataggtagtttggactaacaaatacttgaaagtttgcccttttaatagttaatatgcaaaattaaacatatatttctactcctaaacattgtatctatatatgatataaaataactccaaaaggtaaaataattttcatgttatattttttacaagtgttatatactaatagaaatctgtgatcattattggttgttttgactcctattggatttttgaaatttttacttaagaaagatttaaagcataatgaggcttcaaaagagtgtactaggtattctagtaattttgcatatgtatttaattacatatgattttcataattggaaaagatcaataaaaatgttatgagctatattaattttataaataaatgtaaatatgtaaatctttcttttaacaaggtctcacatcaggaattttcaaaaatgaaacaatctaataatgaagctaacttaagagaagaagttttgaagaatttagctactgcatatgacaactttgttgaacttgtagctaatttgaaggaaggcacaaaggtatgaagtacatgcaaaaggaaccatagctagcaagtacagatgtgaacgcatagtttggaagttaagtggtatttccagttgaaccaaattgctctttgcctagaattttagctttaatgccattgctgctgcgaagtttgttataggagggagaaagcttaatgaaggtggcaacatttcatgggaactttgaagaatgaattgcatatttcaactggcagaaaaggggtataaatattccaggtagcaggaattagcagagatgtcaatgacacctttttaagggataggaagttgactaatttgatgaattttgaggggcaggagtagtcaaagctgatttgtgatggaaaagcggaggggcatgacttttatgttctctgcggtggtttgctgaggacagacttgtggcctgcccaagtgtcagaaggcttactgaatatgtaagtactttcttgccttgtcctttaaaaagtttagggaattcgcttatatttctttttaccaatttgtttttgagggaacagtgatttttaagttttttcagatgcataattccttttggtacttaacttcataataatcactgaataaagttaccttgatataaatacagtaggtaaaatgtaaaaccctctgaagagagggtgaaaatactgcaaagccttccaaatagagaggatagtaaaatgccattttaatttggtttaaaatgctttgtttaaataggtaagctgagaaaaccctccagagagcctttagaaattcttttaagggtttctgaagtatgcttgcatttctgtagtgaatttgaaaacctaatccttccacttaaataggtttaatgttattaaacaattgacttttctctaggaattaggaaggttttcatgatcatgaatcttttaacttgttacattttttatgataatgttctgtaaaaatgcttttattatttttattttctttaggagtcttagatcatatttaatattaagttgttgggcctagtaaattgtataaatgtatctcatgcagatctcagttcttcggctctaactatcattgacaaattagctttagatcacattactctctggattaaaaaattgttcttgttccttacttgtatttgttctttgcttatagttttacaatgagttgactgaaatcctggtcaggttccagaacaaatgcagtgatatagtttttgcacggaagacagaaagagatgaactcttaaagtaagtctgttttgtgtaccaaattgtacttaaagaattttcttttaaaaaatcatgtagagacttttggtatgaacttggtagtatgagatagcaattttcctcttctcatggaagaaggaactagatagagtattttacaaagcaacaagtaaacagctgcataatctgggaatgaaaggatgaaaagaagcagaaactctagatgcaggaagtacagtgaggtcacagaaatgataaaaacagttcaggtggcagatctcaggaagtgccagtaaatacaagcaatttattttgaagtggcaaataggttccttacataaaactagagctatagaacatggaggagacagcatgaatagctcagagaataccagcaaaatcactttcagaaggaggctgctgagaaagcagggccagttaacatacgactcatttcctgctgagtaatcaatacagagtagcacagtgctgataaaaggtggaaaacattaacaaaatttaataaaacttcatagatgaagaacatttaccaaaataatattgtcacagaataggtgaaaattatgagcaaacatctgaccatgagctaaacaaaaacaacaacaacaacaaatgtaaggaggcaatcattctaaggccggggtccccaatcctggggccttggactggtactggttcgtggcctgttaggcactgggctgcacagtaggaggtgggtggcagacaggcgggcagctgggcgagtattactgcctgagccccacctcctgtcagatcagccacagcattagattctcataggagcgcaaactctattgtgaactgcccgtgtaagggatctaggttgtgcattccttatgagactctgactaatgcctgatgatctgaggtggaacagtttcatcctgaaatcatcttccgctcccctgtggaaaaattgtcttccatgagaccggtccctggtgccaaaaaggttggggactgctcctctaaggaacactttgagcagaaattccagaactgcaggaatatggtaagaaaacaggaagtgataagatgtgaggtgtcagaattcaggaaagaagtagaagggaagaataaaaccgtgacatgggaaagagcacaaagggcgaataaacactaaagaacacacaggaacacagagtagaaatgaggaaattaaaatgaaaccaaagtcaagaaagaattagagagaaaatgggcacagaagatctaatataggcaaaactgaatttctctcagaagaaaaaccagatagaacagttatttaacgttctgtaaacagaacacttatttaatgatactcaagaacattttcttaagtgaagattgttgaaagaggatatcatatggtaggggaaaatgacaagaactgtcagcatcaaggcatataaattattggccttaaaagataatggcagaatcctttaggcagtcaggcaaaacagtcaagccagtttataaaaaggtgaaaaaaattaggctggcagctctgtatgccagaagagagtggagtgattgctgtaatctcaaggatagtaaatatgagctaaagattttatatcatatagtaaatacatgctaaagattttatatccagactgtcttttgggtacataaaaagccatatattcattagtaataaatataaagagctgaaagagtcttataccgatgaccctttcagccaactagatctttattcatctctctgttcatattcatgaacagagaatgaacatgttcatgttcattcacctctctgctcatgttcatgagagaagttattttcttctacctctaacaaagagcaggttagttgtttttagaatatttctactaaacctataaaaagcaaataattagaatgttttaaaaatggttctaaatgtttaaaaaaaggtgatttttttttagatggagttttgctctgtcgcccaggctggagtgcagtggtgcagtcttggctcactgcaacctctgcctcccgggttcaagcagttcttctgcctcagcttcttaagtagctggcattacaggtgtgcaccaccacgcctggctaatttttgtatttttagtagagacagggtttcaccatgttggccaggctggtctcgaactcctgacctcaggtaattggaattataggggtgagccacccccccagcctaaaaaaagatgagtattctccatattagtcttaatgataaaaaaacctaacaaagattaatacaaaacagtctacagaccagtttcagttatgaatatggatgcagaagtcctaaataaagtatttgccagtaatagtcaccaggacgttaaaaaataattattgaccaaggggaggggggcatttattccagtttcagtattcagtattttcacatcaaaggaaagatcacaggtttgtcttaatagatgaggcagaagcatttgagaaaatgagtgttctgatactcagtaaaataagaatagatagaagatagatgcttccgtaacatgaaaatatatatatgtatgtgtgtgtatatatttctgcccaaaactcagtatagtgattaatggagaagcactataaacagttccctctgaagtcaagaacagacaacaaatgtcactgtcagcactatttttaaatactatactgcagtaccagccaagacaatcacatgagagagaaattaaaaaattggaaaggaagaagtaaaactagcactatttacagacattatgattgtacaactacttgaaaacccaagagaaccccaaaactctgcaaataataaaattattattactgaagttgttgatcataaaaataatttgtagaaatcagtggctttcatgtaaataaacctatagaggataagatgaagagacccacttacagtagcaacaaaaaggataaaatataaaatataagtttgtcatatatgagacctatgtgaagaaaacagtatttcaaaaagaaggcttgagcaagttaaaaaacatgttcttggacaggatgactcaacttcataaagatgtcaattctaagttaacttatgcatcaactgggcgtgatggcatgcacttctagtcccagctacttgggagattgaagtgggaggatggtttgagccctagagttctaggttgtagtgcgctatgattgtaccgtaaatagccactgtactccagtctgggcaacagtgagaccctatctctaataacaaacataaataaagaaataaacatatgcggccaggcgcggtggctcacgcctgaaatcccagcactttgggaggctgaggcgggcggatcacgaggtcaggagatcgagaccatcctggctaacacggtgaaaccccgtctctactaaaaatacaaaaaactagctgggcgtggtggcgggcgcctgtaatcccagctactcgagaggctgagacaggagaatggcgtgaacccgggaggcggagcttgcagtgagctgagattgcaccactgtactccagcctgggcaacagagtgagactctgtctcaaaaacaaaaacaaaacaaaacaaaagaaataaacatgcattcatatgcttttgatatgcaaacatgcttttgatatgcaaacatgcttttgattaaaaaaaatcagcagcttttcatttggaattagacaagttgatcctaaagttcaagtagaaaaagaaacaaggtcagccaggaaaacaataaaaagagtagtgaaggaatactagttctaccagatattaaggtatataataccatatttaattaaaacacagtggtactggtacatgattagacaaagacagaatagaaaatagaaatagattcaaatacatacgtgaatttagtgtaaaagatcttcagccaaccagaagaggtggacaactgcccagccatttagaaaataaaagttatctttataccagagtaagttctgagtggaccaaacttgaaatttgtaaatgaaatataaggtgtaaaatagaatggaggagaattccgtaataaagctgggatgagcaggatctaataactcctacttaaaatccagaagccattaaaaaaaaagaaaagaataagtttctcatagaaatatgataaacagagtcaggatatgacaaattgggaatccaatatttgaaacttattcacaggcaaaaggctaatttactttatttagaaaagaactcctagaagtgaacgagaagaaaacccaatagaaaactgaggagaagacgcaaacagaattttgcagacaaggaaatacaaatggctcttaaataaatgaaaaaaaatgaataccctcattcattataaaatacaaattaaaattagtctgaagtaatatttttcagattggcaagaatctgaaagtttgataatatgctttgttgtcacatgttggagaaatagatttcatacattgccgtgagaatacccaatggtgcaatccttgtgttgggcattttagctgtaaagaataataagactgcaaattcaaacatcctttaatccagccattctgtttttgggagtctattctgaggatatattagaatatgctagaaatgacatatttatgagcttattcatttctacattgcaaatagcagtaaaaaagtagaaacaaagtgaccagggctggtgaaataaagctatacttgtatagtgaaatgctgtgcagctattttaaaaatcagggtgttttcaatttactgatatggaaagatctccaagatagttatggtaaaaagacacagaacagtgtgtagagtatgttttgtgtaaaaaggaagaaaataacaaatatagaaattggcttgtttacgcacaaggaagctctggatattctaaggaagaaagattggaatatcgtcatttaaaatattttatatttcatatatctaatttaaaaatcaggtttgttgtaaacaagtatatattttatttacacttgtcaagtattttcagctcagtgattgaaaggtgaatgaaagatggaaaagtaggccatataataatattagcttttgaatatctgagagtttattttgttaaagtcgttgttaatactgaaggccaaaatcctttgaaatcttactggatataatgtataccggaaaagtatacataagtgtgtatcttgttgaatgttcacaaactgcgtacacccaggcaaccagcacttaaatcaatacacagaaaattctcagcaccctaaaagcattgttaatgcatccacccagtcagtcagtctttatctttcttttccagggcaaccgctatcctaacttgtaagaacatagattactttctcctgtttttgcattgtatataaatagaatcacatattatgtactcttccatgactggcttttattctacattatatttgtgagattcatcagtatagttgtgtgtatttgtagatcttttattctcatttctgcatatattttattatgtgaatgtacaagttatttattctactgttgaatattttgagtagttgccagttttgagcttttataaatagtgctggcatgaatgttgtaaatcactgctgtccagtattgctggtagcagtaaaaatatggaaacaagtcaaatgtctggttctggttaattaaataaaactacatctatatggtgaagtactatgcagtgacatatgcaattgaaaatgtaaaatttgtagtagccgtagttaaaaaaaaaaaaacaggtgaaattaatttcaatatttcatttaacccagtatgtccaaagtattattttaacatataatcaatgtaaaattacaaatgagagatattttactttttttcacactaagtcttagaaatctaatctgtatttttttttttttgtgagatggagtcttgctctgtcgctcaggctggagtgcagtggcacgatctcggctcactgcaacctccgcctcctgggttcaagcaattctctgcctcagcctcccgagtagctgggattacaagcgcccaccaccaagcccagctaatttttgtatttttagtagagacgggtttcaccatcttggccagactggtcttgaactcctgacctcctgatccacccgcctcggcctcccaaagtgctgggattacaggcgtgagccaccgagcccggcttaatatgtattttatacttacaacacatctcaattcagagtagccacatttcagatgtttgatagtcatgtgtggctaatggttactgtattagacagtacatgcttttggtgagcatgttatatgcagtgctgttgggtatatatcgaggtcaaaggatatgtgtgtatgctcagttgatattgtcaaatagttttccaacgtgattgtactaatttatattcctcctagcaatatatgagagtcctggttgctccacatttttgcccttagctattctgctgggtttgtagtattatctcattgtatgattttaatttttcattttcctgatgactaatatgtcctttttatatacttattagctggaggctttgctttttaatttctgttttcattgaaatctttcatcagaagtttaaagcgtttaagaagaatgaatattttactctgagctttactttcttttgactaatggtttgaatactactgtcaggttgttgggcatagtactagtggcattttattttatatctttttgctcttttacattattgattttatttaatagcattgatttatatcttttataagtggctaggaaattatcatttgctctataaatgtgttatttactgcaaccatccctagagtttatcaaaggaaaagaaaggtattgtgttaaagctttataatatacgtatatattttagatatttcaaaatctggccttttagaattttgatattgattaaaaacttatttattttataagcagttatttacttaagaagtagttttgttttttttttttgatgaatgtatactagttttctttatgtctggagtgactggggcccttcttgagagggaaggttggatgcggacagtgtggggctttgctgttaattgttaaatcagggcaaaaggtactgtctcagatgttttgggacatgtcatatttacttctttgtgtacgttaatcagtgcagtgaaaagatgattgacatcatgtattacatggagtgcattttaccttaggtattgtttagtgtgattttgggataaatttcaatttactgttagaggagacagaattttctaatatttaatactaaattgtaatagtattttcagcaatatatctttcatgagtttatcttagtgacaggtgatgtgttatcttttaatataaaatatttcaacgccacatttctttgaatatcttcaggaagtttttatctagaaatttgcataatggtttgcataaaaggttagccttttcacctgttttattttgtataaacactgatatagtgattaaaacattagctacataactatgagtcactgtagttttctgataacttttagatagatgatgttaggagttttttaaatccagggactaccttttattagagggtgggcagtcttttaggattacttgcccagtttgacacgtttcttactctagctgtaactgtgatctctgaaaatgtttactttttcccccagtcttcagaaatataaaaaagatacaacttcattttattaaacaataggaagaaagaggatttagattctagtcaagaataaaaatgtagtatattttgtttttttcagtttttgttatattgataaataattatacatattatggggtacatgtgatactttgatcatgaatacaatgtgtaataatcaaatcagggtaattaggatattcatcacatatttgtggggcacatgtgatattttgatacatgaatacaatgcataataatcaaatcaaggcaattaggatattcatctcaaacgtttatcatttctttgtgttgggaacattccaaatcttctagctattttgaaatatacaataaattatcattaactatcatcaccctatgctgctattaaacactagaacttatttattctctctgactgtatttttgtacctattatccaccctctcttcatccccaccccctactctttcttgactctagtaaccatcattctactctgtctccttgtttttagctcacacatatggaggagaacatgcaatatttgtctttctgtgcctggcttatttcacttatcatgatggcctccagttccatccatgttgctgcaaatgacagaatttcattatattttttatggctgaataatattccatggtgtatatatactacactatatccatttatctgctgatggacacttaggttgcattcatattttggctgttggaagtgctgcaataaacatgggaatacagatatctcttcagtatatggatatcctttctttaggatatatacccagcagtgggattgttggatcatattgtagatctagttttagttttttgagggacctccatactgttttccatagtcactgtactaatttgaaatgtagtatattttaaaataccatcattgtttggaatccattttctatgtttcatgtatgaagaaaagaaaagctgatattttatgtgtgttaatttttttctatcatgttaatttttaacactctgtctttgataagggacttgcaacaaagcattgccagagaacctagtgctccttcaattcctacacctgcgtatcagtcctcaccagcaggaggacatgcaccaactcctccaactccagcgccaagaaccatgccggttagtaggcaaataaatattttaaacagaggttttacattaacgatgattacttgttctaacggataaaacatgatttacataggaaggatctagtggttaccacctgcatcaggtaaccaaccttctgatattttgcaatatgtagaacacagcatcattcaagaattcttgacaaaaaaatgcttaacctgaatgtaatcaagcccttaaactttctgtttatagcaaataaaacaaatgataaaataagaagttaaattatgctattaggaaacaattggacaaatctttcacatgggacatttatatgaaataactgagttgatcatttctaaaagtgaatgtcatagattttttaaaaaagaggcatattctagatgaaaagagatgaaagtttccttataatcaaatgcagtatatgaactttatttgcttttggtttataaaaatagctatatgagcttttttgtgttaattaggggaaaattgaatttggagtggatatttgatgacattggggaatagcattagttttttaaggatgaaaatggtattgtgattatgtaggagaatatccttatgagaacttgagtgctgaagtctttagggctagtgtcatgaaatttgcaacttactttcaaatgattctgcaaatatatatggatgtagttatagataaagcagaaatgacaaatgttaatagttgttgaatttcattggtagatgtgtgattattttatatactattttttacaaattttctggtgtgtgacatttttcatgtaaagtttggggactaggaggagatgatggtagtaaacagtacctgtgctgcttccttccacctcaaatgtccaaccactggaggaagcagtaaatgattaaatatgaggcaccaggaaaagagcagtggctatggagtttccacaggttggaaaattattcaactatgatatatttctatagtaataagccggtatttaagaatgggaattaaaaatatatttggttggattctagagtttctcatatgtccttattaattttaattaatagcaatttgagagaaatatgaaacattttatagtcaatgctgactttttcttatagcctactaagccccagcccccagccaggcctccaccacctgtgcttccagcaaatcgagctccttctgctactgctccatctccagtgggggctgggactgctgcgccagctccatcacaaacgcctggctcagctcctcctccacaggcgcagggaccaccctatcccacctatccaggatatcctgggtaaggctgcaacattgtgtatcccaagttggctaatgttgtttctaggctctggctaacctgttaaaaacagggtcatcccttctccaaatggaggtgtcatgaatgaataagctacactgtcagcttatccagaaatgaaaataatgttatggtcacttacatgaataggatagctatttcctaggcttttaaaatttatgtttttatattttacatattgggtttatattaaataatcttttctgtattatagagtttagtaggtgtttccttggactttaggtgataaacaggtaccttttctgagcgtagcatagcaaaactgataaggccttgtttacgtccctatacttagaatacttggcatttaataaacagttgaatagaaatttatctaattatgggttgcactttcttaaaggttaatctctgtggtaatttcttaattttaaaaatccaaacatttgactaccttttaagatgtgctctaaattttacttagtaagtacatgttgtctgccaaatattagaactttataagttgtaaatttatgtatatcacagtgaatattgaatattgtggaagaggaatgtatttagatgactagttttgccacgttaaaatgaagggtctccattttttttctttctttaatactcgaatatttaatcttattttcttcagtatttatttttggatagtattaaacacttggtactcttttgttttaattaataacaggataggaatgcttttctctgacaagtgccttgaaacagtttttttcactccactgttctttaatagactaaaaaatagaaatgactttcatgaaaaacgtagttctagaatgattattgttttattttttagtatttgatttaccaatcaagatttttctgttttcttctatcaggtattgccaaatgcccatgcccatgggctataatccttatgcgtatggccagtataatatgccatatccaccagtgtatcaccagagtcctggacaggctccatacccgggaccccagcagccttcataccccttccctcagcccccacagcagtcttactatccacagcagtaatatgtctgctcagcagctcagctgattcagatcagagggaaagaaataccaaccctgcaataagtgtactaaactctacgctctggttaatgtaatgtactctcctggactgaatgcagtgtataatttctgtctacagctagaagctgtgccccagttccacatttgattacacatgtgagatttgctgctgttgcagtataaacactaggtataataggatttgaaattgcattacagttcataaaaattgaaaatgagaaattaaacctgcaagtgaaacatttgaaacgattatactttctacataagacatggttgggacatcagatacttacaaagatggtttaagtatggatactagagaaaattaagttttctttctctttggtttattgatttggtttaatttccattatgctattttgcataatcaaggcactgtaaatcttataattttaaaataaattacttaagaacagttgtcattgttatgttttgttattgattctcattactgtctaattttttttctggtattagtctcattttgtatgtatataagttaaacagatactgtttttaagtgcatgaatagtacaagttattatcaaggatgttttacagggaaatcaaaagaatattatcatactttatctttcgtatgctgattagtaaacgatttttgacatttattttagaaagtcctataatgtggaagaaacaaacagttgctaccaaagattcttcaaataaacatacaaataaatgtgtatatttaatgttttattgttagcttctccagaaaattgatgcaaattctggtaataattcttgcattttttccccataacctggttaaaataaatacgccattggcaatacttcataatgtaatggaattgtttggggaacacttactgtaccctctcatcctttttccaccttactgtgttaacttagtgacatttaatgcccaatatgtatgaatagatctaagccatttaattttttttccttaaagattggagtattttataattcaaggagcatacaaaacaatggttgggaacatatgccaattatggaataggctatgtatttaatattaatctctgccattaggatatctactcactgtataaacctcagtaaaaatagtgaagacatgcatcatggaatgagaaaatgagaaaggaatgagttgtctaacatcacagtgggatctgttttttgtgaggttcatttctgaacacattaggcatatgagcagatttccagtgaatctatttatgtttattttctgagtttcaacgctgaccttttcttgcattattgtttcattttaatgatagtgttacttgtcccactgttgttttcattgagtttggatttatattttaaatgttcgaatgaaagtatgattgtaaaagggagtgaattggtttaaaaatatatgtatattttaaactttgttgtgtgtaggaaacatgaaggcatgttaattcaatataaatgacctttgatttcatggaatattaaagttggtttaaagtccaatagttaaaccttagcaaaaatagctttttacttcatcagttgctaagatttaatactttggattcatcaaagtgtgacatgggcttgtttgacttctgtaagtggcatttaagttccacattcttattacttgaggtactttatactaacataagacagtgagagttagaggtattacaagttgctagtttataatgtcttactaatgcagaaacaaggaaaaaagcaaaattggcctgaatattctcttggggaaagagggcaccaaagaaaagggtaagtgcatctgagggccaaaagagatgtataagccttttagcccattccccatgctgggcctgctcacagagccacaggaagatcattcagaaactaggaaaggaggcccccacagctgatcctgccacagcacacctgactcactcggctctgttagtgtaaccttttaaatgtagcaacacaaaccctttccctcttgtcagttcactcatcctttggtttctttttaatcacctgtgtctgggcacagacaatcacaataaatgcagccctttattactgttaaggatcatactgttggtttggagttggaagggtactactctgtgattcaggtgtgttgtacccatatttataattaggctttattatcttcctaaatcaaggaaaggaaatcatccccagaccatttatgctgagctttggaatactattttaaactggattgtacttaaataatgaagctctgcatagaggaactagtcagaagtggggaaaacactgtctaatttttatcagtctggtataaagtattgatctaagagaactctccctgtgccccttggtctttattctcaattaagaaaaacagtcacatgtcacgacaaaccaatcaatctttatgagatattcctgtatccataccccagcttgtttgcaatttataaacctccccttcaaaactaaggagttgcagaaaaaaatggatttcacagagccttgtgtccctaaagttctgtcccagtcagcagtctttatagtccaaacagattataaaaaatgttttccatttgaactttacagtttgcaaaagtgcttttatacattttctaatttcagaaacaggataatttgttaagtgggtttcagtttgctaatagggattttttgtgttttgttttttaattttcagcatctcttgaagaatcttgctacagccaaatggcatctcactttttaaagacgtttgcaattattagttgattcacagtacagaacaaggtataaaggaaaaaaccctgctaggtagtgttataattgctagattaaaaatagactagaacaggttcattttaagatttacttggaagagcaaagaaggaaaaattatatttttaaagaaagagaatattcaggctttatttctggtatgaagtttatattttttaaaaaaatcctatattatcacaccagagattttagattcttttctggttagaaacattgctggtagttggattatatttttattgtattcatttatcttagggggaacattgtaaagaaacaaaaaggtccagatgaatgtatgctagaaataaaagttgaaagattcttacttctttggagtatgaattcttatttaaagtgtttattcttcagctttatagtttccattatttctttgacaaatggtgaattggaaaatgtaaaaaaaatacccactttgactaaatgcatgagactacaaaaggaagatagtgtttaaattttttttttttcacacctgcaacctgataatttagcggtcatggatgggccatgtttttcattgcttatgtgatttactctaggagtattcttttcaaataccactttttaggttaatttttggaaatgatcagcaagattactatactcatcagctgatgaggggaagggggatgggttctgctgcatcccgagtgaagatgactgagaagctgtgtgcttggcctgctttagtatttactgctatcacagggcaggattggcttaggaactccctgtgagcagaccgactacagcctgtgaaccagagggcttcatgccaccgagcctcagaccacaggctactgccagtcagtgtccctgcccaatgaccggtcttgcctttgtaagttatcaatttggggcacatccaagctgtctgccttttctcctcattggtgctgtgcaaaggatcctggcttctctcagttctgtggctcccgcgatcctttctgcttaaaagttgcgtaagttatgaacacaggtgatacaggtgaagaggttcaagtctattaccattgtttttaagtgttcctatatttttaactgttttaagctttacacactttgaagcccacatgattcgcactcatcaagtatgtctttattgtgaacatgaagtggcccttttccatcttgcagtatattctattttttgaggcgagttctcgctgttgcccaggttggagtgcggcggtgctattttggctctctgcagcctcaaactcctgggctcagtcaattcaacctcctcagcctctttagtaactgggactacaagcacctgccaccatgcccagctaattttttttttgtggagatggaggtttcaccatgttccccaggctggccttgaactcctcagctcaagcgacccacctgccgcgacctcccaaagtgttaggattactaataggcatgagccattgcacccggctactgttttatatgactactcttgttttgtttttggatgcattagcaggttttctaacctaatgtgtgcacctgctttagttttagatgtttagatttagttacttgactcaaccttttttttttttttagtaatttaaaagggaagtttaacaattttggtaaaattaaatgatctgatatttttgtctgatacaaatattttatcctttctattttctatatctgtcattgcttggattatgtgttcttttatgtttcctagttgtttgaaatattgtttattacctataatttttgaaagcattaatattctttttttccttctcagccatatgttgtttcttaaaaagtaggggatgggctgggcccggtggctcacgcctataatcccagcactttgggaggccgaggtgggaggatcacctgaggccaggagttcgagaccagcctaagccaacatggtgaaaccctgtctctactaaaaatacaaaaaatgagccaggtgtggtggtgggcgcctgtaatcccagctactcaggaggctgaggcaggagaatcgcttgaacctgggaagcggagactgcagtgagctgagatcgcaccattgcactccagcctaggcaacaagaatgaaactctgtctgaaaaaaaaaaaaaaaggagggggatggggaagggaaaacttataaacagggtttaggctcataattgctaatgcactattatttttacattgtacatctcgattataattgttaatgtttgcatttttttattactcgatttataaaatatgtaaacatggtctattataacttggttatagctggtcctcttctcttgttcccttcttgggatgcttttgaacattcaggaggtttggtcttgccctctctcttagaccagtcttactctgcctccagcctgtgggcttctctgttgccagcaggtgccagtgattctggatgaggaactccctgaggggccagtgtcttctttttccactgaaccctggaagaagaggggtgcacaagaatggccccttcagccttcatcagcctcccacaatggactgggctgcataatgtgttctttttaaaagtagtatgttttttgaataggcaatacacggtataaatttcaaaaggtagaaaatggtgtatgatagtaagtgtccttcctgcccctgtcccttgacccagttttcttccttaagacagtctccactaccagggcgcacagggttcacattgtatttagacttaacagctcccagaagcaggtgtgttgtgaccctctgtggaaggcacacaatgaattgtgatagttgcatctaaaactggagttttattctttcatagagaccaaagactgtttttagctagagaattatttctaagttcagctacgcttgacattattaagaacagtaacatgtactgaatcgctgccaatttctaatcccactatgctttcatgttctttcaaaattatccaaggtatatatcataattttttataaagatttgcattttaggctgatatttaagtagtttttcagcaagaaacttgtaacattgaatcacagagaatagctatatctagaaagggaacagagcataaccacatttaattccttttgacaacgtcaggcagaataatggcctgtctatgtccgtgtcctgttccccagcacctgtgaatacgttaggctctttggcaaaggggaattaagattgctaatcatctgatttgaaaatagggagatgattttggattatcaggctgaatccgtgtgatttccgtttcctaaaagtggaaggaggagatggaaaaaggagaaaaggacagatggcagaatgaaaatgacttgacctaatgctgctggctaagaagatggggccatgagccacagaaagtgggcagcttctagaacctgggaaagggaaggaagattcacccctagatcctacagaaggaaggcctacacaggcctgtcagcaccttgacgtcagttctgtgagactaattttggacttcagacttccagaactgtaagataaatttgtgttgttttaagccactaagtttgtggtagtttattatcgtagcaacaggaaataaattatactcagtttggtttattagcaacttctttgttctgctccctgggttataccgagtatactgcatcctctagcttctctcatcagcaggaaggtgggaatttacaacacggtggtgactccacaaaggccacgtgggcccagcgttggctgcaccattccctttaatgaaagagtatttggttcctaaaggaagattcactttcttatttcttgtttcgtattttagggtctttatgttattccctttccataacagtgtcttttatcactattggggttttcagaaaggaaatacaatgtagatggaagtgaggcgactgcacaagggaaggcacttggaaacagaccacagtgctgtggaagagatatctgttgcctttttttccttgtaagtaatgtgttacaaaacttttaaccattagagttgaaatttttctccagcaaagatctgtctttactcaaattacctggtaatgtatgaactttttttaaaaaacagatttttttaagagcagttttaggtttaaagaaaatagaggagaaagcatagagttcccttataccccgcttaccccaccccctcacagtttctcctcttgttaacatcttgtattagtgtagctcactgattacaattgatgacccagtattcacacattattattaactaaagtacataatttatgttaaggctcatcttctgtgttgtacatctgtggattttgccaaatgcataatgtcatgtattcaccatcacagtctcatatagaatagtttcactgtcctaaaaatcccttgtgctctacctactcacccttctccccaacctggacaaccactgatcgttttattgtctgtatagttttgtcttttccagaatgtcatacagttagaatcatacaatatgtagccttttcagaccgccttcttggcatgtaagtttcctttgtgcctttttgtggtttcatagctcatttctttttagtgctgagtaatattccattgtatgagaatactggatatatcagtttggttatccatctaccttttgaaagacacacttgttgcttccagtttttggcatttatgaataaacattaatgtgcaggtttgtatggacataaaatttcaacttatttgggtgagaacctagaagcacaattcatggatcataaaagactatgttttgctttgtaagaagctgccaaactgtcttctaaggttgctgtaccattttgcattcccaccagcactgaatgagagttcctgtttctccacatcctcgctagcatttggtattgtcagatttttggattttagccattctaataggtgtgtagtggtatattactatttttaatgtgcaatttcttaatgatttatgacgttgagcatcttttcacatgcttatatgccatcttgtatctttggtgagacatctgttcaggacctctatccatttttgaattggattttctcattgaattttaatgcttttttggggtatattttaatgtagttcctttatcagatgtgttttgcaaatattttcttccagtttgtagagcaaaagctttttcacagagcaaaagtttttaatttaatgaagtcaaacttaccagttctttcatggctcgtgcttgtggtgttatatcaaatctatgtcaaaccctagattacctagcttttatcctatgttatattctggaaattttgtagttttgtgttttatatttatgtctatgatcatctcctttacttttgaaggataattttgccaaatacagaattctaggttggtgattattttctttcaacaccgtaaatatttcccttctcttcttacttgcattgtttgtgaagtctaatggaattcttatccttatttttctataggtaaggcaggtttttctctgctttctttcaagattttctctgtctttggttttctgcaagtttgaatatgatttgttaaagtgtagacttttctgtatttgtcctgattcgtgttctccaagcttcctggatctgtggttttgtatctgtcattaatcctggaaaattctaatccattattacttcaaatatttattcttctcctttctttcttcagcttctggtgttctctttgtgaatatattacatgttatgttattgtcccacagttgttggctattctgttccaatttttcattcttagcatttcagtttgggaagtttctcttgacatatcttcaagctcactgaatattttctcatctgtatctagtttaccagtgagcccatcaaaggcattcttcatttatattatagggcttttgatttctagtattttctttcatttctttcttagagtttcgagctgtctgctttcattactcatctgttcttgcatgctgtccacttttacattggaacccttagcatattaagtatagttatttaaaattcccagtcaaatagtatcaaaatcttttccatatgtaagtcttgttctgttgtttgcttatcttttcagagtgtttttcttgccttttaatgtgccttgtaatttactgttgaaaggcagatttgatatattggctaaaaggacctgaggtaaacagatctttaggataagggtttatgtttatctggctaagaacttggctgtgtttatcacttaccatagctgtagatgtctgagatttcagttttcttcagtgtcctcatttttgttttccctgttgtttttggttttccctagacattctttcttaaacagagcctcaggcttgcagttgtttcagctgtaatctctgttgtcacacaggagccttattgatgtggtgttgaggtgtgagggtagaagtgttctataatcctgtgatttggtctcaatctttcaaggagcctgtggccatggcctgtgaccctcacaagtgcttcccagcttttgttttactccttaggtgagacaggaagttagttaaagggggctggagttgggtacagttgtctctgtcagtatcagtaggtgcttgattccaggacttctcacaaataccaaagtgcatggatactcaagtccttgatataaaatggcatagtatttgcatataacctatgcacatcttcccatatactttaaattatctctagattacttataataccaaatacaatgtaaatgctatgtagttgttttactatattgtttagggaataatgacaagtaaagaaagtctgtacgtgttcagtagtgatacaattaaaaaaatttttttttggtctaacgttagttgaatttagggatgcaaaacctatggacacagagtggggactgtatttcctttcccctacattgtaaccagtatagtttcccttgagggcaagtggagaacagaatgctcagatggttactttccccttctgctggaagcatcaggggatttcccccaaattttcaccacgagaccctggtagggcttttgcaggtgaaactcatgaaaacatgggggcccctctgggcctgggccccaggagtttttaacacacagtctaggccccactcagcttccagcagtttgtccattacagtttttttcctcctagatcctggctccagtggcttcggctcctgcttctgtatttgtctgtttctccagtcttggggctatttgtttgccctgtgatctcaattctctggtggattaaaaaaagaattgttgattttcagtttgttcagctcttttttgttgtgaggatgaaggggtggttgctgagctcttcacatgtcagagcagaaccccagaagtccagatgagctttggatacaaatactcaagcctttagtaagcttggaggatttttcacttctcttccatgtgctctcgactgccttctggaatctctattgttacagatactagatctctccacatgttttctatctgtgtagcacataataaatgtttagtaatgttagctactattattttttacccattattttaatcttccacctttttcttgattggagaagtttcttgaaataatctaattcacaattcctttttctgcagcacttggtctgccacacactgtcaccaatgcattttaaaaagttagtccaagcttatggggtacatgtgacattttgatacatgtatataatgcattgtgatcaagccaggatattcagggtgcccatcacccaagaacaatacatttctgttaagcataaccaccttactctgcgatcaaacactgaatttattccatcttattctacgtttgtgccctttaccccacttcccttcttcttcttgcccccactcacccttcccagtctctgttgtctagtttttcactctttacctccaagtgatcaaatgttttagttcccacatttgagtgagaacatgtggtatctgtctttctgtgcctggcttatttcacttaagataatgacctccagttccatccgtgttgctaccaatgacataattgtatttgctttttatggctgaatgacattctactgtgtatatatatactacagtttctttactttatccattcatctattgataggtgcttaggttgattccataccttagctattgtggatagtgctgcataaacctgtgggtgcaggtgcccctttggtattttgatattttttcctttgagtagatactcaatagaggaattactggatcaagtggcaattctagttttagtttaaaaaaaaaaactaaaaaccatttttttgaattaactctttaatactaaagatttttaaattgcttatagatataatttttttgcaatttactttttttcttttacattctcaacatagcaaaatactgtaagaatgattagggactgacatttttaataaaatcatcactaagttttacttctcaatatactctttttttatagagaatgttgttatatgtccaaccactgatttttggttcttgtgaagtgctttcttttgtggatagttgttcaatttggtgttcctgcagaggggatgatggctggaggcttctatttggccaccttgctccatctctcctattttaggctttttgataaatctctgtgcagttttccatagtggctgtactagtctacattcccagcaacactgtataagagttcccttttcttcggatcctcaccaacacctgttatttttgtctttttaatagtagcattctgactgggtaagatgacatctcattgtggttgtgatttgtatttctctgatgattagtgatgttgagcattccaaaacattttcaaatatggccatgatattttatgatttggtacaatctttactgatctcacattttcccctgtagatagtagctgcttgatttcactgatatcatggtagccactcttttttatataatcgttgttagttgaaaattagccccctgttcctgcaaggattccccctccccatttcctttagatgttacgtaacctgagctagaaataatgcagcgctgttagaatttagcaaaacaactctaggatgtgtgtttacgcagaatgtatgccataccagcccccacagtcaacccccataaaccaccccagcgtatgagctcagggctgcctcctctgcctgtcaaggagcagcccagcaggtcagtaaactcacttgcttgactttgggtctactggtcctttctcttggctgactttacaatagtgactcgctcaacatcaactatgtatttgcacttgctagttctaagcactggtgagtgtttgaataattcattttgtttttacttttcagagacagtctcactctgttgcccaggctggagagcagtgacatgattatagctcactacagcctcgatcttctgggctcaaaaacatcctcccacctcagcctcccaagtagctgggaatacaggtgtgtgccacttcacctggctaattttcaatttttgtttttgtagagatgggggtctaactattttgcccaggctgatcttgaactcctggcctcaagtgatcctcctgccttggcctcccaaagtgctgggattacaggtgtgaacccccaaaatatgagccaggtctgagttaatttagaaagtttattttgccaaggttgaggacatgtgcttgtgacacagctttaggaggttctgacgacacgtgcccaaagtggtcagagcacagttcggtttatacattttaaggagacatgagacatcaattaacatatataagatgaacattggtttggtctggaaagggggacaacttgaagcaaaggtaggaagactcaagccgggagggggcttccaggtcataggtagataagagacaaatggttgcgttcttctgagtttccgattagcctctccaaaggaggcaatcagatgcgcatttatctcagtgagcagaaggttgacttttaatagaatgggagacaggttggccctaagcagttcccagcttgacttttccctttagcttagtaattttggagccccaagatttccaagattttcctttcacacaggcatgagccaccatgcccagccagtagtaattcattgaagtttcatatgaaccctatgaaaatggtattttttcattcatattcattgaaaacagaggagtcagcttcattgtagagaagctgagcaacttgtccaaggccacatggctgccaagtagctgagctggggctcaggtttctttcaccctgttgcctctcatctgaactgctccaacaagtgtagcttcctcttgactgctgctcttgcctctgccgctgaaaacagctaatgtttatagagcgcttgtcatgttacaggtcctcttctaagaatttaaagtccattaacttattttagctgagcaccacttgtgaggtggccactgatttgatctctcattttacaggagaggaagaaacaaggcacaggggagcttgagtacctgggactggcctgtgatgaagctgggatctcactgcagttagatgttagttttcaaagtttctcctgtttcatggagttttgttttgtagaaagacttttgttctcattccttcattttttttttcttcccagtcattcaaaactatatgttgagagactacttactcttctaggtgctggggattaaactgtgcctgggaatttgcattccagaagagaaggatattgaactagaaggataggtttgcaagtgaatactgtattaagatgtgaatttgtgggtggcagtgctcttgtatttgtccctgttttcatctccagccaggtggctaaacccgttgcatattcctgcccctgggattgtttgttgggttggagggtgggtgggagcagaagctggggtctctggcaggagtcaaagggagtggtaacatttcagaggggatgaggttttggtttaggagatcacagcattcccagaggtatcatgcttcaaacgcagtggagcttccacatctgaagggacagcgaggccaggcagcagcccagggagtgcctggcaacccctggggtatttgtgtggggaaccagtaattactgagacggaatttctcagcaccctgaggaatgagcttctgaggcagaaacaaattcaatcaatcaatcaatcaatcaatcaatcaatcagtgaatatttcttgtgtccctggattggtgggcttcaattcacatccacccaccacatttggtccatctctggaatggcaaagaatatttacatcacacacaactgcaccccatggtctgatgatgacgcccattggagatttgctgagcagaaataaggctctcagaagccgctgttgggaaggggatgaagacgaagctgagtttgaagagcagcctgaatgctctcacccactggtcagatgtgagggtcaccagaatggagaggaggtaaatcacttattccacagtgttgagattcttccgtctttctttctttctttttttttttttttcttatttcccaggcaaaataccctatgactgagagagaagaacctgaatcctggcattcaagaatattcctacagtggcccagcctggtcatgccatgtaaggcctaggccaatgcattgccccacctgtggggaaggctgttttgtcatggtggaaatgaacccactggaaacaatgggtgttttggggagaatgaagctcccacttggccccagtagaagagcattcgagtcttgctggggcccatttctgagatgcaccagaagttaatcaactttttagtgtcagaagacgcttatttgatccctggggcccatttttgagatgcaccagatcagaggctgagaaactgcagagctcagtgacatcacaagggtgaggccctcgggccccagggctttcagagcacaggaaggttcagtgctgagtctgactactcagagctccagagtaggctttcttgatgctgcaaccatcaccagcacacagtgggctgccgaaaagtgtctgcacctacccagtgaggacagggtgcaggggctcgtcctcagtgctagacttcacaagccagggctgtgtcttcagaaccggtgtggacaaacctgagtggcatatcccattccaagctctatctgacagaccctcaccctcacacctgctcccaaccacagacgctgtaaaggctgggtactaacgggtgacggaaaccagtcaaagagaaaagctgattttggtggctcgcacccaggccttgctgttcaggccagcacatgctgacatgtcaccaaagctaattatcctgaaggaccctcccaaactcctgggaaatgggcttttgattctgggtcccaagagtgagggtctaccctctgccctttgtgggaggcgggggcctaccggtggggggcacggtgaggttagccaggcataccgtccttggggattggtcctgacaaggccactgggacatgtggggagacatgggacatttcacagggtgttcagccatcaagaaatcttgcagttgatgttaatggctgaggagtgcttgggggcaggaatccagggtgggcctaagagtagttggtagtacaccactggtgctccttcctaggggagactgctgccctctctgtgtgtgctttcatgtggagtggggaaggtggtgcttgtgccggctgggcagtggagcatttcagacaaagaggcatgtgttgaggggttcagaggtgagaaggggcagcaggcaggagacctcaattaaatgtaaaaagcctcaagaaattgtaagcacaggagagcagtggtcagatgagggttagatagctcagcagggagaaggagtacatttggacttgatgcg

SEQ ID NO: 46 - DNA, 150491 bp, Homo sapiens
cagcttatattgagatagaatttatatacactcaagttcaccctttctaagtatacaacataagatttttagtatattcatagagttttgattaccactatcttattttagaacattaccatcatcccagaaagaagccatgtacccattagcagtcactcctcactcccctttcccccactgctggcaaccactaatctattttgtctgttctaaattttgtgcagaaaatgtgatttcatcaagaaagatgttttcagatgcgtgtacaaacttgtgacctcagtgtttatactgagacatgtcagattagctcatatttattttaattataatggtcatattgtattccagataaaatgaaagatgccatcatagctaaattggctaatcaggctgcagattattttggtgatgctttcaaacagtgtcaatacaaagatactctccccaaggtcagttattgtttttataaacacttgcttactttgcatgtgaaatatttagacttttttgtgtataagaagcaagttgaaacttataaagaaatttgaagttttaatagagttatctgaagtatatagtagaaatagtttttttttttttttaatttaagatgcatgaacaattcttttatgtttaggggatgcctttgtctttaccttttactaaacttgtttttccaagctagaactctttctggaaaatgttgaccatctgttttcaatacttttatcaaatcaaggcattgtgtagttctgaatcattggtgatttggtacaagcatgtatacttgagcatgttgatgattcacacttttaattattgtcctgttttcttaaagatgagccttaaagcgcaaaaacagacataaagaaaaaaggaaaagaaaacttaacaaattcatctgatactttgattagaattcagttttgccaacagggataaaaaattgggctgctaatggacagctaaggaaagcaaccatcttaaaccacatatcacaggaagtataatgttttaatgtaaacctttctgaagtgacaattgtaaagactattcagtgatgatcatttgttaatgacaaagcaaatcactagtaaatttggaatgattaataaagaaaacttaaagattgagtgaaatatatgtttcaactacttccttcagaaatgttcaaggaattagtttcatcatatggtatctgttacatgattttttttggtaggggaatttattgatttgtaagtcatattcaggaatctttgtacattaaaaaattgcagacaacttgggggtgaagtaaaaatgcacataagtgcattaacagtacttattactcagaaaatgatcaataaggaattaatgtgacgattcctggggatttaagatacaccaagagcctagtagaaatttgcccaggattcttgggtattaacagccttcctcttaaaaagagacttgggatctcctctcatgtttttttcatctgaaagacctcatgttcagctgcacagtgttccgttacatcctgttgggccattagttcagtcctgtcatggagagaagaaagtcacctacaaagacttggaagctacctctgcagcattcctggtattccttgaaaatctcctgtttcagaaccaagttgctccagccttaccttgagaactggcatgagtgtagtttgaaatttagatgtcttttattttttcctttttactaataaagctcataaggtattttcatattctagttataaaactgaaaagtctgcaagtagtgatccaggaaggtaggaaattattccctgggagacaggaaagcacacaaggtagtaattcagtttttgattctcttacattttttgtttagatagtgattgtctagcctaattccttggatttttttaatatcatatacttcctaaaagcagtgaggttacaggttagattttgacgttttggaagagccaccactagtataattgctttcctgctttatgtctttggatcttttgaaattaattttgactggaattattttcaaaacaaataggcaaaataacactttatcattatcattggtcatatacttagtgcatttgtctatgatatgtttttgagtatatgacactgaaatattagtgtatctatgatactaaatcatttttatatggctaaaatcatcttcagtaagaactctcttaggatatgaatttaagtgaaaatttactgtcttttttttaaaacatgatgaaacagtaatctatagagcaatttcattagtatatgtgagtaatgatggtttagttaactctacaggctgggtaagggctcataagaaagcttctaaagctctgtgctttgtgttcctctgtgaatgtccattctacttctctttctaataatgcatgcttttctttttgtaaacaaaatgttgacttcatggatcaattaaagagaattgtaaaaacctaaattggcttcagttaacagttaaaaaaaaccccttcaattggaagaaaaaaaatttaattcatagatttcaatccacacaaaatcatgtcgtcttctctgtttacacctaatgactaaccttaatctctaaaccattaatggggtgattctaatttctgtcttcttttcctttttcttcctgcatcccatgttgtctgtggtggtttgtgtggttggactctcccctggtcagtatttttatttccaggaggtgttccctgtcttggctgcaaagcactgtatcatgcaggccaatgctgagtaccatcagtctatcctggcaaaacagcagaagaaatttggagaagaaattgcaaggttacaggtgagtctcttggtaataaatatttaagtaactaacttggatctctcttttttttcctagtgagatttccaagtttgcccataaaaacctttcccgttcatcacccctatcagcagggacaagtgattgtttttatctttagactttactgcatgtttttttgaggtctcatattttatctaaaaaatagatgcaaaatttgcattcaattctcttttttatccatgtttattttaatgtaaaaataattctaaattaattgccatctccagattgtttttgtctttagactttactgcatggttttttgaggtctcatattttatctgaaaaattcatgcagaatttgcattcagttctcttttttggtcatgtttattttagtgtaaaaataattctaaattaattgccatgctccaggagtatgtgtagtgtttaacttgtggcctggtctttgtctaaactggggcatatacttccacaacttgaggacgacagtggagagatgtgtgtgcatatatatatatatacacacatatatctcttgtgaacagcagagtaccttctatgcagttgtgttcatactgttggcattggggttgtcagaaacttgctgtgacattatggcacctgaggcaacttgccagcaggagcaagagctgtttgtatgagttgtttgtgttttgagtattggtagacagaggatagaaagatgacttatggcatttgagttagggaagtttaaatatgtactgatttttagaagatactatggatgtcttggttcattttgtgctgttatagcagaataccacagactgggtaattgataaagaacagaaatttgtcacaattctgaaggctgagaagtcgaatatcaaggtgctggcatctggtgagggcctttgtgttgtgttacctgtggtgaaaggtagaaaggcaagagagtgctagtgagtgagagagagcaagagggagccaaactgctcaatgaagcccctctcttggtaactaaccctctcccatgataatgacattaatctattcatgagggcagagccctcttgacctaatcacctcttattatgcccccacgtcccaacactttgggattgggaacacatgaactttgggggacacattcagaccataacaatggaaatgttgtttaggaggttcagattaattaattagccttttcatgggaaaggatctcacagtgaccaaatcagagaaagtctttttaaaaaagtcagacccagatgtgtctggggcttcactttgattacagtaacttagatttatatataaaaatgattctgaacaaggaatttgtgggaaggattctttttttaaggctagcatatttaaattgtaagtttagtttctttattttctggtttctgggactattagatttaagtaagcccatatttagtctctataaatcagtcagagaaagaactccttttgaaatttaatctcatttttaagtacccctgaaaaaggaaactatttcagattcacacaatgggagggaggtaaatacttttcctcagttatagacacatagattttgcagctttagttttacagctttagttataggttaaagttaagacagaagttgggtgtgatggcacctgcctgtagtccagctacttgggaggttgaggtgggaggatcgtttgaagctagtagtttgaggccagcctggacaatatagtgacaccccttctcaaaaaaaagttaacacagaacacactcactgatccatatttcagaggacagttattctttccggtaggcatgaaatattttttaattgatttgcactcccaagaagacaaacagaacagacaagaagttgaccaataaaccatattcgctgtagtttctcacttagtagagaataataccccatgattctgacggagatcttaggaggtcacactattaaaccaactttctagttatggctactagcaaagagaaataacttattggtcctgtgcaaaccagaaatgaaaataaaatcacaatcaggaaaatcaaaacaatagataaaatggcagcaaaggtaaaataactgcttggaatcaatcacttctggggccaagaaaaattgtacctgagcttaatacagctcatgagttgcacttcttgaacagtgcagtttatgtggccccagaagatggatcttcttggtcatcttggtggatcttcaaagatgatgaaatacagttttcaaaaagatacagaaacacacacacacacacacacagatataaaaacatgactcacatagaatgactacatgtcaaagatttatttgactcattaatgagggacctagcaagattgtaaatctgattttgtgcaagtattgttttcttagttatggtactaggttgtaggtattaaggagattgtcattatagaatacttgctgatgtgtttagggatgagggcttataacatctaacttcagtttcatgtagttctgcaataaaagaaaaaatagtacttaattatgtgtttgtatgggaaaggaatagataaagcaaatgtggcaaaatggtaattgttgaacctagctaattattttgtgggcttgaaatttttcaaaattgggaaaataggtatatataaggttatatagttcaattcctgttcctctttttccctctatcctgttccctccatccattattcctactgccccatagttaatttccattaatttcttgttttttttctttctttgaaatagaagcaaatatatacatagacagcacacacacacacacacattgcacattctcacttgtcattcttactgaagtggtagtatgctattaatatatacagtgttgtgtaccttcttttctcatataacaatgtatcctgaagatctcttcatcttaattcagcaacagggagaccatccttagagctgcattgtacttcactgtgtaagccacagtttattgctgtctcctgttgctggatacttgaatgtttccaagatttcactgttataaacaatgctacagtaaaaaatcacgtacacaagttatcttgtacttcagcaggtgtcttagcttaggctgccataagaacaccataaactgggtggtttaaacaacagaaatttattttctgatagttctggagcctggaaatccaaggtcagggtgccagtatggtcatattctggtgagatttacagatggccttctctctgtgtcctcatatggtgaacagcaggaggaagccctctggtgtctcttcttgtacgggaactaatcccctatgaggccccaccttcatgacctcatctaaaccccattattttccaaaggtcccatgttcaaataccatcacattaggagttagggattcaaaatacgaaatttggggagcacagtcccgtacatagcagcaggtatatcttaaataaattaatagaaatgggattgccaatagcaaaatataaatatgtctgtaatttgttacatatttggattgttgatccacttggaatttatcctgatgtgtggtgctagatatggatccagtttttaaagtcttcttccaaatggctagcccattgtccccaaaccatttattttataatagccttgtttacctcactgatctgacattctgactttatcacacattagattcacggtatatattgggatctatttctgcttttattgtttcattgacttgtttatctgttcatactccagttccatatcattttagttatttatacttgagactgttttaatgtctgataggtattatctctcattttttgaatttttctgcctgtccttgcttgtttcctaaattttgtcattttctgggttttcctgactattcttgcatgtgtttcttcatatgaattttcttttgtttaactatgatggaaaacatatataaaagtgtagttgtgtaactatgatggtcaaacatatataaaagtatgaatcattgaacttctgttacccaacttaagtgattatcagtatttcgctattttgtgttttagttatttctcctttcctcatttttttggagtattttacaactatctcacgtatcatttcattcttaagttttttagcctgtgtctctaagagataaagatttaaaaaaattaaaaaacaaaaatttaaaaaattaagaaattttgctagatgggtcattatcccaatctagcaaaattaatattaatattaattagtagttaatagtcataatccagtattatccacatctagtttagttttccctgatttttttctcaggggtcttggtttgttcaaatcaggatccacacaaagtcctcactttgcatttgattgatatgccctctaaatctttaatttgtaacagcctcctccttcccaacttctgtgttgttttcttcactttttcttgttctgtatgttttttactatgatttctgtgatgtctgttttcccttttgctccttgtataaatgtctcagtcttgctttcttaaataaatttgtatttttctttacttttgtgagttctgtcacttcctgtttcatattcttttgctatttggctatcactcactctggtttgggccatccagtcctctgttcttttggtactgtcattgtgttcttaagtgttttagtttagtttagtttttagcatgctgttttcatctgctttgcggcaatatttctttggtgagctttcattatctactggaaagatatactgcttgttttcagttttttccttatggtttttttgtattgagagatgagttgacttttcagttacttaggtttgaatgagattgattttgctgggggttcctgtgcagggaaatgggcaggggttagctttacaagcatcattgtgttaagggctccctcctaaggtccacttctctggctcttaaagcctaccctggattaggaagaatcccactacctctgtacctgtgcttccctgaattcctcacagcctttgcatttcaagttgatgcatctacttttagggtttatattttgctggcattttctgagtgcttatgccctttcttctccctccctacttttctgttctctctttctgctccccctagcaaccctgtctttttagttaatctgtctacttctttttctcaccagctctcttgggatgaggcccctcagcatcacatttttttctgtggtcccctggtggcatgataggggccagttggctttgcctttaccgtcacctggcaaggttttctcatcctgttttgttgttttcagatttgcttaaagtaattttaacttagggtggcacccttagcacttccctttcttccccctctgtgtatagcgtacctacggttctggtactagtgtttgctatttgggggagggttcaaccacatttacaaatcaaatttgatttacaaatttaaaaagtgatttaaatttgtgcaatttcccgtttcctagtttacactgaagggtagcttttgttttgttttggttatctttctctaagcatgataccagctttggaggttaagatttttatcatgttaaggaactataatttctattttacgaagattttaaaaaatcaagaatattgaattttatcaaatactttttcaacatctatggagaaatttgattttttaacttattattttggagaattatataagtagattttctagtattaaaccatttttgtattcttgttattttggtgttttagacttgccttatctcttcatctggtcattttatagatgtagatgctttctatatgcctgagaatataatgtgttctctatttgtggagtctagtgttctctatgtctggtaaaccaaactcgttaattgtgttgctcaaatcttctataatcttacacttttttttaatctggtccagccattgctgagacagatatgttaaaatcttccactttgattatgggtaaatgtgtcaatttctcattataattgtttatatagatactattacatgcaaaatataagaaattttacatctttctggcaaattggcaaatattaaaagattatgtattatatttatccctaataatgctttttattttatatggtgtcactatatctaataccacctaaatttgtatgcggcttatgttcatttttttataaggccaaacttaaaaaaaaattcttattgatgttgacatgttgttcacttcctgtgttgttggataatttttttcagatccaccctttcactgagagttaggccgtttgaggttcctgccttcatgtgaaggagtgaaagaggtgcatctcaattctctgtgttgtgtggtttccagacccttgtttcagttctccatgagggcctttaataagttttaattgctaattctttggatgtagaaataacccaacagccagacagggcacagtggcgcaagcctgtaatcccagcactttgggaagctgagttgggcagatcacttaagatcaggagttggagactggcctggccaatatgatgaaacccgatgtctaccaaaacatacaaaaattagcttggtgtgggggtgcacgcttgtaattccagcttcttggaaggctgaagtgggagaattgcttgaacctgggaggtggaggtcacagtgagccgagatcgcgccactgtgctccagcctgggcgtcacagagtgagactctgtctaaaaaaaaagaaggaaaaaaagaaagaacccaacagccagctttcttcaatgtcagtttatactgatgggctcatggatttcttttattatcttgataatctgcctgtgtgtttatagagatagctgttatgtattatccttcagttttcgggtattttgtgatcggagaatttccaggtaaccctgtcagccacattgctggaaatgcaagtcttcagattaaagattttttttttgaaaccaatgcttaaatacttggtggggaaagagaaataaaatcacctccctcttttttttttttgttgttgacgtttttctttttagcatgcagcagaactgattaaaacagtggcatctcgctatgatgaatatgttaatgtgaaggatttttctgacaaaatcaatcgtgcccttgctgcagcaaagaaggataatgacttcatttatcatgatcgagttccagaccttaaagatctagatcctattggcaaagccacacttgtgaaatctaccccggtcaatgtacccatcagtcagaaatttactggtatgtcagttattcagacacactttaatctcatttttctctagtttactctgtttttcctagctaaaaatcacataattgctgttgtatgctttgaatataatttgtattcatgttgtttaaaatgaatatgagaataaatattgtgccagtgcaatgttaagatggaaagtaaacaataataaagcatatgtaaagtatacaatagttagaagacttgaaactgtgtgtttgattaagactgtagcacttgtcattttgttaacttttgttatttaagatgctgccattaaaaataaacaaatatggctggatgtggtggctcacacctgtaatcctagcactttgggaggctgagatgggtagattgcttgagctcaggagttagagaccagcctgagcaactggcaaaaccctgtctctaccaaaaaaaaaaaaaaaaattaactgggcatggtggtgcatgcctgtggctttagctactctggaggctgaggtgggaggctcgcttgagcccaggaggtggaggttgcagtgagctgagaccgtgccaccatactccagcctgggtgacagagagagatcttttctcaaaaataaataaataaataaataaaataaatataaaaataaaccacaaaaatatatatttttttcttttcttttttttttgagacggagtatcgctcttgttgcccaggctggagtgcaatggtgctgtctccctcactgcaacctctgcctcctgggttcaagtgattctcctgcctcagcctcccaagtagctgggactacaggcgcctgccacctcgcccagctagttttgtatttttagtagagacggggtttctccgtgttggtcaggctggcctggaactcccgacttcaggtgatccacctgcctcagcctcccaaagtgcttggattacaggcatgagccaccgtgcccggcctatttctttaaacatgtaaacttctggagtggtatttgtatgagataaatacatgttattatattgtagatgtatacaacagatggtagcctctagctgagattccaaggagaatattctgttactgggaaagggtgattatatgtttatttagcaaacacaaagtgtttaccatgtgccaggcactctttaagcactttacaaatattagctcatttgttttcagaagtgccctgagatgggtactgttattatccctatttgatgaggatactgatgcacagagtggttaagtaatttcctcaaggtcacatagctaggaagtgttggagccagaaatggaatcctgctgccgtgacccactcagtcaattttttttttttttttgagaccgagtcttgctctgttgcccaggctgtggtgcagtggtgcaatctcggctcactgcaacctccgcctcctgggttcagacgattctcctgcctcagcctccccagtagctgggactacaggctcctaccattacactggctaatttttgtatttttagtagagatggggttttgccaagttggccagactggtcttgaactcctgacctcaggtgagccacctgcctcggcctcccaaagtgctgggattacaggccttagccactgctcccggcccctcattcagtttaatcaacagatgaacagtgtcactgaagatccctcaaactcagtgatgaacacatctgaaaaagaaagaaaattaagttcaaagaagaaacttttcattgttgccgttgtccatgaatgtagtgatctaaaaattctctttatcattgtgctttaaatagtgatttagttttgatctttaaatgtcaatagacaataaatatttatagactatgtgaatattggaaagaaaatataaacagtcacttttacagttcgggtttttgtctaaaaattttgttgtaatttctcttcctaattttagatctgtttgagaagatggttcccgtgtcagtacagcagtctttggctgcctataatcagaggaaagccgatttggttaacagatcaattgctcagatgagagaagccaccactttggcaaatgggtaggtagagcttaattttagagcctaaagttttccgtttggttgttctttagtttatgaacattttagtttctgagcttagagctaaatgtcaagagtatataaaatagaaaatgtagacacacacttacaactatttttgttggacactgtatttatgaagctctagcaaatatagttggaagaaattatagaaacaaggtgaggatatgaggactaaaaatttgtattttaagaggtatttatttggaaatgagaagtagaaatgaactcagatacatggtacatttagtgttctgaaccaatttttgtttctgatggactgaatactaagaaaataattcattggtttaaaaaatttttaggtatattttacacacacaaaatacacctattctaagtgcacagttcaattattatatgtatatgtgtgtgtgtgtgtgtatgtgtatatatatatatttatgtatatatatatattttttgttttttgggacagggtcttattgtcaccaggctggagtgcagtggtgtaaacactaaacatggctcactgcagtctcaaccttctgggctcaggtgatcctcctgcctcagcctcctgtgtagctgaggccacaggtgcaagccaccacacctggctaattttttgatatttttatagagacaagatctcactttgttgcccaggctggtcttgaactcctgggctcaagcgatcctcctgccttgacctcccaaagtgctgggattacgggcatgagccaccatgcttggtcatttagttagttttgataaatgtatgtacccatgtaaccggcactatgattaagttagagaacattactgttaccctaaaaaaattctctcatgcccctttcccagtccttcttcttttagcccctggccgctattgatctgctccctgtcttaagtttagttttactttttatacaatttaaaacacgtgtaatcattctagcatatgcatatacagtacttacagtatgtacagtatatacttagaatgtgttttgctttttttcacttagctactgtttttgagattcatctatattatgtgtatcagtttcagtcttttctatggctgagcagtattccattttatggttatagggcagtattccattttatggttatacggcagtattccattttatggttatagagcagtttgttaactctttcacctgttaatgggcatttcagtttctgtgaacattcatgtataaatcttcgtgtggacatattttagttctcttgggtaaatacttaggagacaaattgttaggttgtgtggttagcatatttaattttatacaaaattgccaggttgttttccaaagtggttgttccattttatatcctatctgcactgtttgaaaatacaattgttctgcatcctcaccaatacttggtatgtcagtctttttagttttagctactttagtgtgtgtgtagcagaatctcactgtgatttagtttgcattctcctaattgctaatgatactgagcagcttttcatgtgcttactagccattcatatattttctgtaaagtgtctattgaaatctttttctcagtttttaaaagtgagtttttcttaatagttaaagacttctttacatattttggaggcaagtcctttgtcagatacatataattgagaatataggtgaccctgaacaacatggggttatggatgctgacccccctgcacagtcaaatctgcatataacttctgagtccccaaaacttaactactaatagcctgctgttgaccagaagccttaccgataaacagtcaattaacacatactttgtatatgtattatatagtatattcttataataaataagctagagaaaaaatactattaagaaaatcataaggaagagaaaatatatttactatgattaaatggaaatggatcatcataaaggtcttcatccttgtctatttcaagtttgagtaggctgaggaagaggcggaaggagggttggtcttgctgtcttacaggtggcagaggtgaaagaggtgaaagtccacaggtacacggactcatgtagttcaaatctgtgttgttcaagggccaactgtatttctcttgtagttggcttgccttttcatgtttttagttttgattaatgcatggattttaccatcatttttctctaacaagaaaggaatgtaagtttactctagcatatgataaacaggcagtctgagattttacagagcttattttctgaggagttcattgtattacatcatttcatttgcctttttgtcgttacatagtagatagggatatgtacctcccttcgccatcatgtaactgaaataactgaggaattgttattgtgctacaaaactgagaacagatgaagattctgtaatgaatacttagatcatctattttctgttgacattttgcctagatgatgtgaaattataactattgattctgttgaaagagagcaaaaaagaaaaaaataactattttgtgtattgtttctgacttgttagagatgctgtaacaatcaaaagtataaaagactgcttttttaggatagaatttttgacttttaattacttagactgaaagaagtttgaactgtaagccgacgatacctaatatattttaatgcggtcatagtttttcttattttttgacttttttttttttttcccccgagacggagtctcactctgtcgcccaggctggaatgcagtggtgagatcttggctcactgcaaccttcgcctcccggcttcaggtgattcttgtgcctcagcctcccaagtagctgggattataggtgctcaccactacgcctgactaatttttgtacttttagtagagatggggtttcaccatgttggccaggctggtctcgaattcctgacctcaggtgatccacccgtctgggcctcccaaagtgctgggattacaggtgtgagccactgcaccagcctattttttggcttttaattctgaattgtgggcttcattttttaatgattttggtttaattttatcaatcactgattttttttgtttttctgttaatctttgctttgctttttttttttttttttttttttgagacggagtttcgctgtgttgcccaggctggagtgcggtggcgcgatctcggctcactgcaagctccgcctcccgggttcacgccattctcctgcctcagcctcctgagtagctgggactacaggcgcccgccaccacgcccggctaattttttgtatttttagtagagacggggtttcaccatgttagccaggatggtctcgatctcctgacctcgtgatcctcccgcctcggcctcccaaagtgctgggattacacgcgtgagccaccgcgcccggcctttgctttgcttttaattgatagggcttatccagtttttctgggtgctaactccattgctgttgatttggttatagaatactaaattaaataaagtaagtattgatgaggagttaaattgttttagacttcagtataacatagtatctcattttttcagggtgctagcttcccttaatcttccagcagcaattgaagatgtgtctggagacactgtacctcagtctatattgactaaatccagatctgtgattgaacagggaggcatccagactgttgatcagttgattaaagaactgcctgaattactgcaacgaaatagagaaatcctagatgaggtatgttttataagatttgcttttcaagtataaacactgtgatcccttgatgtccagcagggattgggactggagacttcctcatgctagtacagtgtagttagtattcatcactttggtgaatttactgtggcccagagccttctctttagcataagagaaattctggttgagtgagaatgggtttcattcttatcttaagggtaagtaagtacacactaatgaaactcaaatgaccactgtgtaaaactagtatactgtgagaaatcaactgtcatacaaactgttcagtctttgtaattattgatttattttatgcatagcatgtagcaagatttttctttttaatttaatttgtcttaacctggaaggttaaaccctttaatttatccctaatttcttaaaatatattaaatatatttgttttatattatttatcttataattccaatatctgtagtttttgtgggtttgagtctatgatttgtaatttttgctgattcttgcttatggtggcttgttttctcttgtgttcagtttttttgttactgttttttaaaactttaaaaaatagtttcagatttacagagtctttgcaaatttagtgtagaaagttcctgtatatttttcacctagcttccctgaaagttaaaatcttatgcggtcatggcacatttgttaaaactaggaaattgacattggtacagtattattactcagattttaccagttattccaccagtgttcctcattctgttccaagatccagtacagaatactgaattgcatttagtgttcagtgagttttgattgtgcattcatatttcctgtacttatttgtgggaattcattgagatctgggtttaaggtgaattctagaaagaatttgtgtttgcttctgccataaaaaggcattatatacctggtacctcctcaaacttaagaggttttttcctttcttttataatcttttaattatagtagtaatttatcttaagactttgtgtcacacagatagtgcggtttctagtcccaagttcaggcttttgatcaggaatctcagataatacttcttgttttttcttttttctttagagccaaggtccagacaggcatgttttcttttgtagggcagttttctgttttaaaaattcatccactgagaatcacctgtttggaagtataccagtttgagggtggagagtgcttttgatctgacctctcaccttttattgtccctacctatgtttcttgttgacttttcatgttctaaattcacaatccaagtcaatggtgaactacacagctggtgaactatggatggtgggccagtgctagcttgtggcctactttttttgtatggttcactagttaaggataatttttatcttttttagagcattgtcaaaaaagaagaattctatgtaccgtagactgtggcccacaaaacctaaaatatttactctgtggtgtttgacacaagtttgctattctttgtcctaagctatcagggattgtcatacattgttggtgctagcactgtgtctactggtagattagtatttccttgtgtttctggccccctactatcctgtcatcttatctgtgcattaaaaaggcatttaaaaatatattaaacataattttctgtttgttgtattggaatgaaagtctaaattttatattttttaatgtaattgatcagttttccccttttgtttatggcttctatttatttattttaatcttaaaactttctttaaattgatatatggatgtaaatagtctcttatttattcctccttttttttttttttactgagaaaggtgatagctaattcacccttaaatttataagactttttgttaaatgcattataacttagatgtctgcaagaaaaaagtcgatttatattctaacctagtattcccatctcaccaaattctcacttatattgtgtatgaacatttattaaatgtattaaagtttttataccagaaatgacatttcagggttctttttgcttccttttaaagtcattaaggttgttggatgaagaagaagcaaccgataatgatttaagagcaaaatttaaggaacgttggcaaaggacaccatccaatgaactgtataagcctttaagagcaggtaaaaatgtgtataaatgaccttcatttgaataaattcccaatttcgacccacgtttttgcttgattaaattaggctcagttgtaaattcatttttaccgaaactgtttttcctcagttttagtataaagattaaaaaagttcacaaaagtaatctgccaattgtcagaagtacagatttttaagaaaggtatgaagtgaaaagttaaaatgatcctccaactttcattttctgttccaaactctgtgcatattttattttatttattttttttgagacaaggtctcgctgtgtcactcaggctggagtgcagtggcaggatcacagctcgctgcagccccaacctccagggctcaggcaatccttctacctcaacctcctgagtagctgacactgtagacatgtgctaccatgcccggctgatttttgtattttttgcagagacgaggttttaccatgttgccctggcttgtcttgaactcctgggctcaagtgatccacctgcctccacttcccaaagtgatgagattacaggcttgaaccaccatgcctggcccctgtgcatattttaaaaacataaatgagagcatattacatttatggctttgtaatttttttcatttagtagtgaatcctgggtggtaaaaaaaaaaatgagctttaagttattttgaggccaaatttatgcttcttaagactttgattattaagattttgtgcttgctgagataaatgctatcttcatggtggctggagattagttttatttatctttgtaaaaagttcatatattattgagatttttctaaaaatcttttttttttttaagtcacattgctcttttgacagaggaatacttttaaaataaatggaccagtttttggagagaatgatttcttcttcattcatgagttataggaaaagattaatattaattaacttttatttggcagatagtaaccaccaaatgtattttaaggtatagctatgcttttgattttataagtgattttgtcatctttctaaaaacgagaacgcaaagactgtcaggagctgtttttattatgaagtgaattggggtctatagaaggggaggataagtaaagttggagactagaactcaacatataaccagccgataaacgttgctgttagaatcacttctgtgctctgcaaacttttattttctcccagagggaaccaacttcagaacagttttagataaagctgtgcaggcagatggacaagtgaaagaatgttaccagtctcatcgtgacaccatcgtgcttttgtgtaagccagagcctgagctgaatgctgccatcccttctgctaatccagcaaagaccatgcagggcagtgaggtaagaaggacactttgatgtaggttgtcatctgcttaagaaaaccacattcaagccattttatataatgaactgccaatttcttattgtcaactttaaaaaaatgcagaaataaattggggttgttatatttaaagtagtatatagactgtgtaatagataattatactaatattaactgtcctgtaatagtaacttccatttattgaatgcccttttttgaactaaattttagatacttcataggtcaacagtatttaatttgggttttataaaagagagaagcttggaagtatagaaatttcctgaaatgaaaggactgggtatagccagatacacaaattctttatttcttacattattctatactcctttccaccttgtttcaccggaactacctttgaaaggaagattgacaaggtgtgcatgttaataaatggatagcaccatcatggtatttctactgatgacaggaaagagaaaattgaatagtagggcatctgatttggaaagtcctaaaagaagagaaagtgcaagtataatttaatgacctatcacagggagatagggtaagttagtaggaaaagatagaggtcccaaatctctgcacaggaaaacaagcgaaagggcaagaaatactgctgaaaacttcttgaaaaaagtgaatttcctgggatagtaagttttgaaaagtttgagttttgttccttatttgtctttccatagaagcattttatatatttcatgtatttattccaagacctactggatatctgctctgtgtaaggcactatggtaggtacattggaaaattaacatacaaattacacacaggctttaccctcaatttatgatccattgtggaatattagtcatgtacaaggatgactgtaatatagggaagaagtttaaaaatgtcacagggaaagtataggaagtatgttacgaggatttagatgaagtacttaaatttcagtaattttggagtagttctcttcagaggcttcttaagagattggcacattatgagaacagagtggataggcagaaaaagtaaacgtgtaggatcggagaagggctgagtagtggctgtgtctagagagttatccgaggtacagaggatctgcaaagacagcttttactcctgatttcttgtgacagaaggtttacagacatgttgagaatggctggaatctgtttgtttatttatttattcactaagtgtttgaaggcctactattccagaacagtgctgagcaccttggtccctaacataaagagacaaaaaactgctctgggttacctttagtgtagagtaaatgcacaggtactgggcacctctcaaagggaagagaaggctacatagttgaatgtgcattgaacctggatctaacgggggaacccaatggaacaaggaatgtgagttattgttttgaggacataggggagaaaaggaggtggtcagaagattaacttgtgaagaacaacgaacctgaagaagaaactgcagacccttcgaacagcaataaattttggtaccttttttattttagaaaaagatttctggttagtactttctttgtattctttttggtgtcttgtacatgactcagaattatgtggctttcgtcctttgattcttctgctttcagtagaaaagcaaaaatggtttgtgctaagcaaaatctgcattagtatgcactgatatattgctattttattcagttatatcagttttattaatccttacttgtgttacacaggagaaaggaacttttatagtcaatacgaagtaattttatggaagctagattttcttgacggggtaaccacaaaaatttcagtactctctgtatattcgtttgtcatgtgccttaatcaaataaggcaagcatcaggtttatcaaagctatttcagactggttataatagttgatgacggattttagccagaatttttatgataaaaactcagttttttgattgctgattagagtgatgcaaatgtacatgttttattaaaaagtccaagtttgatggtagggctgttttttcttttattgtgaagaagcctactgtctggttacttattttcagtctctttggacatctggttttagacattgagatactctgacaaattttgcagactagtggtaatttgtatttaaagatttttgtattaaatacctaggatcactgcttgtgattggttgcctatgatgtactgtggcctgaagtccagtctatggttggctggccaagccttggccctaatgtatatggggctgagtctagccagaggaaggaacatgtatttttttgcacaaggttgatgttcagttatactcaaagtgttacatctgctgggagtaatggagggggtacctttaaaaaaaaaaaccctttacctccttacaggtagagcataaagagaattgtttaaaactgtgtgccctcccagaggagtgccttttttggattcacagactagtggaggatctgcaaacacagcttttactcctgatttctcatgacagaaagtttatagacatattgacaatgactggaatctgtttgtttatttatttactcaccaagtgttttttgaaggcctactattccagaactgtgctgagtaccttggtccctaacataaagagacaaaaaactcctctaggttacctttagtgtagggtaaatgtatcaagtttctgcgttcgttgctgtagacatagttgcttatttgccttttctgaaaataaaatgacaaggttataaaagtaaaatagaagattttgttgagggcatttctttctttcttttttttttttgagacggagtcttgctctgtcacccaggctggagagcagtggcgcaatcttggctcactgcaacctctgcctcctgggttcaagcaattctcctgtctcagcctcccgagtagctgggactacaggcatgtgctactgtgcccagctaatttttgtatttttagtagagacggggtttcaccatgttggcctggatggtctcgatcgcttgaccttgtgatccacccaccttggcctcccaaagtgctgggattacaggcgtgagctaccgcgcccggcccattgagggcatttcttgtctcatattgtacttggtgctgttaaatgccacagaggattttaaatctaaaactggggtcaggaagctgtggcttgtgggccaaatccagcctgcctcttctctttgtatgttctgtgagctaagaatgagttttacatttttaaaatgtaaaactctactttctacttcattttttaaatggctgaaaaaaagtcaaaagaatgttttaatatgtgggcattatataaaattgagatttcagtgttaatacatttttgttgaaacatagctgcgctcattcatttacacattgtctttcacactacaaagcagagttaaaagagttgcaacagagactgtggcctactgaggcaaaaatatttcctgtttggtcctttaccaaaaaagtttttaagttcctgatctgaaagacaaagtattgacaacctaggtgatgccattcctgccattctgtttgacctcatctcctgttctgccttttgtttactatgcttcagccagagtggcgtttttttctttcctttgatcctgccaagcttgtgcctgccacaggacttttacatttgcgtttccttctgtgcagggctttcttcccatttccgtggctgttacctctttttcattagtcttagatgtcacctcttctccatctttgtcattgtctacccacattattctatttttgtgtatttgtttaatcctcccctttgcatatttatttaatcctctctggtccccaaatgaaggaaaagactgtttttgttagtagttgtgtccatagcatctagaatggtacccaaaacaaaagtatttgtttgaatgatcatcactggcagcctaacttaataaagggatacatttaattgcagttgaaaggtagctggagttgtgtataagaaataaatatgctaggattctaattatttatatactttgataacatgttaaacctcaaatttgaatttataagaaaatttaggcagtggttttcttattatcttggtcattcatttgtggaagcagtttaattcattttctacttcatttactctgttaaaatgaggccagtgccttataatctgaaatatgttaaactagtgtactgcatatgaatttttttaaaaagatgttcataatataagggatctctatctttgtgtggtagtccacaagttcgttcataaattcgttgtttgaaatggcatttttttttccccagaaagttagaattattgcatttttgaatatcacagaatttgttaactatttgaccctctctgtatcagtctggttggataccatggaagttgtggttagcttttcttcctaatctaagtaatatgattgaatacttaccctttgttagaagttatgttgagcactttatatagattatctcagtctgcacaacagtcctgaaataggtactattatgcccattttgcagttgtgaaaattgaattttcttagtagtaacctgtccttgattgcacagtaactaagtccattatggtctctaagggagtatagtcagagttgaagtgttttttattttctatgtaattacatttttttatgtaattacgtttcactttgttagacccatttgtttccatattcaagttttgaacttaatctcgttttttgagtgtgtaaaaaatgttcatgattcaaaaggtacatacagagaagcctcattccttttccctctacttctttcctgtatacttgctgtaagtaaccatattcgttagtttctggtttgtccttactgattttctttttgcaagaacaacaacaaacaacccccaccccaaattatgcatacatatgtatacatatatacatattatgtatatgtatatttattttctgattttccttctgtcttactcaaattgcagcatactgtatatgcttttgtatcctttttttctcatttaataatatgtcctggaagtcacttggaaggaaacttttattcacatcgtctgatatcaagttctgctaggtctttaaacagactttgtcatatccacccacgtatgattctttctcctcctccttccttttagagtttctgtggtttgatgctttctagactctaggaatcatatttctttctctttccacagccttctcccctgtaccctcttctttccctccctccctttctccttcccttcccccttccttcctctcttccgcccctccctcttctgttcctttcctttccttccattttaaaattaggatgtttaggagatatggatgtaaacaaggccaaaaaggaaattcacctacatttagcagaaacctcgagtctctggtcttcacaaagggatgttactttggacattcctatcaaggagctaactaagactgtggaagaaagagtagaataggaatttttagaaacaggcagttggtaggggaatccatgggaattggaattgctgctggtagtgagaaagacaggggtggagacagggctcgtgatgtcctcttcttcctttgtctttcccccagttttctttctatgagcatcattggggcaagcagaatagagagattgggttgatgttcttggtggtcttagcaaagtatgaagagatgagtgaaaggggcagcttgaaagtgctcattagaaggcacttgaacactatgaatatgaaggggtatttatgaatcaggtgggtataggtcagagagtgtcttgactgaatacaagagataaatctctgttttgtttttgtattttgttttgagacagggtttctctctgtcacccaggctggagtgcagtggcatgatcatggctcactgcagccttgacccactgggctgaagcaattctcctgcctcagcctttggagtagctgtgactgcaggtgcacaccattgcacccaactaatttttttttttcaatgtagaaatggggtctcactttgttgcctaggctgatctcgaactcctaggcttaggtgatcctcctgaagtgctgggattgcaggcatgaacctctacatctggcctaaaactcttaatggtatgaagagaggcacaagaaccctctttccttttcctctcccagtatataaaataaatgtggtatatacacttatatctgtatctttctctatttctttctccatctaccatgcttgcttcatagctgtctctatttctgtcttcacctctgtttctctatatctctctcagtctctctaggcaaaataggatatctacttacctagcaaaatcataccttcccctgcttcacagccatgattgggagggagtagaatgtagagtggctaagagattggttttggaactagtcagacttaggtctcaaatttcacctctgccccttagtagctgtataaccatgtcacttaatttttctgagactcgttatccctatctttggaatagaggtcataaatatatataccccatggggtattgtaaggaatatatgaaattatatttctgaagtgttttagcatggtgcctaacacataagagttcagtaaattgtagatgttggctattgttattaatgctgcttttgttttaatatgagtcaactgaaggtacagtgtctatctatataaacctgacgttcaatttatatttggctctctgagaaatcatctctctctcagcccgaatgaacctttatatattatttccttctcgaaattggctttttttttttttttttttgcagttaaactaaggtgtcttttttgtttaggttgtaaatgtcttaaaatccttattgtcaaatcttgatgaagtaaagaaggaaagagagggtctggagaatgacttgaaatctgtgaattttgacatgacaagcaagtttttgacagccctggctcaagatggtgtgataaatgaagaagctctttctgttactgaactagatcgagtctatggaggtcttacaactaaagtccaagaatctctaaagaaacaggagggacttcttaaaaatattcaggtgaaatttatatatttaataagatctgtgttttaaaaattacagaaaagatatgtctggactaaacctatattcagttaggaaaatgacattggagaatatctgtagttaagagtagaacttaatacatgtatattttgtaaaattaaacttggcacatcagttttatctatgaaacaaagtcacttcttttttttttttttttgagatggagtctctctctgtcgcccaggctggagtgcagtggcgcgatcttggctcactgcaagctccgcctcccgggttcacgccattctcccgcttcagcctcccgagtagctgggactataggcgcccgccaccacgcctggctaattttttgtatttttagtagagacggggtttcaccatgttagccaggatggtctcgatctcctgacctcgtgatcctcctgccttggcctcccaaagtgctgggattacagacgtgagccaccatgccctgcagaaacaaagtcatttctatggctaaaatgttgcatattacttaggagtgcttgatacttcagatatttttcatggttccaagtttttaatagctttggttttttttccatatgggaggaaaatcgaaattagttggaattactgatacctttaattgtatggctaacatacatacagacttcagtcattttttaaaaaaataatgcaaagtaaatatgttgagaagtttgaagttagttttcgtgtttacagataggtagtttggactaacaaatacttgaaagtttgcccttttaatagttaatatgcaaaattaaacatatatttctactcctaaacattgtatctatatatgatataaaataactccaaaaggtaaaataattttcatgttatattttttacaagtgttatatactaatagaaatctgtgatcattattggttgttttgactcctattggatttttgaaatttttacttaagaaagatttaaagcataatgaggcttcaaaagagtgtactaggtattctagtaattttgcatatgtatttaattacatatgattttcataattggaaaagatcaataaaaatgttatgagctatattaattttataaataaatgtaaatatgtaaatctttcttttaacaaggtctcacatcaggaattttcaaaaatgaaacaatctaataatgaagctaacttaagagaagaagttttgaagaatttagctactgcatatgacaactttgttgaacttgtagctaatttgaaggaaggcacaaaggtatgaagtacatgcaaaaggaaccatagctagcaagtacagatgtgaacgcatagtttggaagttaagtggtatttccagttgaaccaaattgctctttgcctagaattttagctttaatgccattgctgctgcgaagtttgttataggagggagaaagcttaatgaaggtggcaacatttcatgggaactttgaagaatgaattgcatatttcaactggcagaaaaggggtataaatattccaggtagcaggaattagcagagatgtcaatgacacctttttaagggataggaagttgactaatttgatgaattttgaggggcaggagtagtcaaagctgatttgtgatggaaaagcggaggggcatgacttttatgttctctgcggtggtttgctgaggacagacttgtggcctgcccaagtgtcagaaggcttactgaatatgtaagtactttcttgccttgtcctttaaaaagtttagggaattcgcttatatttctttttaccaatttgtttttgagggaacagtgatttttaagttttttcagatgcataattccttttggtacttaacttcataataatcactgaataaagttaccttgatataaatacagtaggtaaaatgtaaaaccctctgaagagagggtgaaaatactgcaaagccttccaaatagagaggatagtaaaatgccattttaatttggtttaaaatgctttgtttaaataggtaagctgagaaaaccctccagagagcctttagaaattcttttaagggtttctgaagtatgcttgcatttctgtagtgaatttgaaaacctaatccttccacttaaataggtttaatgttattaaacaattgacttttctctaggaattaggaaggttttcatgatcatgaatcttttaacttgttacattttttatgataatgttctgtaaaaatgcttttattatttttattttctttaggagtcttagatcatatttaatattaagttgttgggcctagtaaattgtataaatgtatctcatgcagatctcagttcttcggctctaactatcattgacaaattagctttagatcacattactctctggattaaaaaattgttcttgttccttacttgtatttgttctttgcttatagttttacaatgagttgactgaaatcctggtcaggttccagaacaaatgcagtgatatagtttttgcacggaagacagaaagagatgaactcttaaagtaagtctgttttgtgtaccaaattgtacttaaagaattttcttttaaaaaatcatgtagagacttttggtatgaacttggtagtatgagatagcaattttcctcttctcatggaagaaggaactagatagagtattttacaaagcaacaagtaaacagctgcataatctgggaatgaaaggatgaaaagaagcagaaactctagatgcaggaagtacagtgaggtcacagaaatgataaaaacagttcaggtggcagatctcaggaagtgccagtaaatacaagcaatttattttgaagtggcaaataggttccttacataaaactagagctatagaacatggaggagacagcatgaatagctcagagaataccagcaaaatcactttcagaaggaggctgctgagaaagcagggccagttaacatacgactcatttcctgctgagtaatcaatacagagtagcacagtgctgataaaaggtggaaaacattaacaaaatttaataaaacttcatagatgaagaacatttaccaaaataatattgtcacagaataggtgaaaattatgagcaaacatctgaccatgagctaaacaaaaacaacaacaacaacaaatgtaaggaggcaatcattctaaggccggggtccccaatcctggggccttggactggtactggttcgtggcctgttaggcactgggctgcacagtaggaggtgggtggcagacaggcgggcagctgggcgagtattactgcctgagccccacctcctgtcagatcagccacagcattagattctcataggagcgcaaactctattgtgaactgcccgtgtaagggatctaggttgtgcattccttatgagactctgactaatgcctgatgatctgaggtggaacagtttcatcctgaaatcatcttccgctcccctgtggaaaaattgtcttccatgagaccggtccctggtgccaaaaaggttggggactgctcctctaaggaacactttgagcagaaattccagaactgcaggaatatggtaagaaaacaggaagtgataagatgtgaggtgtcagaattcaggaaagaagtagaagggaagaataaaaccgtgacatgggaaagagcacaaagggcgaataaacactaaagaacacacaggaacacagagtagaaatgaggaaattaaaatgaaaccaaagtcaagaaagaattagagagaaaatgggcacagaagatctaatataggcaaaactgaatttctctcagaagaaaaaccagatagaacagttatttaacgttctgtaaacagaacacttatttaatgatactcaagaacattttcttaagtgaagattgttgaaagaggatatcatatggtaggggaaaatgacaagaactgtcagcatcaaggcatataaattattggccttaaaagataatggcagaatcctttaggcagtcaggcaaaacagtcaagccagtttataaaaaggtgaaaaaaattaggctggcagctctgtatgccagaagagagtggagtgattgctgtaatctcaaggatagtaaatatgagctaaagattttatatcatatagtaaatacatgctaaagattttatatccagactgtcttttgggtacataaaaagccatatattcattagtaataaatataaagagctgaaagagtcttataccgatgaccctttcagccaactagatctttattcatctctctgttcatattcatgaacagagaatgaacatgttcatgttcattcacctctctgctcatgttcatgagagaagttattttcttctacctctaacaaagagcaggttagttgtttttagaatatttctactaaacctataaaaagcaaataattagaatgttttaaaaatggttctaaatgtttaaaaaaaggtgatttttttttagatggagttttgctctgtcgcccaggctggagtgcagtggtgcagtcttggctcactgcaacctctgcctcccgggttcaagcagttcttctgcctcagcttcttaagtagctggcattacaggtgtgcaccaccacgcctggctaatttttgtatttttagtagagacagggtttcaccatgttggccaggctggtctcgaactcctgacctcaggtaattggaattataggggtgagccacccccccagcctaaaaaaagatgagtattctccatattagtcttaatgataaaaaaacctaacaaagattaatacaaaacagtctacagaccagtttcagttatgaatatggatgcagaagtcctaaataaagtatttgccagtaatagtcaccaggacgttaaaaaataattattgaccaaggggaggggggcatttattccagtttcagtattcagtattttcacatcaaaggaaagatcacaggtttgtcttaatagatgaggcagaagcatttgagaaaatgagtgttctgatactcagtaaaataagaatagatagaagatagatgcttccgtaacatgaaaatatatatatgtatgtgtgtgtatatatttctgcccaaaactcagtatagtgattaatggagaagcactataaacagttccctctgaagtcaagaacagacaacaaatgtcactgtcagcactatttttaaatactatactgcagtaccagccaagacaatcacatgagagagaaattaaaaaattggaaaggaagaagtaaaactagcactatttacagacattatgattgtacaactacttgaaaacccaagagaaccccaaaactctgcaaataataaaattattattactgaagttgttgatcataaaaataatttgtagaaatcagtggctttcatgtaaataaacctatagaggataagatgaagagacccacttacagtagcaacaaaaaggataaaatataaaatataagtttgtcatatatgagacctatgtgaagaaaacagtatttcaaaaagaaggcttgagcaagttaaaaaacatgttcttggacaggatgactcaacttcataaagatgtcaattctaagttaacttatgcatcaactgggcgtgatggcatgcacttctagtcccagctacttgggagattgaagtgggaggatggtttgagccctagagttctaggttgtagtgcgctatgattgtaccgtaaatagccactgtactccagtctgggcaacagtgagaccctatctctaataacaaacataaataaagaaataaacatatgcggccaggcgcggtggctcacgcctgaaatcccagcactttgggaggctgaggcgggcggatcacgaggtcaggagatcgagaccatcctggctaacacggtgaaaccccgtctctactaaaaatacaaaaaactagctgggcgtggtggcgggcgcctgtaatcccagctactcgagaggctgagacaggagaatggcgtgaacccgggaggcggagcttgcagtgagctgagattgcaccactgtactccagcctgggcaacagagtgagactctgtctcaaaaacaaaaacaaaacaaaacaaaagaaataaacatgcattcatatgcttttgatatgcaaacatgcttttgatatgcaaacatgcttttgattaaaaaaaatcagcagcttttcatttggaattagacaagttgatcctaaagttcaagtagaaaaagaaacaaggtcagccaggaaaacaataaaaagagtagtgaaggaatactagttctaccagatattaaggtatataataccatatttaattaaaacacagtggtactggtacatgattagacaaagacagaatagaaaatagaaatagattcaaatacatacgtgaatttagtgtaaaagatcttcagccaaccagaagaggtggacaactgcccagccatttagaaaataaaagttatctttataccagagtaagttctgagtggaccaaacttgaaatttgtaaatgaaatataaggtgtaaaatagaatggaggagaattccgtaataaagctgggatgagcaggatctaataactcctacttaaaatccagaagccattaaaaaaaaagaaaagaataagtttctcatagaaatatgataaacagagtcaggatatgacaaattgggaatccaatatttgaaacttattcacaggcaaaaggctaatttactttatttagaaaagaactcctagaagtgaacgagaagaaaacccaatagaaaactgaggagaagacgcaaacagaattttgcagacaaggaaatacaaatggctcttaaataaatgaaaaaaaatgaataccctcattcattataaaatacaaattaaaattagtctgaagtaatatttttcagattggcaagaatctgaaagtttgataatatgctttgttgtcacatgttggagaaatagatttcatacattgccgtgagaatacccaatggtgcaatccttgtgttgggcattttagctgtaaagaataataagactgcaaattcaaacatcctttaatccagccattctgtttttgggagtctattctgaggatatattagaatatgctagaaatgacatatttatgagcttattcatttctacattgcaaatagcagtaaaaaagtagaaacaaagtgaccagggctggtgaaataaagctatacttgtatagtgaaatgctgtgcagctattttaaaaatcagggtgttttcaatttactgatatggaaagatctccaagatagttatggtaaaaagacacagaacagtgtgtagagtatgttttgtgtaaaaaggaagaaaataacaaatatagaaattggcttgtttacgcacaaggaagctctggatattctaaggaagaaagattggaatatcgtcatttaaaatattttatatttcatatatctaatttaaaaatcaggtttgttgtaaacaagtatatattttatttacacttgtcaagtattttcagctcagtgattgaaaggtgaatgaaagatggaaaagtaggccatataataatattagcttttgaatatctgagagtttattttgttaaagtcgttgttaatactgaaggccaaaatcctttgaaatcttactggatataatgtataccggaaaagtatacataagtgtgtatcttgttgaatgttcacaaactgcgtacacccaggcaaccagcacttaaatcaatacacagaaaattctcagcaccctaaaagcattgttaatgcatccacccagtcagtcagtctttatctttcttttccagggcaaccgctatcctaacttgtaagaacatagattactttctcctgtttttgcattgtatataaatagaatcacatattatgtactcttccatgactggcttttattctacattatatttgtgagattcatcagtatagttgtgtgtatttgtagatcttttattctcatttctgcatatattttattatgtgaatgtacaagttatttattctactgttgaatattttgagtagttgccagttttgagcttttataaatagtgctggcatgaatgttgtaaatcactgctgtccagtattgctggtagcagtaaaaatatggaaacaagtcaaatgtctggttctggttaattaaataaaactacatctatatggtgaagtactatgcagtgacatatgcaattgaaaatgtaaaatttgtagtagccgtagttaaaaaaaaaaaaacaggtgaaattaatttcaatatttcatttaacccagtatgtccaaagtattattttaacatataatcaatgtaaaattacaaatgagagatattttactttttttcacactaagtcttagaaatctaatctgtatttttttttttttgtgagatggagtcttgctctgtcgctcaggctggagtgcagtggcacgatctcggctcactgcaacctccgcctcctgggttcaagcaattctctgcctcagcctcccgagtagctgggattacaagcgcccaccaccaagcccagctaatttttgtatttttagtagagacgggtttcaccatcttggccagactggtcttgaactcctgacctcctgatccacccgcctcggcctcccaaagtgctgggattacaggcgtgagccaccgagcccggcttaatatgtattttatacttacaacacatctcaattcagagtagccacatttcagatgtttgatagtcatgtgtggctaatggttactgtattagacagtacatgcttttggtgagcatgttatatgcagtgctgttgggtatatatcgaggtcaaaggatatgtgtgtatgctcagttgatattgtcaaatagttttccaacgtgattgtactaatttatattcctcctagcaatatatgagagtcctggttgctccacatttttgcccttagctattctgctgggtttgtagtattatctcattgtatgattttaatttttcattttcctgatgactaatatgtcctttttatatacttattagctggaggctttgctttttaatttctgttttcattgaaatctttcatcagaagtttaaagcgtttaagaagaatgaatattttactctgagctttactttcttttgactaatggtttgaatactactgtcaggttgttgggcatagtactagtggcattttattttatatctttttgctcttttacattattgattttatttaatagcattgatttatatcttttataagtggctaggaaattatcatttgctctataaatgtgttatttactgcaaccatccctagagtttatcaaaggaaaagaaaggtattgtgttaaagctttataatatacgtatatattttagatatttcaaaatctggccttttagaattttgatattgattaaaaacttatttattttataagcagttatttacttaagaagtagttttgttttttttttttgatgaatgtatactagttttctttatgtctggagtgactggggcccttcttgagagggaaggttggatgcggacagtgtggggctttgctgttaattgttaaatcagggcaaaaggtactgtctcagatgttttgggacatgtcatatttacttctttgtgtacgttaatcagtgcagtgaaaagatgattgacatcatgtattacatggagtgcattttaccttaggtattgtttagtgtgattttgggataaatttcaatttactgttagaggagacagaattttctaatatttaatactaaattgtaatagtattttcagcaatatatctttcatgagtttatcttagtgacaggtgatgtgttatcttttaatataaaatatttcaacgccacatttctttgaatatcttcaggaagtttttatctagaaatttgcataatggtttgcataaaaggttagccttttcacctgttttattttgtataaacactgatatagtgattaaaacattagctacataactatgagtcactgtagttttctgataacttttagatagatgatgttaggagttttttaaatccagggactaccttttattagagggtgggcagtcttttaggattacttgcccagtttgacacgtttcttactctagctgtaactgtgatctctgaaaatgtttactttttcccccagtcttcagaaatataaaaaagatacaacttcattttattaaacaataggaagaaagaggatttagattctagtcaagaataaaaatgtagtatattttgtttttttcagtttttgttatattgataaataattatacatattatggggtacatgtgatactttgatcatgaatacaatgtgtaataatcaaatcagggtaattaggatattcatcacatatttgtggggcacatgtgatattttgatacatgaatacaatgcataataatcaaatcaaggcaattaggatattcatctcaaacgtttatcatttctttgtgttgggaacattccaaatcttctagctattttgaaatatacaataaattatcattaactatcatcaccctatgctgctattaaacactagaacttatttattctctctgactgtatttttgtacctattatccaccctctcttcatccccaccccctactctttcttgactctagtaaccatcattctactctgtctccttgtttttagctcacacatatggaggagaacatgcaatatttgtctttctgtgcctggcttatttcacttatcatgatggcctccagttccatccatgttgctgcaaatgacagaatttcattatattttttatggctgaataatattccatggtgtatatatactacactatatccatttatctgctgatggacacttaggttgcattcatattttggctgttggaagtgctgcaataaacatgggaatacagatatctcttcagtatatggatatcctttctttaggatatatacccagcagtgggattgttggatcatattgtagatctagttttagttttttgagggacctccatactgttttccatagtcactgtactaatttgaaatgtagtatattttaaaataccatcattgtttggaatccattttctatgtttcatgtatgaagaaaagaaaagctgatattttatgtgtgttaatttttttctatcatgttaatttttaacactctgtctttgataagggacttgcaacaaagcattgccagagaacctagtgctccttcaattcctacacctgcgtatcagtcctcaccagcaggaggacatgcaccaactcctccaactccagcgccaagaaccatgccggttagtaggcaaataaatattttaaacagaggttttacattaacgatgattacttgttctaacggataaaacatgatttacataggaaggatctagtggttaccacctgcatcaggtaaccaaccttctgatattttgcaatatgtagaacacagcatcattcaagaattcttgacaaaaaaatgcttaacctgaatgtaatcaagcccttaaactttctgtttatagcaaataaaacaaatgataaaataagaagttaaattatgctattaggaaacaattggacaaatctttcacatgggacatttatatgaaataactgagttgatcatttctaaaagtgaatgtcatagattttttaaaaaagaggcatattctagatgaaaagagatgaaagtttccttataatcaaatgcagtatatgaactttatttgcttttggtttataaaaatagctatatgagcttttttgtgttaattaggggaaaattgaatttggagtggatatttgatgacattggggaatagcattagttttttaaggatgaaaatggtattgtgattatgtaggagaatatccttatgagaacttgagtgctgaagtctttagggctagtgtcatgaaatttgcaacttactttcaaatgattctgcaaatatatatggatgtagttatagataaagcagaaatgacaaatgttaatagttgttgaatttcattggtagatgtgtgattattttatatactattttttacaaattttctggtgtgtgacatttttcatgtaaagtttggggactaggaggagatgatggtagtaaacagtacctgtgctgcttccttccacctcaaatgtccaaccactggaggaagcagtaaatgattaaatatgaggcaccaggaaaagagcagtggctatggagtttccacaggttggaaaattattcaactatgatatatttctatagtaataagccggtatttaagaatgggaattaaaaatatatttggttggattctagagtttctcatatgtccttattaattttaattaatagcaatttgagagaaatatgaaacattttatagtcaatgctgactttttcttatagcctactaagccccagcccccagccaggcctccaccacctgtgcttccagcaaatcgagctccttctgctactgctccatctccagtgggggctgggactgctgcgccagctccatcacaaacgcctggctcagctcctcctccacaggcgcagggaccaccctatcccacctatccaggatatcctgggtaaggctgcaacattgtgtatcccaagttggctaatgttgtttctaggctctggctaacctgttaaaaacagggtcatcccttctccaaatggaggtgtcatgaatgaataagctacactgtcagcttatccagaaatgaaaataatgttatggtcacttacatgaataggatagctatttcctaggcttttaaaatttatgtttttatattttacatattgggtttatattaaataatcttttctgtattatagagtttagtaggtgtttccttggactttaggtgataaacaggtaccttttctgagcgtagcatagcaaaactgataaggccttgtttacgtccctatacttagaatacttggcatttaataaacagttgaatagaaatttatctaattatgggttgcactttcttaaaggttaatctctgtggtaatttcttaattttaaaaatccaaacatttgactaccttttaagatgtgctctaaattttacttagtaagtacatgttgtctgccaaatattagaactttataagttgtaaatttatgtatatcacagtgaatattgaatattgtggaagaggaatgtatttagatgactagttttgccacgttaaaatgaagggtctccattttttttctttctttaatactcgaatatttaatcttattttcttcagtatttatttttggatagtattaaacacttggtactcttttgttttaattaataacaggataggaatgcttttctctgacaagtgccttgaaacagtttttttcactccactgttctttaatagactaaaaaatagaaatgactttcatgaaaaacgtagttctagaatgattattgttttattttttagtatttgatttaccaatcaagatttttctgttttcttctatcaggtattgccaaatgcccatgcccatgggctataatccttatgcgtatggccagtataatatgccatatccaccagtgtatcaccagagtcctggacaggctccatacccgggaccccagcagccttcataccccttccctcagcccccacagcagtcttactatccacagcagtaatatgtctgctcagcagctcagctgattcagatcagagggaaagaaataccaaccctgcaataagtgtactaaactctacgctctggttaatgtaatgtactctcctggactgaatgcagtgtataatttctgtctacagctagaagctgtgccccagttccacatttgattacacatgtgagatttgctgctgttgcagtataaacactaggtataataggatttgaaattgcattacagttcataaaaattgaaaatgagaaattaaacctgcaagtgaaacatttgaaacgattatactttctacataagacatggttgggacatcagatacttacaaagatggtttaagtatggatactagagaaaattaagttttctttctctttggtttattgatttggtttaatttccattatgctattttgcataatcaaggcactgtaaatcttataattttaaaataaattacttaagaacagttgtcattgttatgttttgttattgattctcattactgtctaattttttttctggtattagtctcattttgtatgtatataagttaaacagatactgtttttaagtgcatgaatagtacaagttattatcaaggatgttttacagggaaatcaaaagaatattatcatactttatctttcgtatgctgattagtaaacgatttttgacatttattttagaaagtcctataatgtggaagaaacaaacagttgctaccaaagattcttcaaataaacatacaaataaatgtgtatatttaatgttttattgttagcttctccagaaaattgatgcaaattctggtaataattcttgcattttttccccataacctggttaaaataaatacgccattggcaatacttcataatgtaatggaattgtttggggaacacttactgtaccctctcatcctttttccaccttactgtgttaacttagtgacatttaatgcccaatatgtatgaatagatctaagccatttaattttttttccttaaagattggagtattttataattcaaggagcatacaaaacaatggttgggaacatatgccaattatggaataggctatgtatttaatattaatctctgccattaggatatctactcactgtataaacctcagtaaaaatagtgaagacatgcatcatggaatgagaaaatgagaaaggaatgagttgtctaacatcacagtgggatctgttttttgtgaggttcatttctgaacacattaggcatatgagcagatttccagtgaatctatttatgtttattttctgagtttcaacgctgaccttttcttgcattattgtttcattttaatgatagtgttacttgtcccactgttgttttcattgagtttggatttatattttaaatgttcgaatgaaagtatgattgtaaaagggagtgaattggtttaaaaatatatgtatattttaaactttgttgtgtgtaggaaacatgaaggcatgttaattcaatataaatgacctttgatttcatggaatattaaagttggtttaaagtccaatagttaaaccttagcaaaaatagctttttacttcatcagttgctaagatttaatactttggattcatcaaagtgtgacatgggcttgtttgacttctgtaagtggcatttaagttccacattcttattacttgaggtactttatactaacataagacagtgagagttagaggtattacaagttgctagtttataatgtcttactaatgcagaaacaaggaaaaaagcaaaattggcctgaatattctcttggggaaagagggcaccaaagaaaagggtaagtgcatctgagggccaaaagagatgtataagccttttagcccattccccatgctgggcctgctcacagagccacaggaagatcattcagaaactaggaaaggaggcccccacagctgatcctgccacagcacacctgactcactcggctctgttagtgtaaccttttaaatgtagcaacacaaaccctttccctcttgtcagttcactcatcctttggtttctttttaatcacctgtgtctgggcacagacaatcacaataaatgcagccctttattactgttaaggatcatactgttggtttggagttggaagggtactactctgtgattcaggtgtgttgtacccatatttataattaggctttattatcttcctaaatcaaggaaaggaaatcatccccagaccatttatgctgagctttggaatactattttaaactggattgtacttaaataatgaagctctgcatagaggaactagtcagaagtggggaaaacactgtctaatttttatcagtctggtataaagtattgatctaagagaactctccctgtgccccttggtctttattctcaattaagaaaaacagtcacatgtcacgacaaaccaatcaatctttatgagatattcctgtatccataccccagcttgtttgcaatttataaacctccccttcaaaactaaggagttgcagaaaaaaatggatttcacagagccttgtgtccctaaagttctgtcccagtcagcagtctttatagtccaaacagattataaaaaatgttttccatttgaactttacagtttgcaaaagtgcttttatacattttctaatttcagaaacaggataatttgttaagtgggtttcagtttgctaatagggattttttgtgttttgttttttaattttcagcatctcttgaagaatcttgctacagccaaatggcatctcactttttaaagacgtttgcaattattagttgattcacagtacagaacaaggtataaaggaaaaaaccctgctaggtagtgttataattgctagattaaaaatagactagaacaggttcattttaagatttacttggaagagcaaagaaggaaaaattatatttttaaagaaagagaatattcaggctttatttctggtatgaagtttatattttttaaaaaaatcctatattatcacaccagagattttagattcttttctggttagaaacattgctggtagttggattatatttttattgtattcatttatcttagggggaacattgtaaagaaacaaaaaggtccagatgaatgtatgctagaaataaaagttgaaagattcttacttctttggagtatgaattcttatttaaagtgtttattcttcagctttatagtttccattatttctttgacaaatggtgaattggaaaatgtaaaaaaaatacccactttgactaaatgcatgagactacaaaaggaagatagtgtttaaattttttttttttcacacctgcaacctgataatttagcggtcatggatgggccatgtttttcattgcttatgtgatttactctaggagtattcttttcaaataccactttttaggttaatttttggaaatgatcagcaagattactatactcatcagctgatgaggggaagggggatgggttctgctgcatcccgagtgaagatgactgagaagctgtgtgcttggcctgctttagtatttactgctatcacagggcaggattggcttaggaactccctgtgagcagaccgactacagcctgtgaaccagagggcttcatgccaccgagcctcagaccacaggctactgccagtcagtgtccctgcccaatgaccggtcttgcctttgtaagttatcaatttggggcacatccaagctgtctgccttttctcctcattggtgctgtgcaaaggatcctggcttctctcagttctgtggctcccgcgatcctttctgcttaaaagttgcgtaagttatgaacacaggtgatacaggtgaagaggttcaagtctattaccattgtttttaagtgttcctatatttttaactgttttaagctttacacactttgaagcccacatgattcgcactcatcaagtatgtctttattgtgaacatgaagtggcccttttccatcttgcagtatattctattttttgaggcgagttctcgctgttgcccaggttggagtgcggcggtgctattttggctctctgcagcctcaaactcctgggctcagtcaattcaacctcctcagcctctttagtaactgggactacaagcacctgccaccatgcccagctaattttttttttgtggagatggaggtttcaccatgttccccaggctggccttgaactcctcagctcaagcgacccacctgccgcgacctcccaaagtgttaggattactaataggcatgagccattgcacccggctactgttttatatgactactcttgttttgtttttggatgcattagcaggttttctaacctaatgtgtgcacctgctttagttttagatgtttagatttagttacttgactcaaccttttttttttttttagtaatttaaaagggaagtttaacaattttggtaaaattaaatgatctgatatttttgtctgatacaaatattttatcctttctattttctatatctgtcattgcttggattatgtgttcttttatgtttcctagttgtttgaaatattgtttattacctataatttttgaaagcattaatattctttttttccttctcagccatatgttgtttcttaaaaagtaggggatgggctgggcccggtggctcacgcctataatcccagcactttgggaggccgaggtgggaggatcacctgaggccaggagttcgagaccagcctaagccaacatggtgaaaccctgtctctactaaaaatacaaaaaatgagccaggtgtggtggtgggcgcctgtaatcccagctactcaggaggctgaggcaggagaatcgcttgaacctgggaagcggagactgcagtgagctgagatcgcaccattgcactccagcctaggcaacaagaatgaaactctgtctgaaaaaaaaaaaaaaaggagggggatggggaagggaaaacttataaacagggtttaggctcataattgctaatgcactattatttttacattgtacatctcgattataattgttaatgtttgcatttttttattactcgatttataaaatatgtaaacatggtctattataacttggttatagctggtcctcttctcttgttcccttcttgggatgcttttgaacattcaggaggtttggtcttgccctctctcttagaccagtcttactctgcctccagcctgtgggcttctctgttgccagcaggtgccagtgattctggatgaggaactccctgaggggccagtgtcttctttttccactgaaccctggaagaagaggggtgcacaagaatggccccttcagccttcatcagcctcccacaatggactgggctgcataatgtgttctttttaaaagtagtatgttttttgaataggcaatacacggtataaatttcaaaaggtagaaaatggtgtatgatagtaagtgtccttcctgcccctgtcccttgacccagttttcttccttaagacagtctccactaccagggcgcacagggttcacattgtatttagacttaacagctcccagaagcaggtgtgttgtgaccctctgtggaaggcacacaatgaattgtgatagttgcatctaaaactggagttttattctttcatagagaccaaagactgtttttagctagagaattatttctaagttcagctacgcttgacattattaagaacagtaacatgtactgaatcgctgccaatttctaatcccactatgctttcatgttctttcaaaattatccaaggtatatatcataattttttataaagatttgcattttaggctgatatttaagtagtttttcagcaagaaacttgtaacattgaatcacagagaatagctatatctagaaagggaacagagcataaccacatttaattccttttgacaacgtcaggcagaataatggcctgtctatgtccgtgtcctgttccccagcacctgtgaatacgttaggctctttggcaaaggggaattaagattgctaatcatctgatttgaaaatagggagatgattttggattatcaggctgaatccgtgtgatttccgtttcctaaaagtggaaggaggagatggaaaaaggagaaaaggacagatggcagaatgaaaatgacttgacctaatgctgctggctaagaagatggggccatgagccacagaaagtgggcagcttctagaacctgggaaagggaaggaagattcacccctagatcctacagaaggaaggcctacacaggcctgtcagcaccttgacgtcagttctgtgagactaattttggacttcagacttccagaactgtaagataaatttgtgttgttttaagccactaagtttgtggtagtttattatcgtagcaacaggaaataaattatactcagtttggtttattagcaacttctttgttctgctccctgggttataccgagtatactgcatcctctagcttctctcatcagcaggaaggtgggaatttacaacacggtggtgactccacaaaggccacgtgggcccagcgttggctgcaccattccctttaatgaaagagtatttggttcctaaaggaagattcactttcttatttcttgtttcgtattttagggtctttatgttattccctttccataacagtgtcttttatcactattggggttttcagaaaggaaatacaatgtagatggaagtgaggcgactgcacaagggaaggcacttggaaacagaccacagtgctgtggaagagatatctgttgcctttttttccttgtaagtaatgtgttacaaaacttttaaccattagagttgaaatttttctccagcaaagatctgtctttactcaaattacctggtaatgtatgaactttttttaaaaaacagatttttttaagagcagttttaggtttaaagaaaatagaggagaaagcatagagttcccttataccccgcttaccccaccccctcacagtttctcctcttgttaacatcttgtattagtgtagctcactgattacaattgatgacccagtattcacacattattattaactaaagtacataatttatgttaaggctcatcttctgtgttgtacatctgtggattttgccaaatgcataatgtcatgtattcaccatcacagtctcatatagaatagtttcactgtcctaaaaatcccttgtgctctacctactcacccttctccccaacctggacaaccactgatcgttttattgtctgtatagttttgtcttttccagaatgtcatacagttagaatcatacaatatgtagccttttcagaccgccttcttggcatgtaagtttcctttgtgcctttttgtggtttcatagctcatttctttttagtgctgagtaatattccattgtatgagaatactggatatatcagtttggttatccatctaccttttgaaagacacacttgttgcttccagtttttggcatttatgaataaacattaatgtgcaggtttgtatggacataaaatttcaacttatttgggtgagaacctagaagcacaattcatggatcataaaagactatgttttgctttgtaagaagctgccaaactgtcttctaaggttgctgtaccattttgcattcccaccagcactgaatgagagttcctgtttctccacatcctcgctagcatttggtattgtcagatttttggattttagccattctaataggtgtgtagtggtatattactatttttaatgtgcaatttcttaatgatttatgacgttgagcatcttttcacatgcttatatgccatcttgtatctttggtgagacatctgttcaggacctctatccatttttgaattggattttctcattgaattttaatgcttttttggggtatattttaatgtagttcctttatcagatgtgttttgcaaatattttcttccagtttgtagagcaaaagctttttcacagagcaaaagtttttaatttaatgaagtcaaacttaccagttctttcatggctcgtgcttgtggtgttatatcaaatctatgtcaaaccctagattacctagcttttatcctatgttatattctggaaattttgtagttttgtgttttatatttatgtctatgatcatctcctttacttttgaaggataattttgccaaatacagaattctaggttggtgattattttctttcaacaccgtaaatatttcccttctcttcttacttgcattgtttgtgaagtctaatggaattcttatccttatttttctataggtaaggcaggtttttctctgctttctttcaagattttctctgtctttggttttctgcaagtttgaatatgatttgttaaagtgtagacttttctgtatttgtcctgattcgtgttctccaagcttcctggatctgtggttttgtatctgtcattaatcctggaaaattctaatccattattacttcaaatatttattcttctcctttctttcttcagcttctggtgttctctttgtgaatatattacatgttatgttattgtcccacagttgttggctattctgttccaatttttcattcttagcatttcagtttgggaagtttctcttgacatatcttcaagctcactgaatattttctcatctgtatctagtttaccagtgagcccatcaaaggcattcttcatttatattatagggcttttgatttctagtattttctttcatttctttcttagagtttcgagctgtctgctttcattactcatctgttcttgcatgctgtccacttttacattggaacccttagcatattaagtatagttatttaaaattcccagtcaaatagtatcaaaatcttttccatatgtaagtcttgttctgttgtttgcttatcttttcagagtgtttttcttgccttttaatgtgccttgtaatttactgttgaaaggcagatttgatatattggctaaaaggacctgaggtaaacagatctttaggataagggtttatgtttatctggctaagaacttggctgtgtttatcacttaccatagctgtagatgtctgagatttcagttttcttcagtgtcctcatttttgttttccctgttgtttttggttttccctagacattctttcttaaacagagcctcaggcttgcagttgtttcagctgtaatctctgttgtcacacaggagccttattgatgtggtgttgaggtgtgagggtagaagtgttctataatcctgtgatttggtctcaatctttcaaggagcctgtggccatggcctgtgaccctcacaagtgcttcccagcttttgttttactccttaggtgagacaggaagttagttaaagggggctggagttgggtacagttgtctctgtcagtatcagtaggtgcttgattccaggacttctcacaaataccaaagtgcatggatactcaagtccttgatataaaatggcatagtatttgcatataacctatgcacatcttcccatatactttaaattatctctagattacttataataccaaatacaatgtaaatgctatgtagttgttttactatattgtttagggaataatgacaagtaaagaaagtctgtacgtgttcagtagtgatacaattaaaaaaatttttttttggtctaacgttagttgaatttagggatgcaaaacctatggacacagagtggggactgtatttcctttcccctacattgtaaccagtatagtttcccttgagggcaagtggagaacagaatgctcagatggttactttccccttctgctggaagcatcaggggatttcccccaaattttcaccacgagaccctggtagggcttttgcaggtgaaactcatgaaaacatgggggcccctctgggcctgggccccaggagtttttaacacacagtctaggccccactcagcttccagcagtttgtccattacagtttttttcctcctagatcctggctccagtggcttcggctcctgcttctgtatttgtctgtttctccagtcttggggctatttgtttgccctgtgatctcaattctctggtggattaaaaaaagaattgttgattttcagtttgttcagctcttttttgttgtgaggatgaaggggtggttgctgagctcttcacatgtcagagcagaaccccagaagtccagatgagctttggatacaaatactcaagcctttagtaagcttggaggatttttcacttctcttccatgtgctctcgactgccttctggaatctctattgttacagatactagatctctccacatgttttctatctgtgtagcacataataaatgtttagtaatgttagctactattattttttacccattattttaatcttccacctttttcttgattggagaagtttcttgaaataatctaattcacaattcctttttctgcagcacttggtctgccacacactgtcaccaatgcattttaaaaagttagtccaagcttatggggtacatgtgacattttgatacatgtatataatgcattgtgatcaagccaggatattcagggtgcccatcacccaagaacaatacatttctgttaagcataaccaccttactctgcgatcaaacactgaatttattccatcttattctacgtttgtgccctttaccccacttcccttcttcttcttgcccccactcacccttcccagtctctgttgtctagtttttcactctttacctccaagtgatcaaatgttttagttcccacatttgagtgagaacatgtggtatctgtctttctgtgcctggcttatttcacttaagataatgacctccagttccatccgtgttgctaccaatgacataattgtatttgctttttatggctgaatgacattctactgtgtatatatatactacagtttctttactttatccattcatctattgataggtgcttaggttgattccataccttagctattgtggatagtgctgcataaacctgtgggtgcaggtgcccctttggtattttgatattttttcctttgagtagatactcaatagaggaattactggatcaagtggcaattctagttttagtttaaaaaaaaaaactaaaaaccatttttttgaattaactctttaatactaaagatttttaaattgcttatagatataatttttttgcaatttactttttttcttttacattctcaacatagcaaaatactgtaagaatgattagggactgacatttttaataaaatcatcactaagttttacttctcaatatactctttttttatagagaatgttgttatatgtccaaccactgatttttggttcttgtgaagtgctttcttttgtggatagttgttcaatttggtgttcctgcagaggggatgatggctggaggcttctatttggccaccttgctccatctctcctattttaggctttttgataaatctctgtgcagttttccatagtggctgtactagtctacattcccagcaacactgtataagagttcccttttcttcggatcctcaccaacacctgttatttttgtctttttaatagtagcattctgactgggtaagatgacatctcattgtggttgtgatttgtatttctctgatgattagtgatgttgagcattccaaaacattttcaaatatggccatgatattttatgatttggtacaatctttactgatctcacattttcccctgtagatagtagctgcttgatttcactgatatcatggtagccactcttttttatataatcgttgttagttgaaaattagccccctgttcctgcaaggattccccctccccatttcctttagatgttacgtaacctgagctagaaataatgcagcgctgttagaatttagcaaaacaactctaggatgtgtgtttacgcagaatgtatgccataccagcccccacagtcaacccccataaaccaccccagcgtatgagctcagggctgcctcctctgcctgtcaaggagcagcccagcaggtcagtaaactcacttgcttgactttgggtctactggtcctttctcttggctgactttacaatagtgactcgctcaacatcaactatgtatttgcacttgctagttctaagcactggtgagtgtttgaataattcattttgtttttacttttcagagacagtctcactctgttgcccaggctggagagcagtgacatgattatagctcactacagcctcgatcttctgggctcaaaaacatcctcccacctcagcctcccaagtagctgggaatacaggtgtgtgccacttcacctggctaattttcaatttttgtttttgtagagatgggggtctaactattttgcccaggctgatcttgaactcctggcctcaagtgatcctcctgccttggcctcccaaagtgctgggattacaggtgtgaacccccaaaatatgagccaggtctgagttaatttagaaagtttattttgccaaggttgaggacatgtgcttgtgacacagctttaggaggttctgacgacacgtgcccaaagtggtcagagcacagttcggtttatacattttaaggagacatgagacatcaattaacatatataagatgaacattggtttggtctggaaagggggacaacttgaagcaaaggtaggaagactcaagccgggagggggcttccaggtcataggtagataagagacaaatggttgcgttcttctgagtttccgattagcctctccaaaggaggcaatcagatgcgcatttatctcagtgagcagaaggttgacttttaatagaatgggagacaggttggccctaagcagttcccagcttgacttttccctttagcttagtaattttggagccccaagatttccaagattttcctttcacacaggcatgagccaccatgcccagccagtagtaattcattgaagtttcatatgaaccctatgaaaatggtattttttcattcatattcattgaaaacagaggagtcagcttcattgtagagaagctgagcaacttgtccaaggccacatggctgccaagtagctgagctggggctcaggtttctttcaccctgttgcctctcatctgaactgctccaacaagtgtagcttcctcttgactgctgctcttgcctctgccgctgaaaacagctaatgtttatagagcgcttgtcatgttacaggtcctcttctaagaatttaaagtccattaacttattttagctgagcaccacttgtgaggtggccactgatttgatctctcattttacaggagaggaagaaacaaggcacaggggagcttgagtacctgggactggcctgtgatgaagctgggatctcactgcagttagatgttagttttcaaagtttctcctgtttcatggagttttgttttgtagaaagacttttgttctcattccttcattttttttttcttcccagtcattcaaaactatatgttgagagactacttactcttctaggtgctggggattaaactgtgcctgggaatttgcattccagaagagaaggatattgaactagaaggataggtttgcaagtgaatactgtattaagatgtgaatttgtgggtggcagtgctcttgtatttgtccctgttttcatctccagccaggtggctaaacccgttgcatattcctgcccctgggattgtttgttgggttggagggtgggtgggagcagaagctggggtctctggcaggagtcaaagggagtggtaacatttcagaggggatgaggttttggtttaggagatcacagcattcccagaggtatcatgcttcaaacgcagtggagcttccacatctgaagggacagcgaggccaggcagcagcccagggagtgcctggcaacccctggggtatttgtgtggggaaccagtaattactgagacggaatttctcagcaccctgaggaatgagcttctgaggcagaaacaaattcaatcaatcaatcaatcaatcaatcaatcaatcagtgaatatttcttgtgtccctggattggtgggcttcaattcacatccacccaccacatttggtccatctctggaatggcaaagaatatttacatcacacacaactgcaccccatggtctgatgatgacgcccattggagatttgctgagcagaaataaggctctcagaagccgctgttgggaaggggatgaagacgaagctgagtttgaagagcagcctgaatgctctcacccactggtcagatgtgagggtcaccagaatggagaggaggtaaatcacttattccacagtgttgagattcttccgtctttctttctttctttttttttttttttcttatttcccaggcaaaataccctatgactgagagagaagaacctgaatcctggcattcaagaatattcctacagtggcccagcctggtcatgccatgtaaggcctaggccaatgcattgccccacctgtggggaaggctgttttgtcatggtggaaatgaacccactggaaacaatgggtgttttggggagaatgaagctcccacttggccccagtagaagagcattcgagtcttgctggggcccatttctgagatgcaccagaagttaatcaactttttagtgtcagaagacgcttatttgatccctggggcccatttttgagatgcaccagatcagaggctgagaaactgcagagctcagtgacatcacaagggtgaggccctcgggccccagggctttcagagcacaggaaggttcagtgctgagtctgactactcagagctccagagtaggctttcttgatgctgcaaccatcaccagcacacagtgggctgccgaaaagtgtctgcacctacccagtgaggacagggtgcaggggctcgtcctcagtgctagacttcacaagccagggctgtgtcttcagaaccggtgtggacaaacctgagtggcatatcccattccaagctctatctgacagaccctcaccctcacacctgctcccaaccacagacgctgtaaaggctgggtactaacgggtgacggaaaccagtcaaagagaaaagctgattttggtggctcgcacccaggccttgctgttcaggccagcacatgctgacatgtcaccaaagctaattatcctgaaggaccctcccaaactcctgggaaatgggcttttgattctgggtcccaagagtgagggtctaccctctgccctttgtgggaggcgggggcctaccggtggggggcacggtgaggttagccaggcataccgtccttggggattggtcctgacaaggccactgggacatgtggggagacatgggacatttcacagggtgttcagccatcaagaaatcttgcagttgatgttaatggctgaggagtgcttgggggcaggaatccagggtgggcctaagagtagttggtagtacaccactggtgctccttcctaggggagactgctgccctctctgtgtgtgctttcatgtggagtggggaaggtggtgcttgtgccggctgggcagtggagcatttcagacaaagaggcatgtgttgaggggttcagaggtgagaaggggcagcaggcaggagacctcaattaaatgtaaaaagcctcaagaaattgtaagcacaggagagcagtggtcagatgagggttagatagctcagcagggagaaggagtacatttggacttgatgcggaattccttggcagattagaggcttatagagaggggtctgggtgctccatccagggcgtcctttgtgggccatgggtgctgtgctgtgggagtcactatctgtggctgtggggccttcaactgaccttcagtcttgcctactcgctgcctctcccagaggcacggatacaacagggagcctccctgtggactggcttttctccccaagccgtggggacccatggggtcttctgggaggcagtggtggcctcaccaccaagcagccgtatgactctgggcaagacttttgcatctaagcctccattgcctcactgttgaaatgagagtaataatcccttcttgagagtggtagaaagctgaacagactggccctggtaggtgctcagacacttggctgttttaattattcctagtacaggcaaacctgcccccaccaccccacgcttgtggagactttgctgggtttattggccctcctctgcccccagtcctctctacactttattttgctgaaattcacttcaacagggggatgttcagccaagacaggacagaagctggtgctcctgacttttttggatttgcttcagctggatacaatgttttgggttgaccatttaattcagatttcctagttctcacacaccttggaggatttttccccggaaatactacgaaagtggtaacttcgcctcgtgtagagagactgctcaatgaataaattaagctagattagaacagctgggtttcaccaagcccaaggggcccaggaacagaattcaaaggatcagtgaactagagggccaggcatggtggctcacacctgtaatcccagcactttgggaggccgaggcttcaacagctcaatgaactagaatgggagattagagcttaacttttgaaatttagaatttccttcagttataaatagcaacaaaccaacctttgtagtattaccagaaactgagactttatttctagaaatctcagcttttcacatattgttacagctgccactgatttctcaaaatgtcatttatgcccatcataaaggagcatatcatgaatttatggtaattagacctgccactaggtcttgttatttactgtgttaaaaaagaacatctatctgcatagcccccacttgtttcataattggataaattaattgaaatgcaattagttttctttgtaattatgaatttcggaagaagtccataggcttcttctgacactaaaaaattgataaacttctagacattggagaactggaaggataaagtggcaattcccagtttagccacaagagggaactatttcacaacttatgtttagaaagatcatagctgggatttttcttatttcctcttaactcgttctaaaattggttcgaattttcttctttactgttagcagtgtaattggggtgctgtgatgaggctctgtagcggataccccgccaagagctgaagcatccctgtctcatgaacccaggaagacgtgatatgaaaaagtgagtctcccaggcactagatgagaatgccaagtttagtgccccagcttgtttgctgtcttccccctgccccctgaaaccttgtagagcagagacgatacctccttttttattctcataggaacagttccttcttcaggttagaaacacagctgaaggttttccacgaatacagtggctgttagaagaatgtgttgtttgtgtgtatgtgtgggaagggggcagaggcagggttggcgtgggagggagggaaatgagagctttagaggtggagagaggctgtgatcctataataaaaacccgaggacctggccaggccttccacttggttatgcagtggttgcccctagggctgattttaatgggaacaatttcacacgttcccttgtcgtttggccacatcagcacttaggtcaccgtatatatttaagtgcacagaattgaggtcttagagtgtctaattgcaaagggcggcagccactttcacaagtcagcatcctacggaggagtagctctgcagtccctcacttgccctgaagtaggtcaggctggagtaaatgcagcagatgtccacgtgggcgcagtcgcggccacagaacacagttctgagttcaaacctacttgtgactccaaaattaacatttgttacactgtctgcctctctggcctttagggattgttgcctgttttttttgtcccccaatgttagttatgagcaacattgaacaactcactgttgaaagcagggctttacaggctccatcctaaatgctggggccaggagagaaccagccgtaagtgctgtggatccctagagctcacaggatgcttggcacgtgttgggtaaatacaacccctctgaatacggtcctttcaggtgtgtctaccgtgtgaccagcaagttgttgatcttctctgagccgcagtttcctcatacataaaacgggaattcttttacctcaggagattgtggtgagaagtaaggaaacagatagtatacacagttagcaccgtgcctggccattgttactgaggatcacagctttgttccttaagcatatggtgtgcatgggacagacaaatagtagccaagagcatgggctgctggtgcatcctgcctcactttatggcactggtgctgccaataacctggtgaacttaataactgctcttcattaaagtgccaggatttattttgtgagatgacagtgtgacaagttggtgcagagcatgggccctggagctggatggcctgggctaagtcccagatatgacttatggctgcaagactttaaacaagttccttagtgtctctgtctttagtttcccatctttagagtagggaccataatggtactttctgcataaagttattatgagttaatgcatgaaaagcactaagaatggtccccggcacattagcaattactcaaaattatgagctattattattactgttattgtcctagacaacttgctaaacattctctgatgacaaatttcaagagttgtgtgaatcttctagacagtctagaccagtggtctcatgcttctggaacctgtttcctcaacatgctagggtagtggggtgaggatgggatgggaatggatgaacctgggtggtacggtggtgggggtgatggtggaggtagttgatcagtggcagtgggactgtggtggtaccacggtggtggagtgatggttgggtgaaggtcgggtggtgtgatgatgcctgggtggttgtagtgaggtagttgttggtgctgtggttgtttctggggtaatggtggtgttggtggaatgatgtgtactggtggtcgtgggtagtcatcattggtggggtgacgtgaggtggtggagtgggtgatggagtgatggtcaggtggtgttggtggaatgatgtggactgggggtggtgcatagttggtacggtggggtggttggtgttggtggagtggtaggtcggttggggtggctgtttgtgatggtggtggagtgatggacaggtagtgttggtgttgttgatggaatgataatgaagggttggtggagtgatgaggaggtagctgttggtagtgtaggttggaaaatgatgatggaatagttggttggtggtggtgatggagccgtaggggcagcagttggtggtggcaggctctggcagtggtgacaagataggaggagcagcgcttctctctgactccttggaggccatccttgctgtgaccaccatggtagtgccaacttcaagaactaggtttgtgcctgattctagctctgcaggactcctggctattctcccagagggccctggtgcttcctccgcctgggtcagtcctgggtgtgctggaattctaagctgcaagatcaatttctgcttgtggtctcagaacttgtttcatttatttatggacatgcccacacttgattttatagtcttgcctcatactccattttttttctttgagaaaccacaggcactttaaagatattgtacaaatatttcttataacaactttttgatgctggggtcaggtaacagaaccttgctttataggtgacaaaattgaggtgattctccaggttacatgtttcttaaaccattgagaagtgacatctcgtttacaacccttcctgtggctggtagaattaatttttgttggaaaaaaaggtcattttgttatatttaaacctcccctcaactatgaaaaaagagagctgtttcttttcttttttcagagagcccactgggcgccttgttcctgtgtatttgtccatgaccctaattctttactgacgtgagcgaggtaccaggagtgggggctgcagagtgaggacacgggagtggacgtaaagttttcatttgaagcttcagtgaatggggtctgtacaacccttgtcatccaagggagccattttggagagaaaaaacaaaacaaaacaaaaaaacttctgttatttttgaccacttaaaaaatatttgcttcacatttggtaaaactgagaaaaatcacattttccttagtgaaagcagctgcagtttcttccatagcacctttgaagatgggatgggaggggagccagggatggtgcactgttggtgcatgggccagggcaagtgcaggttgcctttaagcagatgtgttttaactgaaaaaggaataaaagggtacacttcaggacatacttatccccaaaaggctgcttcctaaaaatgctaattgtgcatgttaaacagaaaccataggctcctgacagcctcacagagtcctgtttgtggatgttttatggaggtgatttaaaccctaggactcttcctttcttccctctcgtgaaggatcttggtgttaccaactcattagctcgtgttcctgttatttgcctgcagttgcagtcctctgctttcaataaacgggcctagcactgtcaggggatgttgaagtcacggaggtggccacactggataatcaacagtgatgacaactttgcaaatttaagaacagcacacgaggcagaaatgagaagccgcatgaagtgctgatgaagagcaactttctaatatcctcctcctgtggttccacatgagatgtgagctgtgaaggaaagagagttatgaaccaattggtgctttgaattgagattctcagagtccacccatgctgctttgtgtggagtcttggggcatttattcaacaaagacatcctggggacctactctgtgccggaccctgggctaggtgctggaaggaagtgataaggaagacagggaccctgtcattggtgaataaacagtcacaggggagagatgtagacagacatggataccaggaaatgcaatatggagtgagaagtgttgtaacagagtgttgttccaaaaaggattcaaggaagctggaagtgtgcacaggtaacacaggaatacatgagagagaagttttgctctgctggattgaagatcagagtggaaaagattgtcaatggccacctgccaaaggccaccagggaaacacctgcagtcataatttgctacaccaaaagagagtgaatgccacagagaaccgtggatgtgtggataagagggagttagtggggcttactggaggatttggtcatgtgtttggtgatttggggaagagtacaatgaagctgggctctgttctggattggtgctgtcagaaagtggggcaatttggtgagtgagcatcttacactagtactagtgtactaatactggggttagaggtatcactggaaaagaagcagcagcatctcatgttagcctagggagagggaggtttggtcactcttgtgattgcacagggtctttgtttttacctctgttcaggtctgatcatggagcagccatctgctcctgaagttctttctgaagtctttctgaagttctcaactgctactgatattctctgaaagattttgtgttcatcaggggacaacacagtctagcaggtagagatgaggccagctaccagctgaaaactctcaaggctgcttccccatcacccctccacctctgggcactgaaggatgagtaggagtttcccagatcggaaggtcaaaaagggatgggcatatgaggcaagaaggcatatctggagtaggcctggggaggtaccgagtatcccagtaggctgagggacaccagaagtaaggacgtgggtgagaaccagggggtgtaagcccaaggagtcagacagggccctatggtgggggcctctggggcttgctaaggagcttagatggaatcctctggccatattaatctgagtgctcaactcagagcgggtgatcagcagatgtttattgaattggaatatcggttaatgaattggacctctttttccttgcaaaccccaccctcatgcacccaatatagtgccatcaaagacaagaagaaaagctacatgaggaagggatatccttctaggagtccagatgtcctgcccttacagtagcttttggaatactatagtcacagagctgacagggttcttagggtacatttggtctgcctctctgcttttacaaaagggcacctgaagcaagatgcgacaaagtgcttgcttaatgcttcacagcagattgtgaaagaatgaggacttgaactcacatcccttgcttccttgtttctgcccttttcactacagcaacacttgtccttgtcatctataactttcccagattagttcttctataaccctagtgaaccctgggcctccacatggctcagtctctgcagagttctccatatacaaaaacaaaacaaaattcagcagccagaagtacttgagaaggaattccatttgctgcatgactctgttgaacttcgaggggataagagtcaccagccacagttccacttttcaaggacccttgcctctactcctcagctcctccggatggtctcttgtgccagcacccaagctgctcctgtaaccacaatccagagctgatttttctcttgcttcttccttcctcatctagttctttattaaagagattgacctggcctctctgcgcatatcctccctaccttcttcctgtctctcaggactcatctcccctcttttatctgccagtgttgtgtctggcagtatgttacagaaacctcattacagtggctaaaataagtaagagatttataatctctccccagacaagaagtccataggcagatgctccacagctgtgccagaagctcttcctggttttctgctctgccagttagggtggatggtttgcttcatctcacagatggctgctgcacctttgggcgtcatgcttacattccaggttagaagagggggaatggccaaaagcaaaagatatgtgcctgctgaatggtctctttacatcagaaaaacaattgattttctggaagccccagccggtagaattctccctacactcattggccagagacggtcacatggccattgctagctacaagggagccttggaaataaggccctgaatagataagggaagaatggatattgtgtaagaagctagcaatgtctgccatactcatcttataacttttgcatcacaaaaatctgggagctgacttggcaaaaacagggtttctttccatgttgggttggggaataggagtttattaagcaaagttatttacagatgaataaatattagcctaaatgagtatgattgattctagagcacattgattttgttttcatgttgcaaatttttagcctttaaaaatagaaatttaaatgggcatttaggacatattgcctataggaagctaaacactttttcttaatgcattatattcaagattagggctttgctctgagattcccaattccaggaagaaaagtttctaaatacattctacttggaaaaattatagttgttttctcttgtgcactaaaataaaatcagtacagagaaaaaaaccccaccaagcttttggtactacaatttcaattctcatctttgtcaatgtgcacataggcatttagtgttattataatgaatgcatatcagttgattgtaatctgttcttttccatttaatattattttatagcatgattttataaacatacagttcatatagttatttttagtaactatatattttgagatatcataattggcttagtcatgctcctttgaccagtggtaatttcaaaaatatttaacaactgatattcatattgatcaatcagaacactctaggctatagaaacagagtatgtcctggaggtctctgtaggacctgacattaattcatttgttgctggattgtagggtagattgttggtggttgggaggttgggtagggaatatttactaactgatatggaagaaatgtaactattttcttaattaaaattctttttttgtagaggtgggagtcttgctaggttgctcaagctggtctcaaactcctgcctcaagcgatcttcctgccacaattcattttcatctatttatctattttatagagacagggtctcaccatgttgtccaggctggtctcaaactcctgggctcaagccatcctcccgccttgacctcccaaagtgctggaacaggttcgagcccctgtgcctggcccctgcaacaatttaataaccggttttataagttagttttggctgtgtaacaaaccattctaaaacagagtgacttaaaagaaacaatccatttagcccataattctgtgggtttgtaatttttaaaaattaatatagtttttaaaatttcaatagcttttggggtgtaagtggttttttgttacacagatgaattacatagcggtgaagtctgagattttagtgcacccttcgcctgagtagtgaacattgtacccaatgtgtagtttatttatccctcactgtgccccaccctctctcttctgagtctccaaagtccattatctcactctgtatgtcttcacatactcatagcttagttcccacttataagtgagagcgtatggtatttggttttccattcttgagttacttcactgaaaataatggcctcctctcctttgtagccagtgggccaggaaagaagaaaaaataatggtccccagctctatccaagttgctgcaaaagacattattttgtgcttttttatagctgagtagttttccatggtgtgtatgtatatcacattttctttatcattgttcgatggtcacttacactgattgatttctttgcgactgtgagttggctgcaataaacatacacatgcaagtgtctttttgacataatgacttcttttcctttgcatagatacccagtagtgggattgctagattgaatggtagttctacttttagttatttaaggaatcttcatactgttttgcatacaggttttactaatttacattctcaccagcagtatgtgagtgttccctttttaccacacccataccaacgtctattgtttttttttttcattttagtaatggccattcttgcaggagtaaggtggtatctctctgtggttttaatttgcatttccctgatcttcctttgagaaacgcctattcatgtcatttgcccacttttcgatgggattattcatttttttcttgctgatttgtttgagttcctagtagattcttggtattagtcctttgtcgagtgcatagtttgcaaatattttctcccattctgtgggttgtctgtttactctgattattccttttgctgtacagaggctttttagtttaattaggtgccatttatttagttttgttttagttgcatttgcttttagggtcctagtcattaattttttgcctaggccaatgcccagaagagtttttcctaggttatcttctggaatttttgtggtttcaggtctttgatttaaatagttctttgctccatcttgagttgatttttgggtaaggtgagagataggcatccagtttcatcttctacatgtggctggcccgttttcccagcaccatttattaatttatttaatttaccattttattataaaagatattgcaaaggatacagatgaagagaagcataggatgaagtataggggaagggatttggagcttccatgctctccttgggtgggccctgctccaggaacttccttatgttcgctctccagaagctcactgaaccctcttgagtcctcttgagtttttatggaagcttcattacatcagtattcctttgccccaggggatagtgtgcgaccctctcatgggagagtctaaacatccacaatcagaaaggtggagaacattagagtcctaccttggggcaggtgaaaggagggcgggagaaggtcagaggcctaacacacccagcattataacaaaagactgcaacaagggttatgggagttatgagccagaactgtggatgaaaatcaatatatatcataacaccacaggccactcctgatttttaaccacggatcctttacatctatctatctatctattatctatctatctatctatctatctatctatctatctctgtatacacaatcattaataactagttcagtctatcatattgtatgaatgtctcccaggatgaggccactcacatttgtaggtttcctcacaatcttttcaggttccaaaagcaggagtggccttggtaaatatacagcttcacccttacaggtatctggaataatgagctaagagacaatgtcatcttttgctctgagactcttgggtcgttaatgtaatattgaattttcctcaattaataacccacttatttatttctttactcttagctactatttctctttctttccattaatacccaaactttttcatctttggaaggggcattagaatcaccagtgctatttattaaacagagtgtcctttccccaatttatgattttgtgtgctttgtcaaagatcagttggttgtaaagtatttggctttatttctgggttctcgattctgttccactggcctatgtgtctactttttgtaccagtaccatgctcttttggtgactacagccttgtagtataatttgaattccagtaatgtgatgccttcagatttgttcttcatgcttatgatttctttggctacttgggctcttttttggttttatatgatttttaggatttttttttctaattctgtgaaaaacgatgttggtattttgataggaattgcattgaatctgtagattgctttgggcagtatgatcattttcatggtattgattcttctaatccgtgagcatggggtgtgttttcatttgtttgtgccatccatgatttattttagcagtattttgttgttctccttgtagagatatttcacctctttggttaagtatattcctaggtattttgttttattttgcagctgttgtaaaagggattgagttcttgatttcattctcaacttgtttgttgttggtgtatagcagtgctactgatttgtgcgcactgattttataacctgagactttactgaattcatctatcaaatctgggagtcttttggcggggtccttagggttttctaggtatatgaccatatcactggggaagagtgatagtctgacttcctctcttgcaatttggatgtcctttatttctttctcttgtttaattgctctggctaagactttcagtatatgttgaatagaagtggtgaaagtgggcatccttgtcttgtcccagttgttggggtatgctttcaaaatttccccattcagtatgatgttggctgtgggtttgtcatatatgacttttactattttgaggtaagtcccttctatgcctagtttgttgagggtttttttaaaaaaatcataatgggatgttggattttattgaatacttttctgtatttattgaggtgattatttggtttttgtttttaattctgtttatgtgatgtatcacatttattgacttgcatgtgttaaactatccctgcatccctggggtgaaactgtgggttggcaatttgtgctggcatcagctaggtgattcttatggccttgactagcatcaatcatgtgtctgtggtctgctgctgatcagttaggcaatctgcttctggatcttgcaaggtcaattggagtgatggggataactcgccacaggtatttcatccaccagaaggccagcttaggcttttcttatggtaggacagagttccaagaaaacaagcaaaaacatgcaaggatccccgaggcctgtgctcgaaactggcaaaaatgtctcttctgccatacttcattggccaaagctagtcccagggtcagacccaaacgacagacacagattctgcttctggatggaaggatgtgcaaagtcacattgaaaagaggtgttgatatagggaggagaataatttgggctatttttgcaaaaaaatctgccatgctgtcgcataccagggtggctggctgactattggctctgttgcaaattaagcatttataatttgcatttttcgacattatgtatagcagtttcatgaacatcatattcttcttgaagactgccattcctggcattagaaaaatacttactaatggaacaggtttagaagacctttagtcattcaggaaccatttattcagcacccctctgcactaactgaagagacagcataagcagcagatatatttgtttggagtctagaagggaagatacacagcagtgaacagcacaatgtggaatgtggtttctgttttggtcatagtgtgtgtgaaggggtttgggagcaaagggagggactacccagagggacgggtgtgggtaaggaaagtgtagtttagtgtgtgtgtgtgtgtgtgtgtgtgtgtgtgtgtgtctgtgtcttgtgtaaagcaaggcttccagtactaatggcaaagtttagttttgaaaaatgagttagtcaaggaatgtggtgagcagtgaatttcaggaaccacaaggtatttcatcccagataatgaggttagagagcaagccacagtgagatggcagtgaaaagcagggcagggtcccaaattccttcagcctgttcttgttggaggcaatgcagggtcactgacaggtacacatttcattgtgtagggttggtgctgaagacaggggccccatccagtgcaggctgtttgactccttgcagtaagtacttttctaatgccaagaatggtaaagtcatctggttccggggcaagaacctggaaccagagaagggatttcttttcttactgaacacagcttggttatctgtgaagtcacactagaagaaataaacttggtcttacctcacatttttcactaaaataagttccaggtagatcaaagatttgggcatttaaaaagtaaagtcataaaatattagtagaaaatagaattattttaatctcaaaatgggcaagacttttctaagaactatacaaacccagatatcatagtaaatgagattgatgcatttgactacataaaacaaaaatggaaattaaaaaaaacacctgagttgcaaaaaacaccatatggaaagtaaaaaaaccccaacaaattaggaaaaaatatttgtaatgtggtggccttgctatcagttatttagttttccaaacattattttgttgaaaaaaaaaaaccatttcttactgacttaaagtgtaaccctgaccatatgtgatgtgtttatctatttatgcagactcacatgggcctctttgtgggctttacattctgttcctttcatgtatttattctttcatgtgtcctgccctattattttaattactataatatggtaacatatcataatgtctcaaattgctttttaaaatgagatgtttgttgaaaagctttctttgcccatgtaaaggatttttctatttaagaatatggtataccttcttattagtacaggtcttttttttatacatcctttaggggtaatttaaacttttcttcacacagattttgcacatcttaagtttatttctatgtattttatcatttttggttattacaaatgagatgttttcctctatgttaccttctaactggctattaagctctccatattaattttctatccctctaacctacaaaatgttttattgtttacaatagattttcatcttattctcttggacttttattggttaataatcatatcagtaacaagtactcctatctttgtcttcacttttaattttttttgtactttatatttccatctattgttgacttcattggatagaatttccagaattatgttaaataataagggcaatggtggacattcttctctttttcttgactttaatgagagtgcgtcttgtgttttcccattaaatatgaggctggtttaaagactgagatacatatatctatcacatcaacaaagcatctgtcattagcagtgtctgctacaaccaactgcttacggtagctaagtatctgcttttttttctatgtggaacataataattcctgccccaaggggagttccatttaggtcctgcctctgaccaaaggccagttctgcccatgaagtccaaataggcttcctttggtttattattattattattattattttagagacagggtcttggtctgtcacctaggtcagagtgcagtggtgtgatcatggctcactggagcctcatactcctgggctccagtgatcctcctgcctcagcctcccaagtagttaggactacaggcacaccaccatgcctggctaatttttacattttttttttgtacagacagggtctcactgtgttgtacaggctggtctcgaactcttggcctcaagcaatcctcctgccttggccttccaaaactctaagattataggtgtgagccactgtcttggtctggtggtctttaaactaaaagaaaagttatttagtcacaacacagctgacatacagtcactcagtggacacaggataatcacaacagaaactcccatgctcaaaagggaaaatgggaaatgctgtagacgttggtccatggcagagattacagtgagctctaatggcaaagattcccttttctggctgtagaacacatttcatggtggggctacttggatctcctgtttctgttctctgggaaaaatgccctgttcattatctactggtgtccctgcctctgcccaagggaactttcttccttgtcttttattgctcatggccataaaaatactgcactatcagtcaacttaggttttcagccacagacagaaagtacctctcttagcaaaattattttcccttccatctctgtttctgatgggctggctctagactgaggtcatctgtcttgtagagttgcatgaaagaaaacaaaaaagcagctaatgcccaccaaaactaagattttctcctaatgcttcagcctcctttggcaggttgtcttcaagataccacctgtgagggtttaactcacccatgagctttgtatggagtaagagtcaccagattatcagcctgtggtactgtatttcatgtaagatgttagtaattgttagacacatcttactcaaaaatgttaacatataaaaaaaaggcctatgacaattgtcagatgctcttagctttaggatgcagatcactttcagagatgtaagaatgtgcaaaaatgtgcagcttagacaagtacccatgtctacgtctttgccgtctgctgtctccctaattgtactggataatatcactttttaggctttgtaacttgaagcttcctacctgtgcataccaaattctgtttacattaaggttcattgttgttctgctctcttcaatgttcagtttccacttgtggtccaagatggctgctccagcaccaggagctgtgccactttcccaccagcaggaaggagggaagggactaaaatggacattctctcctcttttaagtatatgtccaggaagttgtgcatgccatttctgcctatatcccattgtctagaagttagttacatggttacacttagctaggagaataccatttttattctaggcagccaagtgtccacatagtattcaggtacttaattactatgcaaggaaaggatgcatattggaaacacctaacagtttctacaggtctctgaaatagtcctatttttattaaatgaaattgtcctcaagaagatatatagttttgttagatgctttttgaacatctctggaggtggttaaactattttttgaattattttaatagattacttaatattgaaccatctttgctttcctggaataaactccacttggccaggtagtattaatttttaaatttgtttctggattctgtttgctaatatttaagagtttttgcaatgatatttataaggaggattggctcatttttgtttctttgtttttggtgcatccatgctctgctctgctctgtctgtacagctgtaattcttctaggcatgaaaggggtgcgcctctcactggagctaaggcctgttataatcttgagtttgcacagtgtctaggatgtggggatggcaccttttagtctctgtggcctctccatcctgtggtgtccaggagccctttcttaggacctgtgtggaatctgtcactttcagccttgtgttataggcttctatgtctgtcttctattctctgctggctcaagcctcctgtgaccagtcactccttcctcatacacagagtgagcactctttcactaccaggtactgaagtcacagggtgggaggggcctagtgctgtgctacaggatttcccagtctggaagggagaggctttttatggaaacagatctgtgacatgggaatgagtgtcatggatgattctacaacgtgttggggctcagagacctgggagatgctgctatgaggtgttgatgaacgagttgagtcttgaagcaagattaagagtgcctgacagaaatccaatcagtgctcaataaatatttggtgagtgaatatatgaagatattctgctaggcagataagacaagggaaggaaaaacatgtgagaagatggccgggtacggtggctcatgcctgtaatctcagcactttgggaggccgaggtgggcggatcacttgaggtcaggagtttgagaccagcctggccaacatggtgaaaccccatttctactaaagatacaaaaattagccgggcgtggtggcgtgcacatgtaatcttagctattcaggaggctgaggcgggagaattgtttgaacctgggaggcggaggctgcagtgagccaagattgtgccactgcactccagcctgggcaacacagtgagactccatctcaaacaacaacaacaacaacaacaacaacaaaaaccaaaaaacttgtgagaagacatgagagaaagacccaatatgttcaggtgtgatgaagtattcagggctgttggagcacagggagtgggatggagtgaaatgaagcttgacagtcaaacaccttggatgtggagtgtgggttctagtttaaagactaggagtgaccagatgtctctttttaagatgggcaggacgtgatcagatttgaggtctgaacttgaatctaatttaacttattttttcttttttattgacacataacatacataaaatgtgcaaagtacattaatcttaagtgcacagtttgataaacttttttatagatacacctgtggaatcaccacccatatcaaagatgtagaacatttccagctccctgggagtttctcttgtgacccttcctagtcaataacttctcttatctccactgttttgacttccatcatcatggactagttttgcctgttcttgaatttcctataagtagaagcatacagcatgttctcttttgtatctggcttccttaactcatcatgtctatgaaattcattcatgttcttctatgtatcaacagtttgcatgtttttattgctgtatgatttaattttaattccacaatgccagtataatgctagtgaccccaatattgtaaatacccaatgaatattagctgaaaaaatgaatgaatgagggaatgaatggatgaaatctttctattcatttctattaaaagaagcccttaacaatgagaatttatctatattcatggttgcttttttcctcccaatttttgtgattatcattcatgccacttctacttgcaggggcaaaatttatggagatgacactctctagggttgtacctggcttccatgagacttgagttttgcagatcacttggtgtcctctcctgagtcctgcctcctggggcctgatttccctggagttgtgattaggtgggttggagtcctgcttattggagtcctgcttcctggggcctgatttccctggagttgtgatcaggcaggttctgatgagccacctctgcactcacatgccctgttcttacacttggagggcccattggtgggttccacagcaggggtgactcttcagaacctggatggctctccttctaggtcctttcccagctattggcctacaaccagcctcagagctctcagtttccctactagctgagtgaggtatgtgagggaggaaggctgctaatcatgcacatgtgcatacgcccaaagcatggcccccgctgactctgcacttctatctgaaactgccatattcctctgcctttgtgtgacaatatcaaaggctcatgctagaatgcaaaggtgttatgacgacagtggcagtgactagatcctatagtcatttttatatttacagttgtcttcatgtaataacaactactgctctccaggcgccatctggccttatctgtctctccagactcaacttgagcctatcactgtcttccctgggctctgctctttctcagcacggggactttacacataccgtttcccgtaaaatgctcctaattctgtccttccccattcccctccgtctttgtcaggcattattacttcctgcttctgcatcagatgcattccatctgttgaatcttcaaggagcaagccctctgcaaaaccccagcctcacacccagtctgggcctcttgtcctgtagtgcaggccccaacgccatcactctggatattgtaacagctatcacagagcataattaagcttttgcttccaacatccctcgattcaaatccggctccatcaccagtgtgtaaaccccacaagagacaacagggaccatgtctgctttgcctcctgtgagcctagcgcctagtatgggtatggaacttggcatgtagtgggtgttcaatacatttttatttatttgtttgtttatttatttatttattttttgagacaaagtcttgctctgctacctaacctggagtgcagtggcatgatctcggctcactgcaaactacccctcctgggttcaagtgattctcctgcctcagcctcccaagtagctgggattacaggcacccaccatcacgcctggctaatttttgtatttttagtagagacggggtttcaccatgttggccaggctagtcttgaactcctgacctcaagtcatccacctgccttggcctcccaaaatgctgggattacaggcgtgagccccagtgcccggctcaatacatttttaaaacatgaataaataaatgagtgagaagtttcattttgtgttagatttttaaagaaaaatagagaacatctttctgtcctttcccaccaagcctgtccctcccacccacacacaacagtcctgatggagacagttgataggacacttaggtggcttctggtgttcaggcctaccacccagagtctttttggacatgaggaactttgaattaatgaccgaggagagccctgagagcatttgcaggcagcactgggtaaagtgcacaaagcagttggtggtgccaggctgtgaggccattagtacagggaaaagggcttgcgtggagagccctggccaattaccaggagagtaggagacaggaaggtgcatccaggttcacacaagtcccagcctgctggtgtgttatctaacgtgacagactcagtgtgaccctccttccttttggaacagaaagatgtcatttagcatttttttgactcaggctggagcagcaagctgggatgagaaatcttttcttgccaactcattaaggattgggctaggccctcaggaaacctgcaaactcaggccacttagcagaaaagtcccgatggcatgtccttacctgcagagcctcttacttcttcagggcttccattttcccttctgggtaggagtacaaggaaggctgagaaaagtgagagggtggagttgagggaagaagtcaagggcacagggactgccttctgaggtctcagtgtctccccacctttctcagggacccatgtgtccacagagctttgtactctgcagctgtagccttactatgagtcaaaggtgccctgttgccgagtaggttcagtgttacaaacatttactgagctctgctgtgttccaggccctgtgctgggctctgggggtccagaggtgtctgggaaactcttggagatcagatgtgtaagcagttacccttaacacaaagagatatgggcaacgttagaaggattagagatcttgtgcccttgatagcagctgtacccaggagagggtggctgggctactatgtgtatcagggaagcttctagggaagaggggtgtaggcaggtttcccatgatgaatggatgcttggtggatggacaagggcattttaaacaggaaagtcacagtggtgccaaatagcatgacatattttgacaaccaccacactgctttgcgactcctggctaaaatgtattgctcatttaccaagtgccagggaatgttctgttttctctgccttgtctcttgtgtcctcacactatgcctaagaagtaagaagtgtcattatctcatttcatagttcaggaactggggcacagggaggttgaatgacttatctgaaatttacgttcataagtggctaataaggagtggatcaggtttgttggacttcaaagtccataataatgataatgataataatagccagaatctaatgattgcagttaatgctttctgcacacttactgagtgccaagcactgtgctaaacattattttagttaattctcacaacattcaggtctgtacaattttctctctactttgcagatgaggaaaccagggaacggttaagtgacgcccagaaagatagctcatagctggtggggctaagatttgcccccaggcagccttaaggtggagcctatgcttgtaaccattgtcctttcctgctgtggcagaaggtggaaggtcagagtgagggaagttaagtctagggaggtaggcatttaggccccagcccttgaagggccttgtttgccacatacagaaccatggagtattaagcacggcagccatggagtcgggaaaggctccaactggaaaggcccccattgcttttggggaggctgctttgaaaggtcaaccccagtgtctcctcattattccagttggggtccagtttccttgaattccatctttttctccaactagagtgtcaagatctgatgggggcagaggctgttctatttactcctccttggtctcttcagtggcttctcatctctcaggtctcagctcaaatgttctttctttgggggaaatctttattgattaatctggacgacctagatgaggttctgcagttataagttctcacggcacatctttcttttcttggtagcacttatgaccattggaatgaaataataattattttgaatgttggtttaatatctatcttttcctgtactccatggactgtaactagttaattaattaattaattttgtcatctatttaacagatgtttattgaatgccagttgctattgtttgggtgtgatttttttgtccccaacaaatttcaacattcaacaccatcctcagtgtggtagtgttgggagatggggcctagtgggaagtgtttgggttgtggaggcagatccctcatgaatagattaatgcccttccttgggggtgaatgaattctgtattagttcccaagagaactggttattaaaagacctggcatctcctcacctccaccttgcttccttttgtcatgtgatctctgcacaggtgactcctcttttgtcttctgacatgagatgctggtgccatgcttctcgtacagcctgcagaagtgtgaaccaaataaacctcttttctttataaattacccagtctcacatgttcttttatagcaacataaaatggactaagacaccagttatgtgctagtcattgtgctaaggtgctggggatgtagtggtgatacaaatagaccctgttcctgccctcaaggaatttataatcacatagggagaccaacattaagaactaactaccaaacaaaagtaaaattgcagtagaggtaagttctacaaaagagggggtgcatggcattgtacgcctctctaatgcggcaatttgatacagttaggaggccagggaaggctttgctgagtgctgagatatggagagtaaatgttactaggcaaaggctgagggtaagggaagggtgtggtgagacagctgtaaccataccctggtgggaggcagaatgtgggatataaaggactgaaaggagaggctggagggcagagagtaaggagttgcctgtacagcatggggctggggagggtggcaggactcgatcacacagagccctctccactaggtgaggagtttgggaaggggctatcatgaatttaactttgaacatgttgagtttgaaataactttgagatattcaaaggttgatcttgtgcaggcagttagaggtttggagttcagaggacaggtgtaagctgaagacacttgtaagtgagttggtgacagctgaagccacagtcataaataagatcccctgggaagtgactcaccattttttttggtgccttggactcatttggcagccattgtgtgtgtgtgtttttgagaccgcgtctcactttgtcacccaggctggaacgcggtggcttgatcgcggctcactgcaacctccacctcccgggttcaagcgattctcctgcctcagcctcccgagtagctgggactacaggcatgtgccaccacacccggctaattttttgtatttttagtagagatggggtttcgccatgttagccaggatggtctctatctcctgaccttgtgatccgccccgcctcaccccctaaagtgctgggattacaggcatgagccaccgcacccagcccaatgttttaaaatgtacaaaatgaaatgcataggataacagtggaaactaattgcattgaaatatagttatcaaatattaaaaataaatttgtgatgtgaaggtatatatgcttctttattttattaactccttaaatgccaataaacagtagcagttcttataattactataatttcaaagcagtgatgggtgtatattttgagacctctacaactgttgtgtaggatgaagacacctggcatcattattggagagaaagtcacaggtactgctaatactgctggagtttgttgcctgcattcataatcaaaggaattgctaaatttcaggaagaggtgaatgaaaataccaaagtagacattttcacatttatgtttactgtccctcaaccctaagttaaaactcctggtctaaagtgagaggaagagagcacctacaatgctagcatggagtctcccatcaagcagagaaggataaagctgcacaggagaagcagaaagatgcaaggggtaggtgaaaaaccagagttcatctgtagaagccacaggaagcaagtgatccaagaagggggtggtcagttgtgtcgaatgctgaaaagttccataaaataaagactgataaatgtctgttggatttagtgacattgcaggaataatttgtcttatttattgcttaattcctggtgcatttcagggcacatgataagcattcaatatctgttgaaggaagagacaagttgctagctttcctcattaggtccagcaggagattgtctgcctaatggaacaggcaatgaagcctgcagatactttcttaaattgagtttttgactgaggactatggaagctgtagagtctttgcagggattaggaattccaagacttttggaggctttgcccatggttgctggagctactcatactcagagctgaatgctgcccagtggctgacgacttcccctgaagattcacctgcatctttgcatccttttctagggacagctgcaggtgggcaatgggtggacccatgtgtgcgaggaatgctctattgtggagatctgaattatcacttatccagcatcttcctgggtgatcttgagccatttgtccaatcctcacactttactgtagccccctgtgaagtggggtcacttctgttgcttcttgcttccccgtgctccagtgctgtgtggtggaagaattgggtcatatgtcgttaccccaagtgaaatgatcattataattttttgtcctagacatttttccattatatatttgaaccgtttaaaacagcacagcatcctaagatggtgattgggatgatgatggctgaacttggcaatgagaatatgaaacttgggatttggtgaggatttaaaactcagttcaagcagtttcagtctgtgctccagggatccctaagggtatctgagatgccttgggggaaccaagatggggataagagaggacaggcaggtgggattcaggcccattgggcctgtgggagcatcttccttgtatattggagcatcttttttatatactgagattccctacaatataatgtgaagaaagaaagaaattttgaaaatgactgatttaatccaactctcttatccctttttttttttttttttttttttagacagagtctcgctctttcgcccaggctggactgcagtggcgctatattggctcactgcaagctccgcctcccgggttcacgccattctcctgcctcagtctcctgagtagctggaactacaggcgcccgccaccacgcctggctaattttttatatttttagtagagacagggtttcaccgtgttagccatgatagtctcgatctcctgaccttgtgatccgcccgcctcggcctcccaaagtgctgggattacagacatgagccaccgtgcccggcctccaactctcttatcttacacaaaaggtaacttatgcccaaagaggtagaaagctgtgctcaaggtcatggcaatagttggtggcagagctgcagactaaaatcaggtcatgtatatagttttttttttttttttcttttttgagatggagtctcactttgtcacctaggctggagtacagtggctctatcttggcttgctgcagcctctgcttcccaggttcaagtgattttcctgcctcagcctcccgaatagctgggattacaggcacccaccaccaagcctggctaatttttgtatttttagtagtgacggggtttcgccatgttgatcaggttggtctcaaactcctgacctcaggtgatctacccgcctcagcctcccaaagtgctgggattacaggcttgaaccactgcgcccagccagtatacagttttttaaaacagtttgattaaatacttacaaagtcatgcatattatcatttatgtatgtatataaaataccatgcttatacatgggtcatgcattatttcttctaattatgtccccttctccccacttttccaccaacctcaaatgttgaatttgtttgccctgaaaggtgtttggggaagggtgctttggatttttacaatttggaaactctttttcacttttctggcataagaagtacaaagtaaattgaataggcctatgaagatgttgagtgtttttcatatgcagagaattgaaccccaaaagaaaatggtctaatggggttaataaaggtcagcattcctcagggaactgggaaattaatctaatggctcaaacctctgaggggttaatggaaactgtaaagcaacagctctgcctattgcaacgactataaatagctcaaagtcctgaaccacctcccgaagctgtgatatcctccatattaacttcagcagctttatgccgggctaggctacaacctgaatttattccagctgcatccagaagacccttgcaatatttttcagccatgaccaaaagagtgggagatggatggaaggctgactggttgtgaattatgtgccaagtcccctcagagtgaatggtaagggtgcgtgtgtgtgtgtgtgtgtgtgtgtgtgtgtagagagagagagacagagagagagagggagagagagagagagggagagagagagagaggtatggtggaaggaaatttgtgtgtggcatctcaatttgattagagcatgtagacctcctgaggcttagaatcttttttttttttaatcttcatttttttcctttggtaataggattttgaataacaggacatggtagattcatgtatgagtcctagagaatgtctacttcaacctctgcatttttcgtgcgaggagcccctgagcccagagagggaaggtcactggcctcatgcctccatcaaccaaggacaggggcgcaggtttccccgtcgccttgatggagatggctgcgcttcccctgtgttcctgaagctccctgtcccactccattacatttcctgtctcacctgggcgtttgaatctcccgctcacctgtgaccttctagatagcagggactgttttactcaattttaaggcctactgcttggcagagagacattgcaggtgctcagaaaatttttgttgatggattgaataaatgaacgaatgaatgagctttcttaggggaaatcatctaagagtccagttttcctataaggagggacaggaggttatgagaaaaagtttcgaatagaagccaaggactgccccctcttctctaaatgaagaaataataatgcctttcatttctataaaattgatggttataaaaaatgttaatttactcctcctgataacttctgagaaagattggggaggtatttgttattcctacttcatggataaggaagcagaggccctggaaggctcaatacttggtcagggccacacaactgctcagaagccaggactccagttctccagttctcagccagagtcatctttcttactctagggtaggtgttctgctggattgccttaggaaaacctcgcaggaaatttccgagtgagagaaaccatggccatgcatttggcaaaagaaaaccagagttagcatctgtttagtgctttttagactctttgatgtgccttctcataaatcatctcattggtccccacagcagccctgagatgctgcggctatcatcactcacatcacgtagacgaggcaatgagtgatttgctcctatcatccagttgataaatgatagcattggagctaggcccaggtctccattcacctgagcctcagctccaactactgaaccacagatcatcacatagagaatgatgagagaggtctgggagcaggtaggaagagtccatcacctaaggaaactggatcctgtgtataagagggtgggcattcctggaccaaaagttgggctggagatggggctgctggggagacttggctgctgggagactctgataggcaggtttagagcccacaggaaagagggaagttgagaaaggaaaaatgctgcagaagatcagaaagcaagcaaaaattaagggataggaaagaaaccagtgatttttatcaacaagacatggaagggaaagaatgatgtaagccaaacaaatgtagagaaacagaacatatagttctccctgtgaaacacttttaagctgcaaagtgtaaagagatgttatttttgtatttgtgacattttaggcttccgctacttgcaatttaaaatgaaaaaaagaaaatcccaaatcaacctaacttatttcttaccaagttaaggaaaatgacagaggaagggcacaatgcttagctgctaattgccattctttgacaacccacgaagactatcctcagcttatttaaaataagcatgttctcaactctttacttttcatcactgacatcactgttgaggaaaacgtggtgagaaaagatgaagaaaacacattagaaatcaggaatcagagcaagtttaagaaaattatcatcatcatgaagagaaggccctgggactgaaagggcagctcagggcacccttcagaggcaggggtggggtcacctggggggttccctgggctttgcagctcctctattccaagtcccttttccccagaggagtggtggggctctctgcagggctaaaccctgcaatctggctcttctctttgaggttctgattgattttggatttaattttgtcttgcaggcttttctgatatatctccaagcaggaaacaatattatttttcttttcttctctgtcaaaagggggcaggaccttataataatttttctttgtgaaagaggatgaattgagatatttgcagggtaggaacgaataaaaaaagatcataaataaaaggatctcagtagggcctaaggagtgaaccccaaactataatgggtagctactacaatcaaattaacagctcctcttcccaaccaaagatttcagctgcctcaccactgccccgtccccaactaaacactattcctaaaccttcaagtgaatcagttcaaacccaaactggaaactatatgctatctaatgctattggatttatcaaaacataattttcaaaaagtaaagaacattgttctcctacaaacatagaatgaaaatgtatcaaatttttatttaactaattaattaataagggaatcagctggatgttaaaactattcccaagagagggcagtaacttagacatctaattcttcttgggagaggaccctccttggctccacaaagctgcacggtgtggccacagtttttgtcttgctgtatcgaccccctaagtagaaggcaggtagatcaagatggaatctacacttccgcagggtgacctctgcacatagattttctgttgttagactttaaaggagcatcctcctcccctcttggctctgtgttgtcatgtacaggatataatagactcttgcaaggggcgaatgaaactgctctctttggaagctgagttgagtaagattgatttttagatggcagctccttctcagacaggcttaaaataaaaacggtcgagatgagtttgtgagtaggaattggaaaccagacttcagagtaccttgcaaagactgaactcctttgtgttagatgctcacttgattcatcctaatacagagcccagcacacagtaggtgctcagaaaatgtttgctggatgaatctcaagaatttcctttaggcagcaaggacccactttccaggggcgggtaggttgagggctggaagagtgaggaggctgtcatgttctgctgaatgatctttattgctgagaacaatttcttgctttcacccccatttcatattccagctcttattttttttaaaggagaatatgaatttgagagtatttcctcttttctccctcattcttcctctttgaatgtgatgatatcactatcataatcttcatggttgacatttttcagtgactcaccaccttactattttggtggttgtacatttcaacagataattgtctttccctctctcctgagcatgacacctactcacatctagagacttccaacacaacaaagcctcaccaagtagcaactcactgaacctggtagtgaaagtgagaggtacttatgaatgaaagacagtaagtgaagttgtggatgagaagacaggcctgctccaccaggcatgaactgttagtcctaaaagtcaccccgaggctcagcattccttagactaggacaaaagggaaatctcttgggaaatgaagaccactatccttgaaactaagcatggcataggtgctctaagtggattgaagccctcagggtgcttcatcgagacacccctgagggagagggggagcttctgagaaggaaattccgagagcatagtgttctggggtttggtcatgtttttaatgggtcagaggagttcctctgtctctgggaaatgtctccatttatgttgtgggtctccccacaggcaacattcaaattggcttggtcaactgagactctggctagaactgacttccccgctgacctgtcctgctttaagccatcgtaagtgacttctactgcccctgactcccttggtaataatattctctggggtttacatggtaacgttaaacatacctgctcatggtatttatttaatgatgattttaaattcttattgagcttgtaacacactgaaattttgtgtattacttctctgttttggcaccttgactgatgtactagctttatcatatctgtaaaactgccccatgtacatattaagaggtttttgtcattttgtgaggataagggactcttcaatgagtagggaatcactaatttataaaaccagaagctcagcctcctaaaccataaagactttgtcttagagagaccataaaatactgataggtcacaaaaggttaagtccttttttattatttaactttcctgacatttatgacttgtcttccaggtaaaacggtgtgcattttgtaacagggacaatgcattattgttcattgaattcatagcacccagcacagggttttgcctgtagttaatgctccgtaactacttgatattatttgagggtttaggttcgataatgaacccaggttcactcattcattcattcattccacacaaattcattgaacatcttactatgtgatgggcactgttctgggcactcaggattcaatagcccctgccctcatggagcttttattcaaataggggagacagacaataaataagacaaagaagtaaaatatgcagtatggtaggtaatgataaataccagaaagaaaaacataaaggaggaaaggtgcatgcaaagtgttggtgggtagtcaggaaaggcctcactgagaaggagatttttggaagtgaaagagtgagttatatggatttctgtgggaagagctttcagagcagaaaacacaagtgcaaagacccggagggagggtgtgcctggcatgttcaggagtccctactctggcccaccaggccctggaggatctggtctttggcctctatgacctcttctcctcccactccctacatctctctctccacaccaccccactgacctcctacaggtgacctcctacaggtgggaaagagtataccacctggacctcttgtcttctcctttcaccagaaggcctgcaaggtggacagcaggccctcctgacctagcccttcgttgcatggggcttgagctttctcttgcccctgaagcctcagaatggggccacttctggaaggacaaatggcagtgtccttcagtgcagtgtttttagcagaaagttgtccatggtggaaaggatggaggaagctgccttatagtcagtaggaacatagttcaggttcaaaacaaggacagcagatatggaggaaagggagggggaagctcaaggtgtctcaaaagaccatcactaggagactactccactggcatcctcttgaagtgagatgagactggcctaccctgagattacctcagctggatgttctggctccagttctttcaaaaacttgccccagtcttcccatctgtaactctgaagtcattagttccaaggctttcctggagatgtgttataaagtactgccagccctgcaaaggtttactaccttaaaaaaaatcattttctatagaattgctattcaaatatagaaaaacagaatggcaggaagccaatgggggaggatcacttgagcccaagagtttgaggttgcagtgagccatgatcgtgccactgcactccagcctgggtgacagaccttgtctcgaaaacaaaagaaaaagaaaaatacaatggaaaaggccttgggaagaattaatcagaacaatgctaatgtattctcctctcagtgcttctaaagctttagatcatggctgcttctcaggctgattatgggttcaaataacaaagggatttagcaggcagacaactctttctagctatcagattgaggaagctggaactaggaatgaactttgttaaaaaagtttataatctttattcctttatgtgggagttttaatacaggttagtttgggcaagatgacttgaataaagaaaacaagctctgtcctccctgactcctcacactgtcagctccttggggcctcagcctgagaactgagcaggattgcctatcacccaccactgtcctgggcgacacccactcttcatggtgtcacctcagggcccaaagcccccagagctgggacttgactacccacttctcctgcccagtgggtagaagcaaggaaggtcttgcaaaaataaaagctgtggccatcaagtagaggggcgggggaggaggtgtgcgagcaaggctggaggacagccgccgcaccccacccccccatgggttatcagttgttgcattcccttggagaacaatttacgactgaggaggcaggtcccagaggcttcagcagaaatcaaaaggcagcagcagttattacctcgtctgctcctcacatctctcctctccatctcccagctttttttaatataagggtctgctgttgtggcctcgagaagcccctgtctattctcatactcatcatctctcgtagaacaaagtgacagtcaagggcagtgcaacgggggacttggtggtttcctaacagtgaatcatagtaatagtgagccactcagtgccagccacagggctaaattgttccatgtgtattatctcggtcagttggtcattattgtccccattttattaagaagaaaactgaggatgagactacattgtaagtggtggagtcggattttaagctccaggtgcaagtacttaaaacactcccctctgctgcccactacggctgcaggcttcctgcacactccaagctgtctgcaacagggttgtcctgtgcactgtgtaggggccactgtgctatttaaagacagaactgaggctctttttgagtacttagctgctaattaagtgttgacgagtctctgtttctcctttagctctttgtgtttcaagcacagcctcttgtccagcagcatggacactgcctggaagcttattagaactgcagactcctggatccacccaccccaggcctgctagatcagaatctgcattttaacaaggtcctccttggtccagtgtaccatttgagaagctctagaggtgtttttgctatacaaaagctagttcaagggcttctttcagaatgggggctggggcagatgcaatacctagaagtcccatgctggtgtgtccctgttgtcagaaacaacgatttccctgcaagggatggggaaagccaaacccagttttagtatctgtttccagggcaatgaacaaaatagcccaaagaaatactctcagcagctctctgagttaggcagatctgccagtgtgcaaacgctagatggcaatggatggccaggcacgagcgggaagcaggcatagctctgtcactgtcaaggggcaagacaaaatgataaaggcaaggtgccgggggaggaagtgcgcttgagcacagttgggttgtgaagggagattgttgggataatattaaagaaactgagacttcaccagcaagtctgggaaggtttttttgtggagtgagagatttgggcaagagtgattgcttcttttttgcctctagctatgttaaacacaccagtctccccacaggggagggatgtcagcagctggtatggtgaagctgagggaattaagcatgggtcaaaagttcctaatctactccctgaggtcagggaggcagtggcaggcattctgcaacattggttagtgaaagctggcctgagggaatgagcacatcctttcccaccacgccctgtgctggcatgatatgcccacatgctgccccggtgctcgtgggtaacaccctcatgcctcttaaagacttggaggtgaagtgcttggatcacagtcctcttgtgtccagctgtttggctgaatctggggtggaaaaaaaaaagcagaattatcctggctcctaaatttctcttttcttcaccctccacagattccctgggactaacttgtagggtggagccctgttgcactcatattggagaggctggagtccatctttggacttgagggacttggcttctaagaaaacaaggcaaagggaagttttgtgaaattccccaaattgtagggtcaccttatagagctggcctcttttattctatggtggttggttccggtaggaccctctcatttggtcagtggagccaaaagttgaagaattttgttggacagtcgttgaagaaaaagccatgttttcttgacttgttggtgagagtgctgcctgaaatatcttggagtcatgacaggtgggtagagacacattattcttagagatttcagtgtttaagttcaggatctggacttttgcaagttattctctttctctaagctgaatttaggcttggctggacagctgaccagtgcagaagtctacaagcctataggtaatagggttcagaattataggatggatgctagaaattattctgtctctctcttgccttgttcagatgggaaaactgaggcccagagaattccatttggtttatttcagcaaaacataggcaagtgcccactctgggccaatccctgtgctggagatctaggttataacgaagagtatgagacacagtacctattagtatatggattagtgatcagcttatccatctagcttatgattcaacttgtaagcccaggtcacctggctggcctgctggtgagtgatgaacacaggcatagactatggaaggattcattccttctttcttctctccctccctccctccttccctctctccctgccttccctctttccttcctttcttcattttttttttttaattctgatgatattttaaaccttgagggctttgcatttaccgggtggaaatgagtaagcagcaatattagtgattccaaggacatgtttgatcacttttgtccttccccaaaggccttgatacaagacatagtgcttttagacctgaggaagcaaatttatttattttttaatttatgggaacttgctttaacttctaagagggggaaaaaaccaagctagtacacttaaaggcttttttttcttttctttctttctttcttttttttttttgcttgaggaaatacaccttctgcgatagataaactcaaaaatacacccaggaagatgctgtccaaactgcaacccaaccacaatttacagtgggctgccctcattctccaagttctatttcttttcttttagggtgtattacttgagtaggttttgtaggtagaaagaaatggtgaattaaaaataaagatgttaccatcttttctggaaaattgctagtgaatggctgcatctattacacagtggtatgcaatgatatgaatatctcaggtaaatagacccccagccctcctcactattgtgaaatctggtaaaggctactgtttgggcttctgtgtctgtgctgaccaacaggaagaattaggggcctaaacatcaggcacttgaagtttgcatataattgagcttccggacctctaaaaatcttacattttattcacaaacacaggcatctgctactaattaaagtatcagggtataattataccctttcttattagtagatatggaatctgacagttgcttagatacaaaataagcaagtgcagattgcgttctgcatgctcttcacaggctagggagacagaacaacagaattttcaaatgctctgtgtaaatgagtcttgttgcccagaaaatgtgaagttctgaattatcattggtaaatttgcctaggaacagatgttaatcccatcacaactctgtgatttgagctttaatatcattcaattctttcccttgcccggtcccctcacccctgcactgcaccctaaccacaaaacaaaaagcacgagtctttccaagatacacacagttaaggcctatcatctaacagcattgcagggagaaagcagttgtggcttcctcaggaaattctagagcctgaagaaactgtctagaatggcagggctgtgttgtggctggcttagccattgggtttgtccaaggtccactttgggctcagtggtgtggattctgtgtccagggagccttgtggtcattttaagatatcctctccccagtgcccagctatgtcttcacatcatataatcagagaagttccctgctaacccatccgctccaggaacttggggaccaggcctttttttggtcacctggtatatcaccagtgtctagtttgttgcttggcccttagaaggtgcttagtaactacttactgaaagaatggattctgttgagcccttacatgcatataaccctgggaaaggtgacactttcaacctcagtagtcatttactcctcagattgtgtgaattgattagatcaggagttggcaggctatagccccaaggccaaattctgcctgccagcctgaatctgtgtgacctgtgagctaagaataatttttacatttctaaatggttggaaaaaaaagcaaaagatttcatgatacaccaaaattatatggaattcagatttttgtatccataaataaagttttatcagaacacatctatggccacttatttacgttttgtctatggctaattttgcattatagtggcagaattcagtagttggcaacagagaccatgtggcctgtgaggcctccaattgttactatttggcatttaacagaaaaacgtttgatagtccctggattaattcgatcattcctcagggttagcttttgatgttggaggaatgggatggaggagggagaggatacaggggtgaatcacagggcaggctagctaggaggcgagaacagccagcagtctggatgagcacttcagccctcatcacacttgtgccagccctggcccttccactgtggaagtttccagtttctcattgtcattctgatgaatgccctcaaggaacgcagccatgatcatttctcagactgctgcactgtttggatgcaaaggactgtatctttttgttgtttcttgattgttgtaaattcttagttcagaatgctctttctttgtcaaagacataaaattttgcttctcagacagtgtttgggtaataaatctgtatgtgtgaatgagcgtgagctggagcttgtctttggaaagcaaatgtctttagtctttagccacccagcaggcaccccgaacagctgcctcacatcttagcttccaggacggtgttgacccccactggctgggtaccacaagttttctgtttctgagctcttagccagggtggagccctacccttccagagatgtgcctttgtgcttaagctggcaagaatgcaatcagcctagttaaaattttgataatccacttgatccatcccagttataggctcaaatcccaggaggcatcttatagacctgagccttatttctctggagtttataggagaccttccagagcatatagcatcatactgttttcttattagccacctaaattctgaattagagtctaattttctccaaaccctactcgtctctgtgctggtcccagcctctgggtgcctggagacctgactcatttatatctgtaaaaaatgcccagtgtcttttgatggtatatttaatggattaggggataggtttgctttctgagtgacaatgattaacaccagcattgtttaccttaagtagacctgggttttgaaaatcaaaaacaataagcagattttcatgcctttttcaagagttgactaacaggcttcctgtgggggcactagctagctgtctgatctgaaagggtttatttttaaaagtaatataggaaatggtttgtggaaagaaaatgcaaatttctactttctaaataatacttaccatttgttgcatctcttatgtgccagatacttctctaggtattccgtatatattttctctaatccttacccaaatcttacaggataaatgttatctccattttacagaggcggaaactgtaactgaaataggatggatgggttgcctgagattccacagacaggaaatggcataactcaaactcaaacccttgtaggtgtgacttggaggtcttgggtgtaacatcacattatactgcccctctggactgacacttcagctatctcacactttaaggacaggtagaactttagaaagaaccgaaacgcaaagaagttgacaaatgagatatgtgacccagccaacatgtggttattcatcttaaatggtaaagccccatatttccttccttccttccttccttccttccttccttccttccttccttccttccttccttcctttctttcttttttttttttttgggagacggagtctcgctgtcaccctggctggagtgcagtggtacgatcttggctcactccaacctctgcctcccaggttcaagcaattctcccacctcagcctcctgagtagctgggattacagacttctgccaccatgccggctaatttttatattttcagtagagacggggtttctctgtgttggccaggctggtctcgaaaactcctgacctcaggtgatccgcccgccttggcctcccaaagtgctgggattacaggcctgagccaccgtgccctgcccaaagccccatgttttctttagctaaaagtttccatctccttccttactagacattaagaataaaaaagttcaaaacaatttagttaaaatttgtctatttatcgtttaatgggttcaaaatccaacagagataagaaagcatataaagaaaaaagacgaatgttcgaggtgatggatatcccagttaccctgatttgatcatgacacattgtatacatgtatcaaaatatcacatgtacccacccaatatatacaactcttacagaccaataaaaaatttaaaaagtaaaaagcccagctcccacccctgggatggttctcttaggcctttttgtaggcctatgtcaatatgatggatagcaaaaatggtcaaagtttctctccttccactacctatccctcttttctctgtgactttgaagctgcttctgtcaagaagtggagtctgcttccccatcccttgaatctgggctggccctgtgaccagctctgttcagtggaatgtggcagcagtgactaagtgccagttcccatcctaggtcttatgcgcttgctttctttttctcagaaacttgctgagctacctactaccgtgtaggcaggcccaggctaggcttctggaggatgagagactacatggagctgatgaattgccttagcaagtacagaagccctgaggacaaaggatgttttatgtgtgtgacttgagcagctaggaggtcagggtgaactgagtgttgagatatgatgtagctattaaccctgtaagccaaaatgaggacttcaagttttattctaagtgtgtgatagcaatgaatgaacaaatgggcaaataaaaaagtgaatgcaggagtgaatgataccagcaggtgaaaagagcagccattgcttgacatgtacaactcatctaggatttgaaactcagagaagatccaatcccatactgctcagtgacaggatcacaatgaacatggttggtgaaattaaagagaccaatctgtgggtaccatgtaacttaatctctgttggtttctttcatcatttggaatccttggtggacattagatgagtcttggtattgattattgatttctgatacccacactgaagtttcaaccacagtgaagtggtggttatcagcaaagaaataaaaacaaatgggaggcctttcaccacggggcttcttgggctggtgtggaagaaaactcagagaaataattatcagtcccaggttgaaatctctgctggcccactccataatattttttcttttccttaacaaaatgaaagagatttctgatgtcattggactttgataatatgaaggtatctgccatgctggaaaatgaatcaggtagcttttgctgcataacaagccacttcaacacttggtggctcttgattctgtgggttgccatggttctcctgacctggcatggctggaatgatggccttccagatgggctttcactgagtctgtgggcagttagtggattggcttgtgaccagtccaggatgacctcacttgcatgggctggtggttggctggctgtcagctgggacacttccgctctcctccatatggactctcatcctccaggaggttagctggacccatttacatggtggttgtgtttgcatggttccttgagcagtaagagagagggcaagtcccagggtacaattgcttttctagcctccagttatcttgtacttattgttaacatctcattggtgaaagcaaatctcatgatgagtccagattcaaagtgtgggtaaatagactctaccttttgatgggagaagttgtgaagtcacatagcaaagaatttttgactattttttcatatagtctgtcacagtgtatgagagtgtatctttttttttttttttttaactcaaacactttcaagacactacattaaaaaaaaacttgtttaatttctttcaggccggggacttatgctaattcaagtagctgacataaatctttatgattttatctatgcatattgtattcaattgaagttacaggtagatatttttggaaataactttacttggaaagtatgatgacatatgaggatcttctataagttgccaaatagttttcccatccttttaacattcttaacagaatgttattcacctaaggataagaattctatcattagttagactcatatttatatttcagtttcaggcaatttctatgatgcaaaactaggtccctccttgagaggtgagggtgcttgctattcaaagttaggaagagaacatgatgtctggtgagacagcgccatacatattcctataagaaaatgtactttctagttctagcctattgtaaaacagatgcatgaccttgtgaaagtcatttaacttatctgggtttcaatttctttatctacacatgagaattttcctttttgtgttcaagtctatgatggttcctctgggcttcctggagaggatctcttctgtctgggagggatactaccacctccagaaccacccagaaattggctccttccacttgggattctggataatatagatttctataaagggtttcaaaagtaaaaaaaaaaaatagctggattgaactacattctttattttattttttgatacagaatttcactcctgtcacccaggctagagtggaatggtgagatcccggctcactgcaagctccgcctctcaggttcaagtgattctcatgcctcagcctcctgagtagctggaattacaggcacctgccaccaagttggctaatttttgtacttttagtagagacagggttttaccgtgttggccaggctggtctcgaactcttgacctcaggtgatccacccgcctcggcctcccaaagtgctaggattacaggcatgagccaccatgcccggccaggttgaaccacattctttaaaaggcaggagatggaagtgccaggaccttactggacatgaggaactccacttgggatggggaggacttgacagaggcctcctatccccttgagggccagtggtagtagagtcttctctggggcaagcacaggggaagggacacctgcagccttgatctttcaactgttctttcacccagggatgttctgctcttggcgagaaggcacaggcaggagcagggactatggaagagactgcagccatccatttgaagacctctgtaggggttcctcaaacgaaccatttgtgtggctggcaccaagggaggctgacacatgagccagcccctcagctgggtgatagccctgaccaccgccactcccatgccgcctggtcttggaagtttgctgtacactctacttctcattagtttgactttgagggctgtttgcttttctctttgggtctattggcctgtgaatacctgaaggacatttgacttgccttactttttgtttttggcatgaggtcctgggccagaccctaccttcctccttttctagaaaccactggatcaggaagaaaagtgctcccctgggcctttctgttgacagttaggctcaaattatgggagtaaaaaattaaatgtgtcgagggttcagaaggttgcagaaatgtttcatgctgtcaggtatggtggggcattggatgaaatggagatggcatgttccagctaaagactgtgaagcccagttttggaaaacaccatgaacaaaatgcttttggttgggtcaacaggctacctctctgagtacctcaagagttagaatgagcttcacatggagccagcctgccttgttggaagatgcaaccattagctttttaccccagcagcctcatgccagattcgtgactgggttcctcaaccaccttctcattctccttgggatggagcttttgattttctgcttcctaccttgagtggttctcagggataacccttcaagcaaatctccctcctgggtgctgggcctgactggctccacttctggatgatgggttgagtcagatgctgagacacagggaggatttgacattcaatgataccacattttacctgcaggaacggagcatcttccttcctggggtgcagaggtgcttcctcccttccttggcctcattttgaacgtttttctcagtaagctgaaggaaattagagcagatgagggcattggcagtggaaacggagagttgggatgggtgtgagagatatttaggaattaaaatggactgtattggatgtggggtagtggagaaggtagcatctgggtgagtgtccaggtttgttttcagattgctgatggtgccactccatgagatggggactgatataaaagaagtggatggccactattgccttaagtgactgtccataagagttacccactttggtgcattgtttcctcaagaatcactaccaaggtccccctcaaatggttcttgacaggagcacatagggaaggccagtagctctaagtattcacaaagagcaaataatttgcagcttcaaagcacaccccctggaataccaaggctggctgccttccacaatcccgggatgttgagcccaaatcattgcgacattgttgatgtgaacatataaagaacaaattaacctgctttggaatgaatgattagattctgctcagacttgactgcttatgtttcctgcaaactcaatttagtgttggtctgagagtgcattgctctgcagcaccaattttccctaatggccaacgtgaagtgggtaggtgaaacccctcaggctccaggagtagggtagtgatgatgcatgtgtgccaaccccaaatctgagaacctgaatctagcttggccctcaccagcctacctagtcagtcagtggcagatagaaatcctgattccaggtacttgtgcccttcagttcgggaaggcatctttcctgatgcaagatctggcaaaaagcccagcatcttcatctcctatggctaccagtgcattgggctgcatgtttcagagctggctggtttgtgtggaggagattatcagtgcagaaagaatagacttgggccctggcagagagagagggaaggagagggagagagaggatccacatagacacagcccctctccccacataaagaaattactgccgagaaatgagttatttttagataaatgtgtatttttggagtatatcctttaaagtgccttcatattttagtgggattgtttttgaaataaatagtttcaaaatgtatgatgtgatttctacccttttaaagcagagtgccctaaaatcaattcagccttgaaatatctttttataattatgaaaaatttcaagcatatacaaaagtgagagcgtcatgtgataaaccccatgtacccaacagccagcctcaacaattcatagccaactttgaccaaccttattccatctatatttcccactcccctcctcttccatagattatgtaagttcaccttttctatgcggacctaaggtcatcattatgaacagtacttatgtagtatgtgtggtagtagatattacccttcagtgtatttctcctatctgtatccttgcctttaccagaacttcccatagtttgtcttctgtaatccagtctggaaaggtgttgaaattctatgttaagtaagaacacatagagtttgagagagactttcctagctgaattttaataccgggtttaccttgggcattcacaggctctttctggagaattgaagtttaggacttttcatctcttaaaaatgagggtgttttattgtactgtgctgtggtagcactttttttccctttgaaaatgaagtcattattaatagatgcaaagaaatggaaaaagattcatttttgagaaggattttgagataggcatgaggaattctgagtatgctgagtacatcatttgctgcatgaagatgatgcggctcctcttgttctgagctgcagcaccgtctctgtggcttcacttaggggatattttgaggaactgcactcaagtttgcaccaaatgcctccagactgttatgtttttcttccacccttccccccttatttgctatctttttagctttcttggtttttcactgtctctgctgtttgaagtgcttcagtatttataacatggagaggaactatgagtttccaggtcaaccagataaccatgcctgttacatcagtgacctatcagtgtgtatgaaattgagtatctaggccctcctgttccagaaaagtgcatgagaacttcctgagcttgatgtgtatttcccgtgacaggctctgaggataaagatgcagacaaggcttgtgcagctggaggttcagtggggtggttcagtaaatgggatcataaagatggggagagaaaagcttgagggtccttcaaaatctcttgctgctgtgcagtcaacaagggctacctgcacgttccagtgtcttctagcaccttctggcatcctctgcatggagtgtcattccctggaatgtacagagggtaagcacatggattctgagaagtgagtgagctgagcatttgggggatgtttcaaccttccgaacgtaactggaagaaactgggatgtagaagctgtttcactcgtccctttctctcctttattccctcttaatctctgccgtaagcgtttttccattttaggtcatctgcctttcacagacatttggtaaaaatatatatatatttttcggaatggaaacctgaaggtgtgccatcactcctaaacactgaggatgctcagtgtttttgctctggggtatgaaaccactcttattttattcaattagctgcagttcacgacgaaaggagcaagttgacagggaggcctggcaaaaggtggcattcgtatgacaacaaacacctctatagaatagcatatttatgaagtgcttcctgtcaagattagagtggggatggcaggcatcctattttcgagatgatgaatgtgaggtagagattcaggagcttgggctggtcttttatcctctcaatgtttatcttgtgtcttccttcctcaccctactctgggccccaagacttcttccctccctgctgcccctcacttttcaccatcactatccaggcttctaattcccaccctggactcagcttcctcccacacatacactggtgcagctatttctctttctcctgtttttcatcttgtttaagtctctttagtctcataaactttcaggttccaccactgtgtcttctcaggctaagaacaagaggttttttcttaggtagaaacctcgtgcaggagaaagaggactgggggatttcttggctccttcatttccatcttgacttaaaatataatcaatttcttcaaaagatgttgaccaagggcctggagatcaccaggtgtctcgaccatggaggcatccagtttcctgggctgtacgtgcacaaggaaccccaagaatgggcttatggtggtggtgggggacagagaacattgctggggaactcacccaatgactcaggacaggcctgcagttggggctttctctgggaaggagagcgagtcttgggccctaaatgccaggcctgtgggtgcctctgagtgacgaggccatcatggcacaaagtagggtggacatagcaatccctcccattgctctttcctttctgttcctcttcctgtcaccagaaggaaaaatggatagtgataacaatggcccaaggaacatccggagactgaagagggtcccccaggctgtccaggggaggtgataacgaaagagccacaagtggaatgatgccttctgtccggaaacaaccttagcagtggtggttctggactaagagcagccctccagatcttgttgagattcttatttatctttgtgttaatctctaatgtaattttgagtacttgttatgtgccagacatgatgccctgggccttatatacattagccatttaatcctaatctgtaccttatagatggacaaactgaggcccatttataaagtgttgaggcccagagctgtgttactcagtgagtgagtgccacaattgagagcttcagggcccatgatctgaagcagctcctgccaccaccccttttttgaagcctcagctggtccttggacaggatggaagctgggattaaactcgagggtgtagattgcctgacaccatggtggacacatgtttctttttctttcctaggttccctgctctataggggtcagttttctcatggtctcctgattcttttttcattccagaggtgagtacttcttctcagagccttctccgaccagattggctgccctcaaacttcaatttggctctgtctcttcctgtctccagcttgtgcaggcaaagatgtggttgcattagccacaagttgtggatcacatccccatgccccttatgcgaatatgataaatgagagagacagtggaattttcttagggagacagtgtgaaaatatgctacacaggcattctgcagctgcttttgtcagaggcttgtgaaacactgaaaaaggagtgtggggaggcccatgccattggtggctaccctcccactgacagccccagtgtatggtcagacaaacgtgacatggggcttctcaaggtgcagggaagaaaggcttctgaaaactgagtttacagattggagctgtgggatacaagtttcagaagtcttatattctctgtggtatattcagaccagggggacctgctatacagttggggtttttctggcacctggtgatgggatgctggcagggtgggatgggtgtgtgtgtgtgtgcgcatgcatgtgtgtgcatgtgcatgagtgagtgaatgtgtgtgtacatatgtgtgtgtgtgcatgcacacacttacctttgtctatgggggattgctacaaatagccacctgattaactttggtacctgtaggctgtgggctcctggctgcttgaggatagcaccctgtgtagagtaagctttgtaaaatacaggcggtggctcatccaggatcaggtttctggaggctgtataatccattacagttgcatgctctgttggtttagaagaacaacatcatccttgtttatgaaagcctaactagttgtaactcagatatcacagactcagtatgtagagagacatgtgtggcaagtttggtttagcatttatctttaaaaaaatcaatgcctaatattacctcagcactctcaacatttagctatacactttttaacatttttacacctgtaacctttgcttctgctcaaacctttgcatctattctaccccagaaggctgaaagaatccccctttcaagcaaggtggtgctgctgctctcccctgtgtacctttccttgaagtctgaggaatctctctctctctctgtaaaggaattgagaatgcattttatagccaagatttttttcttggtcctccaaggaaaattcctgtgtatacattgagttaaaaggataaagactccaaactctggtacaaagcagagaaatggatcctgacatggacggttttagtctaaacaagatgcccctgataacagagatccaaagactaattgcatttgtactggaaatagattctcagactttagttgcccataaaagtgttttctccgccctgccatcttcctagctaatttgatgtacttcctgctcattgtagccattcttccagtaagaaaatcttgaactaaaccattagacaacagtgacaattttcaagatacatatataagtcatttttggattaatatgggttatccaaattagtacttttttcattgtagtttataaatatggttttctagtagctcagatgaatggaccactgatacagcctaagttattgtttcatcacctgtgggaccgttaaattaagtctttcatctggtcatgtagtctgaccctaactggtcattaccttgctatgtgttgttggcacctgggggcccaggtgagggtggatgattgaatgagcacagattcagcccttcgtctgggtgaggaattaagcattgtgggataggtttccctctttctgtaaggtggagggaatgatgtatccattcacctatccatccatccacccattcatctatccagcaaacatctaaggaccccatggtgagctgggagtttacagcctggtggagaagccaacagtcccaaagtgctggcaaaagtttattttgagcagactgctagaggctttggacagtctagtaggttggaggggaggatacaattcaagttaaatgacatcatgagtaaattttagaagttctttattgaggtttaatttacatatagtaaaatgaataaatcttaaatgtacatttggtggcttttttttacaagaatatacacccatgtgacaactgggccatcaagacatagaatattttcatcatcctagaaaatgtccttccagtcaattccccctctggtgaaaaccactattctgccttgtcaccataaatcagttttgcctgatcttgtgtttcatagcaatggtgtcatacagtttgtactttttgggtccagtttctttcactccacatcatgtctgtgggaatcatccatgttgttgcatgtgtcactggcttgttctaatttttggtgagcagtattccattgtataactatgccacagtttgtttatcccttctcctgggcatttgaattgtttctagtttttggctattttgagtaacactgcagtgaacattcatgtacaagtctgtttgtggacatacacattcaaagtggatgaaacacagataaagagagtcaaaagattttcagttattcagggtgaggaaactataacagagaaatccaagggtgattggacttcaagacaggctaaatgtgtcccctctgagatgcattacctcatttgaatgtattcattacatgagttgtgtgaagaaatgaattaatcatggtgccttcagcttagtcatagattatcttgcaggaagggaggttcctaatggaccccattttcgactcactggggaagcagcgacccttgggagtaaagctacaagacatctctgtgttgaagagaggactgtaggcttcccattgtgtaagagaaattctgaattttcctattggtcctgattccagcttctgggcaatagtttaggcagaggaggcaatgatgtgccctgctctcagccactgaagtttcaagtcagaagacctctagtgctcaaggctctcatctccccggctatgtgtatgtagcaacatggaaggccagcgccttgtgatagacagtttaatcttacctgcctgctgtgaggtacactcaccatcccagagaattgcaaagtataaattgtctcttaacactgataaacagtaaggaggaggaaaaagccctgacaaaatattacagcttaattgtatttctcagctgggctcaggaaacctgcttcctccttaggcgaatgctatttacgaagtctcccagccccacaataattatttctttaacccctggtgggatagcaccttagcatggaatgggactgcactgccagggaagcttaatgaggctgtctcaggttcttatgtgggtgaggtttgccttcattaggtgcatgcatcactgtgacttctggcttcgggcctcaggggtggcaggaggacaggctgcccctgaagatagaggctgttggggaagggggtggggaggaggaggcaagactttctgctggcctggttttctagtacacaggtgtttgcaattctaaataaatgtgcagtgtcaggactcagcagcccatcagctgagacttataatgagggctgagcagggaaataagattggccttctttgggcacttgtcattatgttgggtagacccaaattcaggcctaattatgtgtgtgtgtatatatatatacacaatagtctggaagaactgggtttgggggtgcaagagacaaggggggtggccacctgtcagaaatattgtgtgctctgaaaatctccctgtgtggaatctggaagctcattgctgtgagcattgtttgtttgtttgtttttttttttttttttaaactttgagcgatatctttatgccttctgcaaagttttgaaaaacactatttgaatagccagtcagaaagaggggccagaggcaaaagccttttcccttcacagagcagtgtccactggtgacttacaaaggcccatctggtgccctcggcaagtgatggctgcttatttcacctagttgatcatttactcctgcatttgtctgtttgctcatttattcattcattgctatcaacacttagaataaaaccccaactcctcatgttactgagttgaatagtgtccctccaaaattcatgttcttccctgaagctcagaatgtgaactatttggaaatagagtcattgcagatataattagtacagttcagatgaggtcatactggagtagggtgggcccttaacccaatatgactggcgtccttataagaagaaaagagacacagagtgacacacaaacagtagaaagaccgccatgtgacaccagagccagagattggagtgatattaggttgctgtgaaagtaattgtgttttttgccattaaaagtggcaaaaaccggctgggcacggaggctcatgcctgtaattccagcactgtgggaggatgaggtgggtggatcacgaggtgggtggatcacgaggtcaggaggttaagactagcctggccaaaatggcaaaaccctgtctctactaaaaatacaaaaattagccgggtgtggtggcaggcgcctgtaatcccagttacttgggaggctgaggcagagaattgcttgaacctgggaggcagaggttgcggtgagccgagattgcaacactgcactacagcctgcgcgacagagtgagactgtctcaaaaaaaaaaaaaaaaaaaaaaagaggtggcaaaaaccacaattacttttgcaccaatctatacatctgtaggccagggcaccaaggattgcttacaaccgccagaagctaggaggcttttctcacaaatctgttttgcctggtcttgtgcttcctagaaatggtatcatacagtatgtacttttttgggtctagcttctttcattcaacatcatgggaatcatctgtgggaatgatccatgggatctgtgggaatcatccatgttgttgcatatgtcactggcttgtcctgttttattgatgagcagtattccattgttcagggaaggacatgaattttgaatgaacagattatccttctgagtccccaggaaaaaaccaactctgccaacactttgattttggatttttggccttcagaactataaaagaataaatgtctcttgttttaagccatgtagtttgtggtgcaattatgcagccctagggaaatgatacacttgtcatggcttacaatgttcctggctacttctccagtttcatttttaaccagtctctacttggactggcctactgactgcttgctgtacatgttgaatatacttggtcctcaggacccttgtacttgccatccccactgcctacaacattcttccctatatggttccatgactcgtttgcatatttacttaggtcttagctcaaatgtcacctcttcagagagacctattctggacatcttttttttttttttttttttgagacggagtctcgctctgtcgcccaggctggagtgcagtggcgggatctccgctcactgcaagctccgcctcccgggttcacgccattctcctgcctcagcctcccaagtagctgggactacaggcgcccgccactacgcccggctaattttttgtatttttagtagagacggggtttcaccgtttttagccgggatggtctcgatctcctgacctcgtgatccacccgcctcggcctcccaaagtgctgggattacaggcgtgagccaccgcgcccggcctattctggacatcttatctaaaattgcatcttctcctctcactctctacctccttactccactttaatcttcttcctagaacttaccactaggagacattacagagtatgtaggtgtatttgtttttttgtcacctgcttccccaaccagaccataagctccatgtgggtaaggacttcgtcttctttactgctgtatccccaacatgcaatagtacttggcaactagtaagtgctcaataaatatttattgttaacattatctcatgctaggaaacctaaaacaaagccagttcctgcactcatgggcttatattctagtaactgatacacatagatgtgaagaatgactgggtttgagggaaggagagttcacttggtttgggagacccggtaaagatttcctgagcaagtgatatttgagatttgattgtggcatcagagttgaccaggcagagtctgtaaaagccttgtggtggaaaggagtgtgggtgtgtttgagaaagtgaggaaggctgatgtggctggagagctgagagccaagggagtgactgaggggcgggaggaagccagagcatccagggtcttgtgggctaggaaaggaccctggtctttatcttaagagtgatgggaagactttgaaagaattaagagtggaagagaggcaggagggcattacataatctaatttatgttttgcaaagttcgctctggttgcagtgtggtaaatgccttggggtgaccaattaggaggttactgcatttgtctggagggatgcctgaagatcctgagaggtggcaagattcaagacagatttggggattaaaagtggacaggatttggaaatggattggagtcaggaggtgaggggagaggacagtatcaaggggggctctcaggctctggacatgtgtgatggaacagatcatggcaccattcatagaataaaggaacactggaggactgtgtgtgtgtgtggagtgggggaggtgcaagggttcggggctgggaggagatctttcatccctgacggtttctgcagcactgctgtgttaggtgtcttccaccagctccaatggaaataagaagtgacgcctctgaagatggctttgattctagcaagtcctgtgcccttgtagtaacaagatgggtgctctccagtgaaccactgatcttggtatttattcatgcccttggatagcccccacctacactggctctaggcttggccacatgacttgctttggccaatgggaccctggtaaacataaagcaaacagaggctagataagcacttgcccactggggcttatcttcttggaactgtctctcagaagcttgctgccatgttataaagaagctcagatggatcactggatgatgagaagcctcaaggagagatgccctaaaggatgagaggccatcttgaaagttccagcccctgcagagctcctaccttaatgcagccacacaagtgaccacagctattccacaaggagcagaacccaaccaacccacaaaactgagaaaaataataccttgttgtgttaagtcactaagtttgagtggcttgtgatactgcaagagaactgaagcagacctcttcagacagattaaaatgggggaccctggctattgctgggctcctctgggaagagtctcctaaagagatgtcttaggcccctttgcccaaatggctgcagagggtgagtactgatggctctcccactccccacctcccttctttctaattttttccttcaccatcccttccatggcctgtatctgtgcctggttttcctcacctctttcctgctctttcacttcgatagctgtggggagccctcaaggctacagaaacttcagaaacctggttcaggatatgcatcattgcctactccccccatttcttttgtcccctgtcctagcactggagcaaaattaggtctcctttgtatttttttaatgaacaggtttagccactgttagctggctattacattggactgaaaatgctgtttgtgagccattgtcaacagagactgggaccaacactgacacctccttaattatgtgccattaatgatatacacactgcagttaagggaacattgcagatccattttcttgctttaattcagtgctgtgttgtatgaaatgctaatgagtccagaattctcaaaggtcataatctgaatacattttcttttcttctttttagggcaatagggatagaattcaaaacaattaaaatgaaatttacttcatcatttggctaacaacatccttgactgtactaattacactgagggatgtattcattcactggtcatttgggcagatctgagtgtgcttgatttcttttaaggtctgcagctctgaattctacacaggattttcttttttagctgctcaccccattggttatgagacataactggggaaaaaaagtccatctaaacccttagaatatggaaagtgcaaatttagcagaaccagcatagaattttccagggagtcatttatcatccttagaaagttttggttctttgcaaataaaaaaagagaaaagaaaggtaattgccatgctcagctaattgacagaattgtgtcagaaaaaggaggcatttcaacactgcctccgatgatgacatttgaaggttgttcccattctctcttcactgctaaattaggtaatcattatttccctgtgaatcttattaatctaatggttgcttctctcccctagcccccctcagttggttttgagactcagacagaaatgtgaaaatgaaatgctgaaggtcagaaaatagtttggtcagttgaatttgtattctccagttttgtggttcagatctgaagtaggagaggacaagagggaataagtttaaattgcagtcaggggaattcaagtcatctgttaaaaaggaccatctcattatatgaatgaaacccagaaggtttgaaatctctgctggtggattttaagaacaggttattccactgacgtgctgggatagtggaaaccaagaagctagaaaaaagcccagaacagtgattctcaggcttttctctttttggatggctttagtgggcacaagaactgcactgggtactcaggggtaatggcaatctctgagttttccctgtaaaaaatagtgctcatcagatgtagggcttctaatatggtttctgatgagacattaatgagataatgactggtttaagaaaactgatgcttggttttcattagacattataaccaaaataccaatttgtgtttgaaacagatagtgtaggcagtctgttggcaaaaccagcgcttcctcggtaggacagattgacagcagcccttaatgacacttggaaaatagctgaatgtcctgtgttggtaaaggcaaaatgtgaaggatctgcacactaatggtggctgtcttggtctgttttgtgcttttataacagaatgccacagactggataatttataatgaaagaaatttattggctcaacattctagaggctgggaagttcaaggttgagtttccagcatctagcaagggtctgcttgttgtgtcataatgtggtagaaggcatctcatggcagaagagcaaagaaagagagaggaagagagagagcaggagatggagaggaagggtgggagaaagaaagagataaagggggctgagcttgtccttttataaggcatgcactccaacaataatgaatccactcctatgataatggcattaacccattcataagggtagaaccctcctggcctaatcagctcttaaaggcctcacctctgaatactgttataatggcaattaaatttcaacatgagtttgggaggggacacacattcaaatcatagtggtggcatattggtgacaaattctatccccctgttattgctgagcaggcttaggcaagaccgcctcagtctgccttgatgatctttctgcccctcggaatgttcttacccatcccatccccatgtcctctctcctccctaccttgtcagtcagtgctcctcagggcagccagtagggacagtagctgcccgacctgaggtggagaggctgaatgtatgggacaaatgcattctgggacatttcctgcctcctcttccttctaggtctccaaattccccataacaaacaggaattgagtagattgagagtgaatctctgtggcatcacgacaaatctggaaaatactgtttaaaaaatatattacctggattgacctcttagatgttcttaatattttgggccagtggttctggaaactcttaattatttcatttaatcatcttaatttagttaacagtatttactattttaaacaaaagcctttatgaaagagagtctagccttttcccctggacccagagagacaaaaatatcatgttttcctctggcaagtcagtcaaaatcaaatcttgtatcaatgaacagatttcagagcctctgatttccacttctagaagaagtgatctatgagagtgtccttattcagaaacaaggtaaaatgattcatgtttatatgaaacaatctagtaaattgtatggatgctttcttcattttgttttacgataaaattaagtcattttctccccttcataagacattttgctttgtagcttcaatcgtcatagtgaagttcaatgaacaacatcaaaaatgatcatcatttggaaaaaaatcatcatttgtaaatgttcattagccaaactattgttcccagaaggaagatttaaacatattttttctttctctttcttttcctgtcacatcttttgtgctccttggtgtagatttcgaatttggtgaaaacccatcaccttctaagttatcatgaaataaaaagccagaacaatgtacaacatcgagcagtcaggtgcaccagttgcattttccttggttgtgagttacttgatcctttgctatctctgtggctggggaaattgcaccttgaaggtttgtgggttagctgcaaaaggtggcggaaaagttttacttttattccttcaggtttccttgtggtatgactttcacacttatggaccacgcccaccagagaccttgtatgcattaatcacggggtgagtctcttagtgagcacatctgtacatgtggatgacataaaaggaatgaatcaaatttcatctctatgcctagtttgggtagcatgtgactcattttcatgaccctagaactaaaacgtggtagttaaaacaataacgtgatatttatagggtaattttgatcaagcctgtcataattttctttcctgggtaagtctgtatgtcctttgttacatttctaattacactgacagcttttcagaaggagtgttagggtagaggttatttaaacataaaaccgaaggtttgacatcagttaagaatgaatgatttttatttcctaacatatattttaatgcaacaaaaacttactggtttattttcctccccaaatactttcattattcttattttattgtgtaatttttaaaaaaatcatcgaggcagaagaagaattgtgctggagtcccttcttcctacccaggcacccagcagccttaatattattcctctgttaaaatatgaaacaatggtgcattgttcatctcactcctgggtgggctccttcatgaagccctgtagctgcaggcctctttccagttacaaatttagtagagttcctccagtgacttggctctttccacatcactccagggatccctattaacttaacacactaaaaataacactgcagaattgctgaacgggtgagggagaccagcagggccgagggaagctaaatattgcttgcattgatcaggaacttgggccctgctcccatgacgcttgctttttgacaccgaagctcattaagaacatgtttgtgcatctgcaggcttgagagacaggggagtacatcaggcccaggggtgggagttgaggaagtgaggatgctgttgccagtcacagaggtcttttcctatcaacctagggactcgtttccttctgaattaatgcagcttttgtgtgagcctggactagacttgtcttcccttctggcaaacgttcttaggtgagaataaagccaactctcaccttgactttaattccaaactcagttgtaaacattttttttttgtacagagtaattgtctcatcaaatagtagatatgagcatgttttacttgtataaggctgagtagcctgtagaaagaattcaggttctgaagtcttaagtttagcatttgagtcctctgtctacattagctgtgttgcactgagctacttattgaaactcctccagcctcagattccctatttacaaaataagcatattaatggaaattaatgcctttctcacaggatgattgagaattcagatgggatagaattgaaagtgtttagataagtgtaaaagctgtagttagtattctccaaatatccacagtattaagttgagccaaatgaaatgccaatagtgaaccaattttgtcctacaaaaatggcagtttcatgtggttcaaccaaatatattaataggagttttggaatgtctttctcatcttacttctttaaattatccctgtgagacagaaatattataagcaaccttattttagcacctggggaaatcaaagtttcaaaggttacttgtaccaagttgaacaaaatctgtgagtgaacctgttcttccattactcagtctgtggtttcttgcccttgccctgcactttaagggcataaactgaaaatgagaatctagagaaagattgtgacaaaaccaccttccccaggagttgagcagagtgtaataaaggaggtcacagcctctataccatatactgacattaaggagtggttctcctgttaagcacgctttcttgagctggggctggctttcctgaagtgatgactctttcaggggctgagtgaacctctgtggggctgctgcatattagttccttctgtttattgtccctcagaatcaccaatatgtgcaaatcagtgctgacctggagatcggaggatctaactccccagagatgggacgtagctggtctacattggagtatgtccccattctgggcttgtctttggctctggcaggttttctcaacatcagcactatagatattttgggtcagacaattctttgctgtggcagttgtcctgtgcattgtaggatgtttagcagcattcgtggcttctacccactagatgccagtagcatgctctccattgtaacaacccaatatgtctctagacattgttaaatgtccaccagaggggcaaaatctctgctagttgagaaccgctgggcccaggagacctcagagtgggagagtgaggggctgagctgggctggactaatggtgacgtatttcaagacatttaccaacttgtctgatgaggttcaatgcacctaagagaattgcatttccttttctcctaccttctcatgaaaagtggtgcgattagataagagatgagtcatatttggggatattgttagttgcagatgagtaggaagagaggtatggagttgcctaggcccttagataggaagaaaagaagtctaactgaggaccaggttctctcaatttcctggcaaaaacatctgtcttcttgtttttctagttaattatggattttcatgagctcacccagctaatcaagtttaatgacactagacccaaatcacattattgttatttttcaaggctgtgttggaactgtgccgcattaacctgccagcagcctggagacaactgtagccactcaaacactggagaagcaatgcttttattagcagcacaaacagccctttcataacatgtcaccactgagattatgaagacagaataaaagcagcagaaaaagggaattttccataaagaacactttaggagctttattacaaagcagaaactttattgcaggatgggcaaggagacatgtgtcctatatttactaccatttccaatataaatttggtttggagagacagagaaaaagatacatataaagttgatattgctccttcatttccatgtcactgatgacagcttgaacaaggatttcccaaaaggctgtgagccacctttgtgggtcacatgctgtttgtgactctgttcataccctctttccttgtcctcaggaattcctggtgtagaatggacatagctgccagtcttgcaatagcctctggaccccactttcacctcagataaataaaaaaatattgtgtattcagcaaaaagttgggttctttgccattggactttatatagcctggggaaaaattaatcacatttttccatttagcatttcatttggtctggatatcaaaccaacaggtttttttctttcttttctttttttttttggttgggggaatattttaaaaagtaatgaaaagaatttcctcaattctgctgctgaagtgtcctctgttagatctttgcactgctttcaacacttcaaatccatatccacatttcataattcaatcactctcttctgaggggcagtctataattcacttctgggcctctactgttactttgtagactcttacacctaacaaacgaatcagaaggtattcttttctttacaagtgagagacttctacttgttagtacaccatgtcacaaagatttgcatgagattcccgaatctcattatgaaaaggccaggttatttgggcacacataaaagcaatgggatagactgcttgagttttggagtcagattggtctggatttgaatcctgggcccatcacttgttagccttgtgacactgggcaagttactttgccttttaaagctttagtttccttatctgtaaaattgatgtgataacaacaacaacaacaacaacaacaacaacagttagatcataatatgtttgtgaggatagagtgagaggtgcatgtaaactgtgaagcagaatgcctagacatagtaagtgctcatttggtgttaggaaatgagggtgtaattatttccaagatgggattagtcctgtgacatttgcctaatttagtaaattaggctgccctcctcaattagtttcttactataactattaagatctctttgtcaaatcacagttcgcaggtctgcttgaatatattttaggatatttaatggccagaagacttcccacagtaactttgttgctcaattcttaggaaagcagaagaggattataaataacaagcaataaagacagcaaatgtatgctccaaaagtgaggaaaaatcagtcctaggggaagtcctctgaactttattgcaaaagataggaaagagacaattggaaatgtgggaataatcatagcgcttaaaaaaaatcattgttactgcagaactaattggagttcattgtggtaaagaaacatttctggttgtatttatttaaagatggtgagcagaatcgaggaggaagagaaggtatttttaataaggaatcaaggtactgaaaattctggaactaacaaaacaaactaaaaataagactcaaacaggtaggattcactcatgcagggagattctacagtgacggcttaaggatcaaaataaacagattagggaactcaaaattgggaaaataaagcaagagccttttagggaggtccttggaccactttccccctctactatcctagattacagccatgttctgccaccaatgaagtcactgcgaaatttccggtgttcagtgaagtttcaggtctcattgagttattgtttgagaggcaacagacagaagaggtggtggctaaatagaggttacctggaggttgctagaatgattctttactgccttggggtggggtattgggatgaggtggaggtgtgtgtagttgagggagcagaagatggaatggggttaagggaaggaaattttaagtacctcttatgttctaatggcttttacatagacttgcttatataatcccataacaatcccaaagagatgatggtactatccttattttgcaggtgagattgacgttttgagaggtctagcaatttaccagaggttacttagctagtaagtgatggagcagagattggaacccaggtctgtctgacttcaaagcccatgaaaaacagagtccttgtaagtttttttctcttccccctcaagggaaaactattgaaaagaaataaatatattaggaagggatgtttgttggagctgggagctgtgcagcctgagggtcaggaggtgggatgccagcactcctttagctgccccagctggtgtctctgtatgttgcatgccctctgagtacactgtctctgggcctagttcagtttttctgggtctgggtcatcaactccagcaatcatggcagaagcatttatgaaatgaagatattgaaagatggaatcatggtagatgtaatgacaggttttgaaaaatgggaaagatattgaaaactgaaaatggatatctgttggaagagattttaattttctggtaaaataatggagtaagtaccaggagaaaagaaatctgtagtcggacgataatacagaggataatagaatcatgagcaataaacagttcaggtctgtaaacaaagcatcatgccaaaaaaccccccgatagcttcccactgatggaattatagaattggtggatgaaaggaaaaaataaatttaatatatttggatttttggtaacacacaagatagaggtggagaaaaaccagaataattgaatataacagtatagcaaagtatttgacactaggttggattggatttttctttgaaaaagttactttagttagactagatgttgctagaattgctattttgattgaaggtggctatttcaacagatattgaatatgataaatgatcatgatatttaaaaacaaactaagcccccaaacaaacaaaactacattgggaatattgcaaactaaaaagaaaacattctctttttggtttaaccccagatggattgtttcctgcttaaagggtctcttatgaaagacacctttgttttttgactttgctcctgtgatgatatgataatgcgtccctgtcccctttgcttgggaatcattaaaaggttctactggtccactaagaatcccacaggaagagattcatagaggccttggatggtgcagttacagctcagactgcagtcttttttttttttttttatactttaagttttagggtacatgtgcacaacgtgcaggtttgttacatatgtatacatgtgccatgttggtgtgctgcacccattaactcagcatttaacattagatatatctcccaatgctgtccctccccccttcccccaccccgtaacaggccccggtgtgtgatgttccccttgtgtccacgtgttctcattgttcagttcccacctatgagtgagaacatgcagtatttggttttttgtccttgtgatagtttgctgagaatgatggtttccagcttcatccatgtccctacaaaggacatgaactcatccttttttatggctgcatagtattccatggtgtatatgtgccacattttcttaatccacagactgcagtcttgaaacaaaatagtgatggacaaaagttttcaaaagtgatttttaaagaatatttctgtattttgatatgtaactggggtagcagacataattatgtggaaaaacaattgtctgttctctatcataaaacagagtgaagaaagtgtgtcaataaataatctctggggaagagaagtaatctttgttaagtatttaatatgtgattggtgcttacagaatcttagggaagcatattcactatatgaagccttcggctataatggaagaggacttgggagggctcaagtccagctccaagaaacacacttattattattattatttattgtggtaaagaatacataacataaaatttaccattttagctattttaagtgtacaattcagtggcattaagtacattcacactgttgtgcagccatcatcactatccatttctagaactttttcatcatctcaaactgttctctcagtaatgatccataactgaccaccatgagtaaaacattgtgctaggcatttgggtgacacagaattggataacacataggtcctgtattcaagcagctttttcctgtgttggacaaagattgacttagcaatgtgtcttacaaagcctcgcacttggagtgatgcaacttttttgcactcagggccaggaacttgccagtattcctttttgtgatctacagatctgcaggtggaggacacaaaagtagaaagaggtgtttttgcacagcatgtcagctcaaacttccacctttttgtgcctctcagtgtgctcatttagagccagcttattctgccttgtgagagctaatcatgtgtatctcttcacaactacttgtttggtgacatcacatcagtagtttgcaactggccataatgggagcatttacaccgcaaaagtcagcaaacactgcaagtcagagtctccctgctccccaacccccaatcagtacggtactgggtacgagttgcttcaaggatgaaatgaaattgagagattagtagtcaatttgtcaataaaaggcagttttagtttttggtttctgaaggctggtgccacagcctggtgtttgcaagactcctcagacagttttccagattgctttatggaagttgttctcatctttcaagggaagttttcactaactatatgactccacttgtttcttctctgataacttctagtcaccccagtggtcagggagggagctgaagcctgattagcaatgataagcctttaccttacccacattttgacaaatctcagattctgttgaattttcttcatcacatgtacatgaaagctggcatgaagattatgtgggcatccattagagttatgtaaaatgtgaagaactgtccttataatgaactttttagtagacaagagtagcacttttgtaggagaaattgggtaggcaaatatgcaaataacaacagcagcaacgataactacactacttaaaaagctgaaaatttccctcatcatgattattattaacttctaagcatgtatagttaggataacacagatttttctctggagagttgtctagtaggggtagtctggttaggaaacagtttctgtggcctcacacacacacctcttacacaaacacacacatacgcacacacacacatgtgtgggtggtgacagggacgatgtggtgggtcccagggacagcattaccttagtaattttctggaaacactcagctcacagacacagaactgcactttacaggaagctatccatcttcctcaaaacagttcagaaaaggaatccattttctttaatataaatcctctttgtcttgagatgtataaatcatcccttcgaaagaagtcctttgaggtatcaattcaaggcattctctcaaaacatcatccctcagagcagcccttccatggaaactaatcctttgtggctgccgaaacgcaaaattcatcccacttttcgctgaatttcccatcaaaagccctctgtagtcatcctagcaattaggatggcatattagggtcagaatgaccttagccaggtgtagttacctggatatgacgaagagcagagatgagagtctgtctggcacagtgatttcaaattcatgattctcttaataatgaacatgcttattaagtatctctttatgggagagagaagctgttgcacgtgctcttgtcagcccatgactgggtcacttactcatccttgggtacctttggaggtgaaagataatgttaagaccatctctgtgcacagtctggtttttgggacatagcaaatgatgatggtgcccttttcagattccctagcctccactttaccagtctgatttactcatgtccaggtgctgtgggtgctgtggctaatggcttacagtagctgccttcttttgagtactgctctcaggtgactgcagccaccttacctggggatatctgagaattacacccactttcatgattaatgccagagcaacacgtagtcatcactgcttgttgtggctggatgggaggagatttacaaaaccctgctctcttacagcaaaacaggacagatccaaggtgcaatttatgctccagagctccctatgagatcaggttgaggcaagacttcacctgaaagtcttatccttgtgtagtttctgtctcacctctgtcctgttctcttactcctttatagatttcttctgagagcactccctcaataaatcacttggacacaaatccttgtctcagtccctgcttttaggaaatgtaacttaaacaggtccaactcaagctgttacaaagaccttgcagggagttatttgttctcagagtgagggggctgtagtgtggtcctgaagttcagtttaaatgtaaccttaaggtcaattgcaacctctctggtcttgatgactactaattttgtgcataatacacttacttgaagctttagtctgaaatctatggttgtctgcattagatgtgaattggatatttctaaggaatgacatctactttgggcattctacactgtcctggttcactggatggatttctcaagcatgaaagggtatcttgctctgagtctgttgtttaattgggcaatgagaaaaacacaaaaatgaggaaggctgtggaaactgcttaatgaaagtgcccacggcatgtacaccggctaggaattttgagacttgagaaattactttgggttgcatgtagcaaggaagaagttttgacaagtggatttgaattgggcctaggagaatgagtggaggactttataaagggagagactgttggcttaaggctggaaaagattttgagccctcctgatagcagcatttactaccacacagggaaatagtgaggtgtaattcacattccctttactacagggggcccacaaagaggagtgcatggtaaaagggaacttccacactcccactgaagttgacataggcatgtgattgctttcgactattgaactgtgaggggataggtgccacttccaggcacacattttcacagccattatagcactctgcgtctccctttctgttgctgctgccatcatgggaacatgttgagatggagtttctgaatcatgcctttctttccagaaaacactgcaaacacataagctatgtccctggataaatcacttgcctcatctgagttttggttttctcatctacagaatgatgagagttgggctgtaattctcagattccttctagttgatctgattctttgataaagggcccacaatcaaatttaaaagacttttgtctcttcttggaaacacaaagaaatagggaatagaaatgtcttcttagtgaaaagaagttgttccttataacatcaatggattaaaaaaatcagaaatagaaaaatagaattaaatgtcctttagtcttgttgtaaacttctgacatttagaatctgactgcatagacttttgttctctcaaaaaacaagaacctgaatgctccctaagaactgtggaaagttaatgaatatgtttgaagctcaaatgaatattccagtaaagtcaggggtcttgtttatcccaatgggtgtagttgtgtattaaagatcgtatgaagttcaatttctttattttattttatttattgtgcagagaaacatctgttgttaagactcatttctttagggctgttgtgaacatatttctccaaacctattttgcttcctgtcatcccaaattcagccataaatccccttctactctgttttgtgcatcgttagaagccactttgtgagtaaaagtgctgcttgtgtgttgagctcttgttgcttatatgccatatttgtcgcctccttctcagcctagcaggaaattaccttctgctcaaatgatcccctttccttctctcactccaccatcattttaggataattttctctttccagatgatgttatggagtccttatgctgactgtttgtggcagggtctcatgtcctcatagaaacagaattcttatcttgaattaaagaaagggatcttaaaccttctgaaatcatctgctatttaattttagaggacagccttctgttactcaatttatacccaggttttatagaatttacacttctgttaacagggtgttaaaataggactcttctatctttgtttcagtggaggctgtaaaaatgtaatcacaaaagaatagattcttcccctcagtttctaaaatggagtgctagaccttctacgcaaggtggtgaaagaggtcagggggaagcagctttgtgacccttaatcaaccctcaaattgagattaaacatgattgagtttgaaaaggctaagagggagagagaatatctttaaagaaaggtggtggattgctctgtaactttctcattacgtctgcatggggcaaggaagagggtggttatatctggtgagacataatttagagacccattggggccttgatttgtgttccctggagtttagggactctagtggactggtgactgtctcatgcctgataaggtccacagaagagaactggatggaacaccctgtctggcatgggagtgaagaaggatggtggtgttggcaaacagcaacctttctactcgatgtcagtggtaattcaaggtgcatgatttttctaggaattgtggaccttcacttgggagctggcctggaggtattttggatttcactcgaggggatgaatgggctcacagatgggcagtgaaaccatgggtaggacatggacagactgccagatgcccagggcctgaggaaggagttataagcaactaagggcagaagaggtatggcttgcactaaggcgggggcaatcaagtgttttatgagaaagtttccttggaacccataaaagcatcccaaacaagaaagagttgtttttgaacatcagtcagcctcttagttcccctccatccccactgcagaggagcaaattcccattaagtggctttaaagggagacaaggcattgaaagaagaaagacattgagtcttgtttttaacgtaatggtattacttctattgagtattttactgcatattgataatacatttcttatcatgtattgtttgctagagtttgttattttttagggtatctgtttttctttagaatgttattattccatttacaaatactgagtgtcaactatgtgctagtaactggagtatgtattggaaaacaagcatgaaaatatgaattttggatctcaagtcctttacgctttggtaggggaggcacatagcaaacagaaaatttgaatgtagtgtgtaaggcctcaataatgtgtcatggaaccatatatagggataacggagctttgagttaagccgctctgccttttgatagatatattcatggctgtaattgtgtctctacctactattttggttgaaaaccattgatattgttatgtaatattttcattgttcacttctaaatattttataatttgtggtatgagttttttttaccagtagtgttacttactagtgtgttttcaaatttcctgaagtttttttttctgcctttggtttatgctttctaattttattgtactgatatcagaaataatttgtaagatagtgattctttggtatttgttaaggttatgcttgtataactatacatttgtatctacttatatttgtggtcaatttttatatatgtttcatgtgtgtttcaaatggatatatagcctgtaatgattggacgtagggttctgtatgtgtatatcaagtattgtttaaaccttatttatcttcactaattttcagtctgctaaatctatacattaccaagagacatatgtaaaagtcttctacctgattggatttatccagtcctccttgtaattgtttttgcgttatgtattttgaggctatgttgttatgtaatactggtttgagattaaatgttccttatgaattgttttcttttgacatatagaatattcttagttattccttataattaaggtaactatatatatcatttttcatccaagcagagacatttttatagtgcaaagggacatgaaaaataattgatagattttaattgatctatagcaggtataaaccagactctcctgtgcaaacgaggatgttgggtcatcatatttatgacacttgtgcttatggtgagttttttcacatgtgttttcattcttttatctaagcatagctccatcagggctggttgatgctgtgagaatctcaaggggtttgagccatggaaatatcccctagactggctttgcttttgtttttgaagatacctaggggaccactggctcagggacagttcttcaaatgatttctctggatattctcacaaatgtgggtagtaaaaatctagcctctcaaactatgcaaagcacaatctctgcagctttgatacctaacaggacactcttttcaccctgagtctgagcagaaacaagttttcttgttctatgccctagtgggcttttttcccttcccactgtgcctgcagcatttagagggtgttggttctaaagggtctttgttccaactcaacacctttcacaggccttgtctgctatccttcctctggcagtttaaaaacccaacatctaggttgttatttggtctaattccctttgttactgcatcatcaaccctccccttggctaagagacctgttatagaaacacagcctactgaggtcagccaaatgggctggatgctttgggcttcactttgcagaagaacagaaagacacaggaaaggcattgaaatttcagtcgttccattttccctccagccttagcttttataagtgggatagagtagagcaaatgcctaatttcttattttacaaataatgcaggctgcttttccactggaaggtaaaagtcattacagccagtttagatatcacataacaattttctcactcttctagtctgctggaagccttgtgaggagaaagagattggggcaggtgggtgaggaccagatcatgaggggccacagaagctgtgcaaaggagtttatttagatctgctttttccacttaagcaatttatgacaccctccaactttatcttttggccaaaaatcctcaaaatctcccagtgttaacttaaatgattgcattgtgattttacctaaatatttacagctataaaacctggtttaatgtcgttacatttatagcagctatgcaactatgaaaccaaagacaatttacaaatttaatacaaataaaactgtaaaactaaacaaaataaaataaaaaaattaattcaatgtgtcagatcacgttgttttggagaaatcaaattgtcacgctcaatatgacaatgatcctgctattggacagattgttttgagtttgacttgtactgcatgtcagagatgactcaactcttcgccattgttgtctattcaaatactgtgaaaccttaatttgggcagtgacatgaagtacttcaaccttcatttggcccaagcccattatctattcagcgtttatttccggactttctttcgttaacctggagaaattaaaatagtactacctggtgccatgtggttattaacagatgcaaatgtgggcagtaaaatgtcagtttagtacttggttttagagtggaaatccagatgattcagaatataattgtattaaaaaatgttaataccattgaaacgaacagaggaaaacattcttttagagattttaaagtcctctcgaatacacccgaagacctccacagctgagatctcaaatattttcccaaagataactgaagtgtttctgatacttcaagtacaagactagaaggtcaccatgagagggcaccacagtgaaggcagaagagtgagtggtctgcagcaagatgtcctaaagaccaacagggactatgctgaggttggcagggggtatagcagtagataattgtggtgttcccctcagaccccctctttaggctgatgcagctgctgggaatatctggtgttcatggttcacagctgtgtccttctctgggacttggctttagtgacagagatcttccttgcccaaggttatgccccttcctgtgaacctgcccatgaccagtgacttgctgatgtggagaaacaaaggcctcaatctcaggcaacattgaagggccatgagagctccagagccccccataggatcagctgaggcctcagttgcaattgcattatgggtcagcattgtcctcactcccttacaggtgtagctcctgagaggtctcccagtaaaacagctgcataccattacttatctcagaaactgattctatagtacccagtctaagacagatgttgatgggacatgtgatagaacagatgggagcatacactgctgtatccccggtactcagcacagtgcctggcacatcaccggcgatctgtaaatccttgttgaatgagtgaatgaatgatagatttgaagaagccagggataactgtcacaatcctggccttggatattgattagatgatggggttattggggggaatatgataaatgtagatattacaggttctctgatttacatttattgcctaatcctgtgctttctttttatgcctgattccataccttcccctgaccctccactatctcccctacacacaccctgtatggttttcttgaggtggctagtgtttcagggagtttcaaatgaattttgagactgtgtcagtaagaattaaatctgttgatgccaccctgacattcctatctaataacctatagttgagatgctaggttttctgtttttctgcaggtgtctgtgaagtgtggcaaatgctcaggagtgatgagtccgggtttagaggggcctcattgcacatagatacataaaatgagaataattaaattgggtgaggggaggaaatgcttggttctctgattgttccaaatttcatttccggaggtgtccagggagtgctttcatggtggagacaggagcattaccattttaacgagcccagtctccctgtagtttatggcttcctttcacccatggcaaatctgatgggcaattgcttttcctcttaaggtggcctttctgggatccaagattaggtcagacactcctccccactgtcaggaagcctcataaagcctgttatggctccttcctttaattggaattccaggccattaagtagtggcctaatttgctgccatggattgtttctcatattgactttgccaaagtaagaagcaaaccagatttgagtataagtctcctcctatgttgtgttacttaaagcgtcagatttgcatttctaaaagagagaatagttgaatatgctttgggggaggggcctaaggagtagaagtggagacactttagtcaaacagaattatggaaatgtaaaggtagctgggtatcgggaatcaagtatcctctgcttttcactttatactttttaatcccagaggtgaggtcatgaatctaaagtcacagagttgacttagggcagagagttaagcagaacctgggccatctgggtttgccaaataggaaggctttgtaggagctgtgaggtttctcttctcatgaccggcagaacagtttctgttttccatcggtagaacggttggaccagagaccgagggggacagttaagctgttggtgcaagtgttctgtttctgatgtatggctcacttgaccaggactgtcacctttcccatactaacagttgtcaggaaattgcacctgccaaacaaagtcttaaacagggaacacacttcctaggttatcaagactagtttgagaagtgtcttagaccagtggaattggagtttctgatcaaactctgtatgaattctaagctttccaaacaagagcagctcactcactgaggacccagcccacaataatctatgattgtggtcattattggtgttcgggcttccagccgcaggtttctccctggagtctgcttttaagatagcaaaagctctagcgggcatttggtaccagccactgcccgcagactggcactctgtgtaaatcccttagtcctgctggatccctcgaacaaagctaatctgccatctgacacctgggcttgtcacctttaattccaggcttctgagctgctctctccagggaaataaaaggtaggatttctctccttccctcacatactcttgacatctattattccactcatgggcatctgcctcaaggggcacccagctgcacctctctcctcttgtttaataatgtgaagtcatttctgagtttttgacctgcccatttttcagttttaattttcaggtaaaggattcctgtggcaacagaacagctcctttttagaagctgtttctgtatagaaagtttatgaacaaagacagactttaaaaaaagaagctgtttccgaatggtggaattatagacatgagggtaataggggaggtattttgaggcagaggatgtatttctaggcctcgacctctatcttcaccactacatagctaggctggagagggcgggttggctttacccttccttccaacttccagtgattgggcagatagattgacccaatttatctaggagaaatagcattgctgctatgggacaggggcagggcagagtatgtctgtaacctagggtgtcctttctttggacccagagtttagccaatacattaaacatacatgtaccagtgaaaggaagaaaaaacatatatgaatatgaatctatctatctatcatctatctatcatctatcatctatctatctgcctgtttatcatctacctatcatctatctatctatctatcaatcatctgtctctactatattttcttccttgtgtatgtgtgtgtatacacacactattatatgtatacattttgccctctacatctgtgagttctgcatccatgtattcaaccaacctcagttcaaaaatattggaaaaaaaaatcacatctgtactgaacatgaacagatatttttcttgttattattccctaggctatacagtttagcaactatttacataacatttacattgtattaggtattataagtgtgtaggttatatgcaaatactaagccattttatatgggagacttgagcatctgtggattttggtatccaaaggaagttctggaacaaatcccccatggatcctgagggatgactatatatgtatatgtatgtgtatgtttacgtacgtacactggtgacctttaaatgttttgaaagcacctaaaacatagtatattaaatatctttcagtttgaaatactgaagtagtttctatttcttgtgttgtactctggcttttaggcatagcttggagattcctttctatggaggaatggagaatcaagataattagctaatctccatctctgtgagctgggtttgagaattctgcttcttcctcaaaacttgcttcaggaattcccaggactatttactttacacattcccaacttatgcatgcatctattttggtagggtgcaattcaaggaccactgggcagggaatcagagcacctaagatagagcacttatctctctctaactggctgcatggcttggggcaagctgggcaacttccgtgagctttaacttcatcatctgtaaaggattggaaccctcccctcttgtatcagaggattgctataagaaaccaacatcaataacaagaactgtcaagtgaccaaatatttacagataattgtcaatattccaggctccatgtgaagcactgggaacacagctgaaagtgaacagtggtgtgctggtaaaccagctttccataaaagaaaagccctcatttgtagcattggccaatgtctgtggtgtaagtactcctaccatggctgatttcaagccactgacctcactgaatgcagaattaggaataaatgcatccaatgagctctctttctctctttttttttttttgaaatggggtttctctctgtcgcccaggctggcgtgcagtggcgcgatctcggctcactgcaagctccgcctcccggattcatgccattctcctgcctcagcctcccgagtagctgggactacaggcgcctgccacccttgtgaacttgctccaggacacaactgacacacagccttgcttggtgtaaagattacggcacagagacggagagccagccatcaaacacttagtctgattgcaagctgaagtaagtgctataaaggcaaagaataggacatgatgagaaaataatacgggtgaagttaatttaggtgactggcctggggaaatgtgacattgaagctgagacccaaaggatgaagatgagttactcaagtaaggagagggaggaggaggaagcaggaagaacatcccaggtgtaggaaacagcatgtgtgagagccttgtgaccagaatgagtttggcgatttgaaggaaggcagtgagctcagagggattgcgggtagatgagattgcacagggaaacagagtccagatcatgtagagccctgcaggcagtgaagcgtgttgggtttaacccaaagcacactgggaagtctttgaaagttggaagcctggatgtgacatggatgatcggggcaaacatgcaagtaggaatgctatttaggaggtatctgcaaaaatccaggagagagaggctgcctgtaatggacatggagaaaagtggactgattcaagatacaatttggaggtagaattattatttactgaacctactgttatttatgttttgaaccttaagttttttttaaattttatttatttatttatttatttatttatttatttattttttactgagacagagtcttgctctgtcgcccaggctggagtgcagtagcatgatctcagctcactgcaacctctgcctcctgggttctagcgattctcctgcctcagcctcccaagtagctgggactacaggcacacgccatcatgcccggctaattttttgtatttttagtaaagacagggtttcgccatgttagacaggatggtcttgatctcctgccctcgtgatccgctaaaattgatcatttggtgtacaattctaaacattttagcacatggagagccaggtaatcatcaccacaacaggattcagaacagccccatcgcctcccaaaaacctcctagtgctatttttttttttgtagtcacattctctccctcaacagatctagaagcctaacagatctagaagaagtagggtcatgacctgatcccggtcagaaccactatttatctaggtcccaaatgtgttactgacagtcctgtatttaggagcatctaacagactcagcctttcccagggggttatttccaccccttgacccttcatagacttcttactctaccagtatgttcagtccccatcttaataggcacagaagatgcaggaaaagcctgtaggagttataaaagctcaccaaaatttccacatcctgagatatatctacaaagtcagtaatgggggaaggcaatctatttttaggcacataaataatttaggtcagaatatttcaggtagcattgcattatagctgaaaacaaacctcagtttgaatggttataaagtgatttcaataaacatcatttctaaaagcataagcattttaattagctcatctgtaactccacagggcctgctgagatataaatatacatatatattcataatatagattgttgtgaatagatttcttattagttgcatctctctctttcttcctctcccattattgtttttttatttcacaaaatgtcctctatctttgagtgaaagaagagttctgtttacttgtgttctggggtcatagaaaatggataaaattattttctctggaaaacaggagggttcaggatagttcaaatatctcaatttccccaaagaacttcatgtatcacttcatctagagttccctggttccagggaggaacatatgagttaactgaggtcttgtcattggtccgggcactagaatacaagagagtaccctacagatgagcagctaaaaggggagcaggggaaaaagagagagactttcttcccagcaattctaggctctattctgggtaaataaaggttttgtgtcctttttcttgctgggtcctctcaggagcacagtgagacacactctgatttccacactgcagatggcccacagcataacttttccaaggctgtatagttatgccttgaatccagaattcatgtctgtgaaagaagacaggctatatcaggggtcagccatgccttttggttccagtgatgttcgaaggtgcactaggaagatgagagatcttttaagaaagtggagaaacagaaggaaacacaaggcaataagttaatattaaaggtggaaatagagggaaaacaaaaacagcccttgacatccgtgttaggctgttctctcactgctataaagaaatatctgggactgggtaatttataaagaaaagtgtaagatctgcaggccatacaagcatggcgccagcatccgctgggcttctggaaggcgtcaggaagcttttattcatggcggaaggtgaagcagggacaggcacgtcacatggtgaaagcaggagcaagggggagtggggagatgctaaacacttgtaaacaaccagatcttgtgacaattcactatcacaagaacagcaccaagccatgaaggatctgctcccaagacccaaacacctcccactaggccccacctccagtattggggattacaattcaacgtgagatttgggcagggacaaatatccaaactatatcaccatctataccagcgagaacttctgtaagacactttggagtttgcagagttcttttatgtctactgacttatgatttcagaggcattggtggaaaggactcagattttgtaaatagacatactggttctaagccccttttgaaccacagctgagaaagttgtgtggcctgagaaatagccctaccccagatttggaattgaactttgctttggttatctgttgctgtgtaacccactaccctaaaacttagtgggtaacaacaaccacaattttaccacaatttattttctctcgtgactctgtgggctgactacacaggtctcttgcttcatgtggtgtcagctagactcttgagatggcgagtaggtgcaaaatgccctgactcatatggctgagaaatggtgcttcctgctgattgagagctcagctgggttgttggctgagggcctttgtgttcatccatgtgggcctttccatatggctgcttgggcttcctccaagcatggtagctgggttccaaggaggagtgttccaagtgaacaagccttaacgtgcaagtatatatcaagcctccatttgcatcatgtctgctaatgtctcattggacaaagatagtcacatggccaagttcagagacaatatggtaggggactaaacaaagacatgaatactgggaggttggttcactgaggccatcaaaggaactgtaacaatctactaccatctcgaagaaaccattttgcaacctcagcacacaaaacattgtttgtggctcagcctccatctgaaacttcatgtccaccataaactttcttgccaaattctaatagaatgttccttctgatactgagtcacaactggactgccagttttatgcactggtctttgttcacttcttgtgggacacagtaccagatattacaagcaacttagaagaaatatgagctcttattcttgccttaagaaaacagttgtccaagtgctgagatgggaacaagaaagagcacattggtaagggaggggcagaaattcagagaagaaaaagataaatgaaggacagaatgggaagagaggaatgctttcttcccttttaccatctcttctttccttccttccctgtttttgtccttcttcctttctattctcgtattctatacccaaccttttctgaccctcttctcatcttaggtgtgagatcatcctaagtaatagtgaatcaggctcatctattgtattaattatctattgctgtgtaacaagttatcctaaagttttgtggctcagaacaacaataaatatttattatcttctatatattttatgggtcaggaattgaagagtgtccaagttgggtagttctggatcaaggtactcatagcatagctgtcaagatgtcatctggggtggaagtcatgagaagatttgaatgggtcaggagggcctgcttccaaggtggctcactcacatggctgacaggctggtgctggctgttggtgagtggtcacatcctccccatttgagcttctgcacaggctgctgattgtcctatgacatggcagttggtttgtcccagagcaaggaagccaagagaggagagtcaggtagaagctatcctttttatgacctacctttagaagtcacatagcatcacttctgccttgttctgttcattagaagggaaaccccaagtgtagtctgctttcaatcagaggagaattagccttcaccttctcaagggagtagtatcaaagtatttgcagacatttaaaaattaccatattcatgttttcaaaaggatcctcttgaagtcactgagtatattctgtcccacttcagtaatttctgaggtgggaataggtgggtgataaggaactcttaccatgcagtggacaaatgatttttcagcaaccaagttcttgttcacctttgcaagaaagttcccttctcacacatgctacagctaatgctgacccagtgaggctgaatgatggctctcaaatgccagaaagctttcgaaaggacaaagaagactggaatggagaaggtgcacgagtgactgctgtcagtcaggcaaatcataaaggccagtgctccccttgtccagttagagaaccaggcccttttgaagatgaaccttctgtgactgtccctttgcttccctgaaatgaagtgtatttagaccatgtgcttattttttacctcccctcgtgtgctctgatttattaacgtgtgttatacactgagtcagtttaattaattgtagctcatatgctaatatcactctcctttcccactactttccttgaaggaatctgcaaagattagatttgacctgctgctgtgaaaaatacccaaaaggaggatggtgaaaactggagtaagggatcctcaacttttggaaagaattatctgggatattaaaggaatagataggttatgctttttttggttgttgtcgtccctttctctgttcaggttttctactgggacttttttggagttggtcttgctcaggctgggttctgcctggccagctcagttgtaagtaggagagtcttttttttttttttttttttaattattatactttaagttctagggtacatgtacacaacgtgcaggtttgttacatatgtatacatgtgccatgttggtgtgctgcacccattaactcaccatttaccttaggtatatctcctaatgctatcccttccccgtcccccaatcctacgacaggccctggtgtgtgatgttccccaccctgtgtccaagtgttctcattgttccattcccacctatgagtgagaacatgcggtgtttggttttctgtccttgtgacagtttgctgagaatgatggtttccagcttcatccatgtccctacaaaggacatgaactcatcattttttatggctgcatagtattccatggcatgtattgctacattttcttaatccagtctatcattgatggacatttgggttggttccaagtctttgctattgtgaatagtgccgcaataaacatacgtgtgcatgtgtctttatagcagcatgatttatagtcctttgggtatatacccagtaatgggatggctgggtcaaatggtatttgcagttctagatccttgaggaatcgccacactgtcttccacaatggttgaactagtttacagtcccaccaacagtgtaaaagtgttcctatttctccacatcctctccagcacctgttgtttcctgaccttttaatgatcgctattctaactggtgtaagatggtatgtcattgtagttttgatttgcatttctctgatggccagtgatgttgagcattttttcatgtgtctgttggctgcataaatgtcttcttttgagaagtgtctgttcatatcctttgcccactttttgatggggttgtttgatttttttcttgtaaatttgtttaagttatttgtagattctggatattagccctttgtcagatgggcacattgtaaaaattttctcccattctgtaggttgcctgttcactctgatggtagtttgttttgctgtgtagaagctctttagtttaattagatcccatttgtcaattttggcttctgttgccattgcttttggtgttttagtcatgaagaccttgcccatgcatatatcctgaatggtattgcctaggttttcttctagggtttttatggttttaggtctaacatttaaatctttaatccatcttgaattaatttttgtataaggtgtaaggaaggcatccagtttcagctttctacatatggctagccagttttctcagcaccatttattaaatagggaatcctttccccattgcttgtttttgtcgggtttgtcaaagatcagatggttgtagatgtgtggtgttatttctgagggctctgttctgtcccattggtctatatctctgtattgttaacagtactatcctgtactgtagccttgtagtatagtttgaagtcaggtagcatgatgcctccagctttcttcttttggcttaggattgtcttggcaatgaggtctcttttttggttccatatgaactttaaagtagtatttcccaattctgtgaagaaagtcattggtagcttgatggggatggcattgaatctataaattaccttgggcagtatggccattttcatgatattgattcttcctatccatgagcatggaatgttcctccacttgtttgtgtcctcttttatttggttgagcagtagtttgtagttctccttgaagaggtccttcacatcccttgtaagttggattcctaggtattttattctctttgaagcaattgtgaatgggagttcactcatgatttggctctctgtttgtctgttattggtgtataggaatgcttgtgatttttgcacattgactttgtatcctgagactttgctgaagttgcttatcagcttaaggagattttgggctaagacgatggagttttctaaatatataatcacgtcatttgcaaacggggacaatttgacttccccttttcctaattgaataccgtttatttctttctcttgcctgattgccctgtccagaacttccaacactatgttgaataggagtggtgagagagggcatccttgtcttgtgccagttttcaaagggaatgcttccagtttttgcccattcagtatattggctgtgggtttgtcataaatagctcttattattttgagatatgtcccatcaatatctaatttattgagagtttttagcatgaagagctgttgaattttgtcgaaggccttttctgcatctattgagtaatcatgtggtttttgtctttggctctgtttatatgatgggttacgcttattgattgcgttatgttgaaccagccttgcatcctagggatgaagacaacttgatcatggtggataagctttttgatgtgctgctagattcggtttgccagtattttattgaggatttttgcatcaatgttcatcagggatattggtctaaaattctctttttttgttgtgtctctgccaggctttggtatcaggatgatgctggcctcataaaatgagttagagaggattccctctttttctattgattggaatagtttcaaaaggaatggtaccacctcctctttgtacctctggtagaatttgactgtgaatccatctggtcctggactttttttggttggtaggctattaattattgcctcaatttcagagcctgttattggtctattcagggattcaacttctttctggtttagtcttgggagggtgtatgtgtccaggaatttatccatttcttctagattttctagtttatttgcatagagatgtttatagtattctctgatggtagtctgtgtttctgtgggatcggtggtgatattccctttatcattttttattgcgtctatttgattcttctctcttttcttctttattagtcttgctagcggtctatcaattttgttgatcttttcaaaaaaccagctcctgcattcattgattttttgaagggtttttgtgtgtctatctccttcagttctgctctgatctttgttatttcttgccttctgctagtttttgaatgtgtttgctcttgcttctctagttcttttaattgtgatgttagagtgtcaattttagatctttcctgctttctcttgtgggcatttagtgctgtaaatttccttctacacactgctttaaatgtgtcccagggattctggtatgttgtgtctttgttctcattggtttcaaagaacatctctatttctgccttcatttcgttatttacccagtagtcattcaggagcaggttgttcagtttccatgtagttgagtggttctgagtgagtttcttaatcctgagttctagtttgattgcactgcagtctgagagacagtttgttataatttcggttcttttacatttgctgaggagtgctttactttgaactatttggtcaattttggaataagtgcgatgtagtgctgagaagaatgtatattctgttgatttggggtggagcattctgtagatgtctattaggtctgcttgttgcagagctgagttcaattcctggatatcctttttaagtttctgtctcattgatctgtctaatgttgacagtggggtgttaaagtctcccattattattgtgtgggagtctaagtctctttgtaggtctctaaggacttgctttatgaatctgggtgcttctgtattgggtgcatatctatttagggtagttagctcttgttgttgaattgatccctttaccattatgtaatggtcttctttgtctcttttgatctttgttggtttaaagtctgttttattagagtaggattgcaacccctgcttttttttgttttcccattagcttggtggatcgtcttccatccctttattttgagcctatatgtgtctctgcatgtgagaagggtctcctgaatacagaacactgatgggtcttgactctttattcaatttgccagtctgtgtcttttaattggagcatttagcccatttacatttaaggttagtattgtcatgtgtgaattagatcctatctttatgatgttcgttggttattttgcttgttagttgatgcagtttcttcctagcatcgatggtctttacaatttggcatgtttttgcagtggctggtacaggttgttcctttccatgtttagtgcttccttcaggagctcttttaaggcaggcctggtggtgacaaaatctctcagcatttgcttgtttgtaaaggattttatttctccttcacttctgaagcttagtttggctggatatgaaattctgggttgaaaattcttttctttaagaatgttgaatattggcgcccactctcttctggcttgtagagtttctaccaagagatcagctgttagtctgatgggcttccctttgtgggtaacccgacctttctctctggctgcctttaacattttttccttcatttcaactttggtgcatttgacaattatgtgtcttggagttgctcttctcaaggattatctttgtggcattctccgtatttcctgaatctgaatattggcctgccttgctaggttggggaagttctcctggacaatatcctgaagagtgttttccaacttggttccattctccctgtcactttcaggtacaccaatcagatgtagatttggtcttttcacatagtcgcatatttcttggaggctttgttcgtttctttttactcttttttctttaaacttctcttctcacttcatttcattcatttgatcttcaatcactgataccatttcttccacttgattgaattggctactgaagcttgtgcatgcatcatgtagttcttgagccatggttttcagctccatcaggtcatttaagttcttctctacactgtttattctagttagccatttgtctaatcttttttcaaggtttttagctcctttgtgatgggttcggacatcctcctttaactcggagaagtttcttattactgatcgtttgaagccttcttctctgaattcgtcaaagtcattatccgtccagctttgttctgttgctgacgagcagctgcattcctttggaggagaagaggcgctctgatttttagaattttcagcttttctgctctgttttctccccatctttctggttttatctacctttggtctttgatgatggtgacgtccagatggggttttggtttggatgtcctttccgtttgttagttttctttctaacagtcaggacccttagctgcaggtctgttggagtttgctggaggtccactccagaccctgtttgcctgggtatctccagtggaggctgtaaaacagcaaatattgcagaatggcaaatgttgctgcctgatccttcctctggaagcttcatctgagaggggcacccagccatatgagatgtcagtcagcccctactgggaggtgcctcccagttaggctactcagggatcagggacccacttgaggaggcagtctgtctattctcagatctcaaactccatgctgggggaaccactactctcttcaaagctgtcagacagggatgtttaaatctgcagaagtttctgctgccttttgttcagctatgccctgcccccagaggtggagtctatagaggcaggcaggcaggcctccttgagctgcgctaggctccacccagtttgagcttgctcccccagcctcgctgctgccttgcagttcgatctcagactgctgtgctagcagtgagcgaggctctgtgggcatgggaccctccaaaccaggcatgggatataatctcctggtgtgccgtttgctaagaccattggaaaagtgcagtgttagggtgggagtgtccccattttccaggtattgtctgtcatggcttccgttggctaggaaagggaattcctcgaccccttgcacttccctggtgaggtgatgccctgccctgcttcggctcatgctctgtgggatgtacccactgtctgacaagctccattgagatgaacctggtacttcatttggaaatgcagaaatcacctgtcttctgtgtcactcatgctgggagctgtagactggagctgttcctattcagccatcttggaacctcatcagtaggagagtcttcagctcagtgtctcggtttgagttcttgttataatagcactaggcataatactgggcatacagtggatgctcaggagatgactatggaataagcaagtaggatagggtttggagaggagaatgaggcttgggctgaaagctgaactgagttctagttttggatctcttgctaagcatgtcatcacttgagtctcttggacttgactttttttgtgtgtgtgaaattggagagtcagaggtaggttggggatcccaggcattccatggttctgggatagtgacatggtttgaaggaattagaactgtagtcaccagatgtggcaatatttagagagatgctttagctcaagaccagctctatcctgataggatggcagaaactggagatagaagccccttgtgacctggcgcaggttgaagaccctctctggaccacacttgagccatctgtagaataaagaggaagtggctgcttttctagctctaggtcctctgcttctaaatactttttccatcagcagctgtactaagtgaggatcccatgatattacttggacaatgccaaacattggtgatagaacacattcagcatgtcctggagatgctggggactcttgtttcctgaaggagactgtcaagagggtaagatagagcctcttttcagtcatgagctctctgctgtagtattctcttgcaagtttgagaatgatctaaatctgggcattcagagggctgttgattctgaatcttttagaggggaggcaattgttaagataatggagtacaactccttcattcttctcacgaagaacctggaactctggagaggtgaactacataacaatttagcaaattaatgagtaggctcagaccagcactttggtgacttctcatggaaagtttctttctatactaagcctactcctgccttcaaggagttctatagatttccattgtcagtatcaagtaggtggatgtctagggtgtagcacagtgcctgccacatatagcaggtgctcaataaatactggccaaagaaacaatgtgcacaactgttacaggctcttccaatagtaaagactaggatttgtcatgtggattccaagttagtagtcattcttccacgccaaattcctcattccctactgccttcacttttgaacctttttgtaaatactcagagatattctttccttttatttactttatagattgtataaaagaccatatcccagtccacttctactgtaataataagacctggacacatggatattatggcttatgtgcaaaaactgggtcactttcaaactaatttgtagaacttgtccaagggaaggatgtgtaaagtcttgatttaggatttaaacaaagatgtgcaaataaaaaaacagatgtctctttattgatttaggaaattgtaatgtcaaaagttatttataaaagtctcactccttttgtattcctaaaaactcattttcactgctattaatttgctactttgtgtcctcaataagggtattacaaatttaattgattttgaactcactgattttgaacttaatgaaattgtttatttcagtaacttcactttcttttattttcttcaccattaaacttggtgatatgaatcccaaactgatttacctaacagccaaaggggtgaaaaataagagatctcaattttttggaagttttccaattttatatcctagatgacatactggttcaagaagtcattttggctccttttcttgaaagatgttttctttaagtctccatatttgtcttgctgtttaagaagaaattgattctctactctgcttaaagaacatttgatgacttcccattttcctgaagagaagctttaaatgtttaacatggcattcttagctcttgatgatctggctgccaatgtacctcattgtctatattccttcttgttactcctgccacacattctttgctccttgtccctcaaaaacagtaaaaattttagtaacaacagtgtattaattatctcttgctgcataacaagttatcccaagcattaggtattatttcttggattctgtgggtcgggaatctgagcacagcttagctgggttctctgcttcagggttccttctcttacaagactgcagtcaaggtgtcagcggaggctgcagtcatctcaaggttcacctggagcagaaactgtttccaagctcactcatgtggccgctggtagaattcggttcctcctggactgttaagctgagggcctcagctccttgttggctgttggccagaagtcaccttcaatttcttgccaagtggccctctcatcaaatcacgcatgaaggggagtgggtggagagagagagggagagagacagcaagagcgagtgggacagagagagagagagagagagagagagagagagagagagagagagagagagagagagaatcagcaagttagaaagctgtcttttgtaacctaatcagggaagtgacatctcattacctttgctgcttctagtggttagaagcaaccaatggaatgaccagcacattgtaaaggggagaggctctataaaggcgtgaataccaagagttggagataatttagagtcatgtcagaagctgccaaccacaaacaatatatacggttaacaattactgagtatgtactatgtaacagacacactgttaagacctttcccatatagtatttcatgcagtccttacaaaaattctagtcaatggataatgttttcatttcaatttcatctcaaaagggttaaataattagcaagtggcagaggcaggatttgagccctggttagggcaagagacaacgtccttatttctccatcctcagagctcagcactgactctgtgacacaagaacctagtaggtattgagtaactgcaaaataaatgaatgaacgaatgaatgcagacttgggtcccactgcaactacttttgcccaaactctggtcctaggccttgacccagtctaaataatacataaattaccatgtggttaaatagggctgaattatatttaatcagtgaggagaactctgaattttaggtgcaggactcaagagaggagatgtggttttgtaattttttctcatgtatagtcacctgtcacttaatgatggagataagttccaagcaatgcaacatcaggcaaatttgtcattctgcaaacatcataaggtatacttacacaaagctagatggtgtagcctactacacacctaggctatatggtgtagccagttgctcctaggctacaagcctatacagcatattattgtactaaatactctaggtgattataaaacagtggtaagtatttgtgtgtctaagaatatccaaacacaggatgggcacagtggctcacccctgtaatctcagaactttgggaggcacaggcaggtgggttatgaggtcaggacatcgagaccaccctggctaacatggtgaaaccctgtctctactaaaaatacaaaaaattagccgggcgtggtggcacacgcctgtagtcccagctactcaggaggctgagtcaggagaattgcttgaaccagggaggcggaggttgcagtgagccgagatcgtgccactgcactccaacctgggtgacagagtgagactcttctcaaaaaaaaaaaaaaaaaaaaagaatatctaaacacagaaaaggtacagtaaaaatatggtataaaagaaaaaacgggccgggcgcggtggctcacgcctgtaatcccagcactttgggaggccgaggtgggtggatcatgaggtcaggagatcgagaccatcctggctaacaaggtgaaaccccgtctctactaaaaatacaaaaaattagccgggcgcggtggcgggcgcctgtagtcccagctactcgggaggctgaggcaggagaatggcgtgaacccgggaagcggagcttgcagtgagccgagattgcgccactgcagtccgcagtccgacctgggggacagagcgagactccgtctcaaaaaaaaaaaaaaaaaaaaaaaaaaaaagaaaaaacggtacatctgtatgggtcactttgccatgaatggaacttgtaggactggaagttgctctgggtgagtcagggagtgagtggtggatgaaggtgaccctaaggcattactgtacactacttagaccttataaacactctacacttaagctacactaaatttattaaaatttttttcttcaataataaattaatctttgcttactataacttgtttactttataagctttttacttttttaaacttttaaactgttttgtaataacagtttacaatataaacacattgtacagctatacaaaaattttctgtatattcttgttctataagctttttcctatttaaaaacttttttattttttacattttaagctttttttgctaaaaactaagacacaaacacacattagcttaggcctccacagggtcaggtcatcaatatcactgtatcccacttcctaatcttgttccaatggaaggtcttcagtggcaataacatgcaaggatctgtcatctcctgtgataacaatcctgcttctggaataactccagaatgacctgccttgtttcacagaggttgttttacggttaacttaaaaaaaaataaggataaggagtatactctaaataagaagcatagtatagtaaacacataaaccagtaacacagttatttattatcatcatcaagtattatgtactgtacataattgcatgtgctatacttttatacaaccggcaacacaattaagttcgttgacaccagcatcaccacaaacaggtcagcagtgtgttgtgctacaatgtcgcaatgcctatgaatcactaggcaataggaattttttagctcaattataaatcttgtggaccaccgttgtatatgcagtctgttgttcactgaaatgtcattatgcaggacatgactgtagtaaaaagcagacttcattactactgagaacttcaaaaggatatccaagaaattagaatgccaacacccaggatgagagattatggagttgtaaaggaaactgctacaaacttgagaggaatattacaatagtgttaggaaggtggaattagtagctagcagctggcatgcttttaaatctgacttctctttcttaaagacaaataagattgtcttagtctgtttatgctgctataacaaaataccacaaactgtgtatcttataaacaacagatattggtttcttacagttctggaggctgggaagtccaagatcaaggcagatttggtgtctggtgaggacctgctttcagactcacagactgtgccttctgactgtgttcttacacgacgaaaggggcaagggatctctttcagacctcttttgtaaggacagcaatcccaatcatgaaggctgtgctcccatgacctaatcacctccccaaggcctcacatctaaaaccatcaacttatgaattttgtgggggacatcagcattcagaccatagtagggattaaaggcagcaaacaaagaactagctgaactggagacaaagaaattattctgtgtctgtggaagaatggattaagaaagagtgggcaagcaaggagtagggacaaagagaggagggttgtttttgcatctggcccttaactcaacaactttcttttgtatctctccactttcaggattcactgaggttgttgggctcctgtgggaataggttaggtggacgcaattatcatggctgataaataaatggcattatagtgtcacaatgaaactcagcacttga

SEQ ID NO: 47 - DNA, 166111 bp, Homo sapiens
gcttggatgaggagccagacatccagttctccagcttcagggttgggggagatcgggaagctggattcagatctgagagccctttgacgaccagatcattcttatttagaacgaactaattcctaaggccactcaccagaatggggttatttcctccttgtgagtgaggagagtggtgggtagggtgggggaaagacgaggcagggtctactgtgggactcattttccttgccttggctatgccagaggagctcactgacctaaggagtagctgtccagaaagcccacccagccagcacagccaccctggcggtgcaaaggctgggctgaccggacttctgtgccccccacattcccagactggacgtataaaaacacacactagttagcattagtgtttgtagcgccactttactgccaatagctgacattgccctgggttaggggagaataaataaaatctgtggcatcagacaggtattaccgaggcgaagagtggactgggctttcgtgggcacttaccctgggaagggggtatgaggtggctggagaagtgttcatggagagtgtctctctcctgcccccaaggccacggaatcttctattccttctttgtacccaaagggcaaagtggaggccagggtctctttgctaaggagctaagtaggggaaagaggcagggggagctcccagcaggaccaaagggagaccaaggtttggaccccagaacagagcaggaacccagagtcctgtgcagtcacaggatgacgcagggaggacggctgttggtgatcttttctagggtttctccattactggctcttcggatggcctcaatgagctagaggagtggaatgacaggatgatgcactgttggggtagggtgaccaagaggtcctcccaacgctgtaaatactcacatctttctcatagggaaagcccccattctccagcttggagaacaccagctgtccatttatctctatctcaaaggcacctggtaagaaatcaacagataaatggtacactgagaacataggcagaagtcaggagttcctccaaaggggtcccccgccttcaagtcccccatcaatcccactggagacccatttgtagctccttaagcaattccccaaccctgggtcaactccagggaacctgagggaggcctcgcctgtgtgcccctcgcaacactcaataaaggactccctcccctccaaccctacacgattgcagtctaataggtttttccccacaggcctctgtgacaccccctgacctatggaagggaactcatgttggccggacattttaccatgtgccaggcactgcgggcactttacataaagcagccaatgtcagaactagaaagcgggagagctgggattcagagcacagactgacccagcaggtgttctgcgagcctcacctgtgcccccgaggcgcgactcgatctcgatgcccggatactgctccttcacagcactggccagctccaggtaggtcgcctcgaagccgcagggttcactggggagtcaagagatggggctgggctggggattcgggggtggggcctcccgtggacccacctccgtccggcccgcgggaccagggtgcgggtcctccagccggggccgctcaccagtactccaccacgatgcggaccccactgcccggctcgacctcctcgggagggggcgctacggacgtctgccccggctccccgctcatcgcggccggctccgctcgggcccctgcttccgggtgtgacgcgaaccgcgggcacgtgacggggcggggcctctggagcggggaggggccgagggtggcgttcgggcgccccctgcgggtctccgccactgctacgttttgacctcgtagggcagctccggagctcgctccccgggcaggggctgggtccggtccagaccctccttccctggcccggtctcccggagtgccgggcttccccactccccactcccggtgtccgctggacttcatggcttcatttactctaatggactatcttagactgcaaagcgcttttcagtttacaaaagaaagagaaagtggtggggcaagcatcctggggatgggggtgggtgtggctgatgcatgaaatagttgacattttctcgctaacatgccgatggcattttttttttttttttttttgagacggagtttcgctcttgttgcccaggctggagtgcaatggcgcgatctcggttcactgcaacctctgcctcccgggttcaagcgattcttctgcctcagcttcccgagtagctgggactacaggcgcgtgccaccgcacccggttaattttgtattcttagtagagacagggtttcatcatgttggtcaggctggtctcgaactcttgacctcaggtgatccaccagcctcggcctcctaaagtgctggaattacagacatgagccaccgcgcctggcccagttttttgtttgtttgtttgtttgttttagtagagacagggtttcaccatgttcgccagactggtctcgaactcctgacctcaaatgatctgcctgccttggcctcccaaagtgctgggattacaggcgtgagccaccacgcccggtgctgatggcatttggaaccaccctgtagttacatacacaagtgtttctgatcccaaagctctaaactgctttttccagtcttttgcagctgcttcttgcctgcactggaaaacagtagatgctcttcaggctctgtgcccccaacagtttctgcgcatcccttctcatccagcctctcactggggggctggcgtcattattcccattttgcagctctggaaatggagtctgcacaagtcctcgctgccttttccctgcctacagtaccactatggtatcctaacacgccacccactctagtgtccctttaggctatttatttatttatttatttattttgagatggagtctcactctgtcacccaagcttgagtgcagtggcgcgatcttggctcactgcaacctccacctcctgggttcaggcgattctcctgcctcagtctccctagtagctgagatcataggtgccagccaccacgcccagctaacttttgtattactattattattatttttttgagacagagtcttgctctgttggccaggctggagtgcaatggtgcgatctcggcttactgcaacctctgccttccggcctcaagtgagtctcctgtctcagcctcctgagcagctgggattacaggtgcccaccaccaagccagctaatttttctatttttagtacagatggggtttcaccatgttggccaggctggtctcgaactcctgaagttgtgatctgcccatcttggcctcccaaagtgctgggattacaggtgtgaaccactgcacccgggctcattttttttttttttaaaccaggcaggtcgtagtggctcacacctgtaatcccagcgttttgggaggccaaggtgggcggatcacttgacgccaggagttcaagaccagcctggccaactcgacaaaaccctgtctctactaaaaatacaaaaattagctgggtgtggtggcgcaccagctactccagaggctgaggcaggagaatcgcttgaacctgggaggtggaggttgcagtgagctgagatctcaccactgcactccagcctgggtgacagagtgagactgtgttccaaaaaaaaaagaaaagaaaagaaaagaaagaaaatgcagtgatttgtactgttgcctaaccatcactacaatccagttacagaatgtttccgtcaacctgataagtccttcccacctgtttctggtcaatccagctcccaattccagtcctgtgcaaccactgatctgctttctgtctctaactttgccttttctggatgtttcatataaacagaataatacactatgtggccttttgcttctggttctttcattcaatatgttttttgaaatgcgttcatcctgtagcgtctagagtagtttgttccttttcattgctgagtcgtattccactgtgtggttatgccacatttttttcttaattcaccagctgatggatatttagggttccagttttttttgtcttttttgaataatgctgctacaaatgtttaggtgtctttgtataggtgtgtgttttcatttctcttgggtagattcctaagggtagaactgctgggtcctgtgtttaatttatgattatcttttttttttttgagacagggtctcgctctgttgcccacgctggaatgcagcagtgcaaacatggctcactgcagcctcgacctgctaaactcaagctatcctcttgcctcagcctcctgaatagctgggacgacagacacgcaccaccatgcccagctaatttttttttgtattttttgtagagacaaggttttgccattttgcccaggctagcatttaacattttaagaaatggccagactgtttttcaaagttttcccaccagcaatatatgaggatttgtctctccatatcctcaccaatacttgttttctgtctctttgattataaccatcctagtggacatgacatggtatgtaactgtggttttaattctcatttatctaatgactatgtcgtgtatcttttcatgtagttattagccattcatatacatattatttgaagaaacatctattcaagtcttttgcccatttttatttgtctctttattattgatttgtaaaagttctttatatattttggataccaaccaaaatatatacaaccatatatacaaccatatatagttgtatatgatttgcaactattttctcccagtcttcggctagttttttttcttttttctttctttctttctttttttgagacaggggtctcactgtgtcacccaggctggagtgcagtggcacaatcttggctcacttcaacctccacttcctgggttcaagagattcttgtgcctcagcctcccaagcagctgaaattacaggcgtgcaccaccatagcccagataattttttgtgtttttagtagcaatggccaggctgttttcgctatgttggcaaggctggtctggaactctggcctcaagtgatctggctacctcagcctcccaaagtgctgggatcacaggcatgagccacttcatctggcttcattttttctttcttttctttgagacagtgtctttctctgtcacccagactggagcgcagtagcacaatcacagctcactgcagccccaacttctcaggctcaagtgattgtcacacctcagccccaccaagtagctaggactataggcccgcaccaccatgcctggatagattttatatcttttgtagagatgaggtcttgccaggttgcctaggctggtctcaaactcctgggctcaagcgattcacctgcctcagcctcccaaaatgctgggattacaggtatgagccaccatgcctgaccccttctttttttttttttttttttttttttttttcgtatggagttttgctcttcttgcccaggctggagtgcaatggcaccatcttggctcactgcaacttccgcctcctgggtttaagcgattctcctgcctcagactcccgagtagctgggattacaggcatgcaccaccatgtctggctaattttgtattttttttttttttttttttttttttttagtagagatggggtttctccatgttggccaggctggtcttgaactcccgacctcaggtgacccatccgcctcggcctcccaaagtgctgggattacaggtgtgagccactgcgcgcggcctcctggcctcttattaatggtggcttttgaagtgcaaaaattttaaattttgacaaagtctaacatcaatttttttctcttgtcagttgtctttttgctgttatattcaagttctctgcctaacccaaggtcatgaagactatctcccatggtttcttctagaagttttatggttttagctcttacattcaggtatctgatctatttcaagttttttttttcttatgcatcctgtgagcaaaagatctaaattcaccttttggcatgtggctatccaattgatcacagcagcatttattgaatgcctatcctttcctccatgaaattgtcttggcaccttgtaaaatcaattgaccagaaatgtaagggtttctacttggactctggattctgttccattgacctataaacgcattcttatttattattattattattttcccccgagacggagtcttgctctgtcaccctggctggagtgcagtggcacgatctcagctcactgcaacccccgcctcctgggttcaagcaattctcctgcctcagcctcctgtgtagctggaattataggtgcacaccaccatgcccagctaatttttgcatttttagcagaggcggggtttcaccatgttggccaggctggtctcgaactcctgacctcatgatccacctgcctcggcctctcaaagtgttgggattacaggtgttagccaccgtacctggccttatagttgttgttgtttttaaattcagatacaacttatacacagtaaaattcatcctcttgagtgtacctttcttttttttttcttttcttgagatggagtctcgctcttgtctcccaggctggagtgcaatggctcgaactcagcacactgaaacctccgtctcgtgggttcaagagattctcctgcttcagcctcctgagtagctgagattacaggcgtacgccaccacgcccggctaatttttgtatttttagtagagacggggttttgccatgttggtcaggctggtcttgaactcctgacctcgtgatccacctgcctcagcctcccaaagtcctggaattacaggggtgaaccacgcacccagccttgagtgtgcctttctatgagtcctaagaaacacacacatttgtgcatccaaccccaaaaccaagatacagtatggtcccatcacctctcacaagtccctgtgccccctactgtggacccctctccctcctccccaaccccagacctggtttttgttcacacagttccacccgctccagaaagccatataagttgattcctacagcactccgccctctgactgtggctttgtttccatcccatccttcaatatccaggatgatctttccaaaatgtaaatgtgccctctcctctgtgcttctacttaagtctaaatacaacttgcagggtctggtctttgaccgctactcctgcccatctggacaaacaggatggatggctctcaaacctggtttgcagaacagccacctgagggcttgtcaataccacaccttcctgggtcttagccctagagactgagattcagttgctggagaggagcccaagaatctattttccacacaaggttagggaggtctagaggccacatttgcagaagcacagcttcctctctccacaccttccacacctgtccaggttcacccacgtggcctctgcttcctcccttctcctccaaccccactctctgtctccgcatgctgcatctcctcctgcccagagctctggcattgatttcctcactggggaaagtggcctccttccccaattcccatccaccgattccaacccccttcccatgtcagccagcttctcctctgctcagctgtcacctccactgagaagtctttcctgactccctatgtgagtcattttcccagcatagttgtctcctgtcatttcttatttgtgtgattctttggttaacatcaatcttcctgattggctgtgtgaggatgggcggggtctgtttttgttgtttacgcctgtatccccagcacaaaacatggggctggcatatggtaggtactaaacagatagttgaataaatgaatgagtgaattgtctactctgcctttgcacaagctgctccatcaccaaagagaccttgcctcctcccccacttctttgctgggcccactcataccggttttcctaggaaaactctggagaaaattgaggcaggagccactcattcgtgccccttccagggtggacctcttatcaccctaaggattgtttgttttcctgtcacccacatcaagctgggtggtggccgcagcctttgatctccacctcctaacccctctcccaagtaccctgtgtttgcccagcactgaatgagacagctaaagtgatccctgagagaactaaagtgttccctcaggccgggcgtggtggcttatgcctgtaatcctaacactttgggaggccgaggtgggcagatcacctgaggtcaggagttcaagaccaacttggttaacatggagaaaccccatctttactaaaaatacaaaaattagctgggtgtggtggcaggcgcctgtaatcccagctactccggaggctgaggtaggagaattgcttgaacctgggaggcagagtttgcagtgcgccaagatggcaccactacactccagcctgggtgacagagcgggactctggctcaaaaaaaaataaaataaagtgatccctctaagaggaatccccaggggcccaggccagagctttctccaggtcaccatggctcctcccactgtgccaccctgcctaaccccctcgattttaaaggagaagccaagactctggactttgctcagaaggtggggggcgggggagggagggcttaccctgggtacctctgaggggccagggcgcagccaccacggtaagggtgactgcagatcgaggggcaggccatgttgctggacaccaccctggctggcgtccctctcggcagggtgctctttgccccatggggtgggatccagagctgcagacaggcccccaggcttggccaatgaacagaccaggttcggggagggtgttggaaaagagtggatggggtggttccccttaccttgcagcccccaggccctcccccctccctcccaggtggtcgggactcttgatcttcgctcgtggtactgtctgttcggctgtcttccccgcctctccccaggcacctgcatcctcccttggcacctgctgccaggctaggaagggcaaaaacaatcccagttggcgtagtcagggagtctccgccctcctcccaggtttcctcctcccaggcgcctcccctggacccgcccccatctgcccaagataattttagtttccttgggcctggaatctggacacacagggctcccccccgcctctgacttctctgtccgaagtcgggacaccctcctaccacctgtagagaagcgggagtggatctgaaataaaatccaggaatctgggggttcctagacggagccagacttcggaacgggtgtcctgctactcctgctggggctcctccaggtaaggggaccgagatcggtctcagacgacagcctgccaggcaacccccagccgcaccagggccccaggctgtgccagtctccggctgaactggccggcggcccaggtgggaggattggagccacctggctctccccctcccccgctcggtgatgtcaggccaggggcgggggctggagggggacaggtagttaagggcctggcgtctccctccctgaagacgtggtcccagccgggtgtcctgacgctcggggttcaggtaagaacccaagcgggcatttatcctttgggggcaggcacggccggtctggaggccggtagggaaaggctgggtctcctgatgggttgcttggcctcccacttttctcttttctgtccatttcccaccctgccccctcctccccacccgccctcttttcgtccccatcctggtttccagcgctccttgttccctccctgtacacctccctgcaggcagcagctgagaatgggaaggaagacctgattctctcctccgacttggctttcccgctgaaactagcccctccccgcacacccggggagagccgccctcactctctggctcgcccagtttaccccagtttgggtttccccaagtctctaagacagacgtctctgcgggctgcggggagatgtggggagggccccctccactttggagggcagtgaaggagagggatcctctaaattgtcgaggcttcatctctccagattgtatgcccttctcagcaacaccgcctccggccctccgatgggaaagtggaggccgggtgagacggggtccctcctggcttcagcatgaaatgggcaggaaggctggaggggtgtatgaggggctctgcagtgcggtggggcctggggagagtggggtgggggatagcagatggtttcttctgcttgatgaggctagggagagacccaggttcccggtctgggtctccctggcagattgaggacagagaatgaatgcatctgccggcaaggtggaacgccccccaccccgccccccaactagccgcaccgccccccaggaatgccctcttttggtccgccggtcttggactctgctctcccctctcctgatatcctactgtatgcttggtggggggacctcatggaggcgggcagcctgtaatgattaactgcagagacactccagcattcttcccgaattaaactttaaaagagctgccccgccttctcccattgggtatttttcctgagtgagagtgggcggggcctcagagtcctgggtcctcccttatactaggagtcatccaggggtttctcaccttctcacctgggccctgcaccctaaaaaattataagcctctcccgtgggggcggggcgtggagtactgggcggacgggggctctcccgccacatccaggcccctggcccaggcctcagtcccgcaagcccttccccctgctctgggaagcagagttgttttctgttggccctgaacaccgggccccgccacctgcccttagggccagccaggtggggcgtgattcaggaagtaaacaaggaggttgggaggacgggaacgcgggtggggctggaaccactgggggaggaggcagctgggaagccacggacggagttacctcgttgaggggacaaactgattttgggggtcggtgtttccaaccgaagctttaccggggcctcagtttgaaaactccagatctctaagctgccaggcccacagccaggaccccttcctcctccctgctcaccccattggtcttgacgattccacccgcctccagccttagaagcttaagggcacggctggggggctctgaaggcaaaccccagccttggactggccctctctgatctctgaggccaggctctaatgtgatttgaatctacttctaaccccttccaagcactgccctcccgaattctctgctcctctccccaccccactgttggtctgtgatttcgaggcaggcgtggccccctgcagcctggaatgaagtcactggggctgtttggagaccggggctgtttggaggttagactggggtgggagtgggggattgtgttctggtattgaggtgctggtgtctcttgctagcgggtgatgggtgtgtcgtgcccctcctggcaggaccctgagccccctccctggcctttcatcctgtctgtcttcttgagtgttttccctttccactcctgctcctgtggtacccctctggccgggacacccaggagaatgtgtcaggaggaacttcatccacacagggcaggggctctgagcgatgctttgggtggggaggggcaccgccgggatgctggcttctctccaaatgggcctctgaatccaggccgggcattgcctctctccttcccaggcgagggactccctggcgaggaggtggtttgggactgggggtgagagcagatcgtaggtcccacctggcctggagctaggccgagggtggggaggaggaggtgatgtcaggagcctcaggcccacatcctcctcccccatcctgttcccagccccgtgcctcccccattccgctctggctagcagtgggttggggagttgggggaagggtggaggcagggctgtttttgtttctcctaagccaggaagttgtgtggatgagtcaaggttgaatggagagccctaggcagtgttgtcccgcccgccctgactcacctgtcccccaaatcccctgatgccctcactgaagggtcaggtgcctgctccctcctgaggggtcaatcccaggtgccccaggtggcctcatagtactggcccagtgtttggagaacaggctgggggctgggattgcaggttctcccaggtctcagcccggccaaaggggtctgctgggttcctgcggagaaggtgccagccccacctccacctctagtgctcgtctttgcctgctgtcctgtctttacttgtcttgagtgtctgtgcagcccctataagtgataagacatgggtgagattggccttgcctgggggtaccaggtgccctcagacaaatgggtggataggacaggtgcacagtaatggatgatgcggcccccgcacagtgctgagagagagtcattcagtctgaatgtggaaggccaggaaggcttctcagaggaggtggctctagcactggggcttcaggaaagagttgggcaggaggatggcctggggagggtacgcaaggtttgggggctgctggggccaggacccctaccccaggccctgctctcccccttgcactgcagcggagcccgctctcctgcctttctgactcccatccttccccacctccttctcccctctgcatcactcatcacttgggcaggccaaacctcgccaagtatgaacaggctctggcaactgggtctggcaacaaagtgctggaaaaacccggggcacagcccagcgcagtgagtgccccacacgtggaggcaaaggagtgggcctttgccctgaccctgagggctgagcctgagagtctgtgggttgtgaaatctgttgtgaccaccaggcttgtggtgggtggaccctcagctcttcctgtgagcaactttgtgctaaagaaagagcactggagccgggcgtggtggcttacgcctgtaatcccagcactttgggaggccaaggcgggcggatcaggagttcaagaccagcctggccaacatggtgaaaccctgtctctactaaaaatacaaaaattagacgggcgtggtggtgggcacctgtaatcccagttactcgggaggttaaggcacgagaattacttgaacccaggaggtggaggttgcagtgagtggagatgacgccgctgcaaaaaaaaaaaaaaaaaaggagaaaaaaaacagaaagagcactggacttggagtctaaacacaggttctactcccgactcacctgtgactgagggcaagaatgctttcttctcagagactcggtgtccccttttgtaaaatgaggctcattctgtccttccccaagggcttcagggaaactccagttagagcagtgaggtgctaggtaaactctgaggggcaccctaaccgccgtgtgaggtcaggaggtctgaattctctcatcccctctccccaggacaagggcacacaactggttccgttaagcccctctcttgctcagacgccatggagctggatctgtctccacctcatcttagcagctctccggaagacctttgcccagcccctgggacccctcctgggactccccggccccctgatacccctctgcctgaggaggtaaagaggtcccagcctctcctcatcccaaccaccggcaggtacgatggggcgtggggcttgggggaggtcagtgctggataatacacagaggcttgcaggccactgctcccttccccacacctctctccctttttcttcttgccacaggaaacttcgagaggaggagaggcgtgccacctccctcccctctatccccaaccccttccctgagctctgcagtcctccctcacagagcccaattctcgggggcccctccagtgcaagggggctgctcccccgcgatgccagccgcccccatgtgagttgtccctcagaagggaagggagggatgcacgggttctgggtctgtgggagatacacagccgcttccatggaggcaggggatcttggttaggagtccctgagggtctagcaggtgcggaaagggaatgaatcaccctttgcctcccctcaagtcgtgtgcaattcctggggcgcaggtagtaaaggtgtacagtgaggatggggcctgcaggtctgtggaggtggcagcaggtgccacagctcgccacgtgtgtgaaatgctggtgcagcgagctcacgccttgagcgacgagacctgggggctggtggagtgccacccccacctagcactgggtaagtcaggtgcatggaactatccgggctgggagatgatgccttgcatcttgggctaggcatgtggctcatccaggagatctggttgatctccaataacccctgctttttgcccttgtccccagagcggggtttggaggaccacgagtccgtggtggaagtgcaggctgcctggcccgtgggcggagatagccgcttcgtcttccggaaaaacttcgccaagtacgaactgttcaagagctccccagtgagtgcatgagggctgtctgggcgctgggatgccctgatcctcaacctggatgctggagccctgatccctgacacttgtctacccacagcactccctgttcccagaaaaaatggtctccagctgtctcgatgcacacactggtatatcccatgaagacctcatccaggtggggggaccccccatttcactgcagattcacgactccccagcattggccagtgcttctccacccttaagtcctgtgcctcccctctatgttgtagaaagagccaaatcacagtcctgtgtgactggggacagtcactttccctgcctgagcatcagtttcttctattaaatgggggcgagaaatgcatgtggagcatttccttgtaaaaacctgagggtgggctgggcacggtggctcatgcctataatcccagcactttgggaggctgaggcgggaggattacttaagcctagaagtttgagagtttgagaccagcctgggcaacataatgagacctcgtctctccaaaaaaaaaaaaaaaaaaaaaaaaaaggccaggaatggtggcatgagcctgtagtcccaggtgcttgggaggctgaggtgggaggatcacttgagctcgggaggtcgaggttgcagtgagctgtgatcgtgccaccgcactagcatgagaccctgtctcaaaaagaaaaagaaaaagagaaacatcctggtggtagaggggaagggaggaggtcagacctgtcactctcctctgctctcctctggctcagaacttcctgaatgctggcagctttcctgagatccagggctttctgcagctgcggggttcaggacggaagctttggaaacgctttttctgcttcttgcgccgatctggcctctattactccaccaagggcacctctaaggtaaggtcttgagggtaccagccccagcccctccagtccctggtccttttagaagttgccccttctctgctggaacctctgagcccttctccccctgggccccccaggccagccacctccagtttaccatctctccctacatccttgcctagctcacctgcccagggaggtagcaggagaaaagatgatcttagtttaagtcctggctctacttctatttgctgtgtgaccctgggtattcccctgcccctctctggtcctgaaatctccccacctggcttgtggggggaggtaatagtgggcgggatctacctgtaccaagtcctgctcactcatgctgcttaggatccgaggcacctgcagtacgtggcagatgtgaacgagtccaacgtgtacgtggtgacgcagggccgcaagctctacgggatgcccactgacttcggtttctgtgtcaaggtgaagacctggccaggcctggcccctggcctggggaagcaggaactgctcaggcccctggatcctgcccggggcttctgagccccaattcagacacctagactcctctccctgcaccctggcctgctggaaactcctggattcagctctgctatgtggagcaggggcagacatgtggtcctaaaggcagatatgggaccagtcaatttcctctctctgcagcccaacaagcttcgaaatggccacaaggggcttcggatcttctgcagtgaagatgagcagagccgcacctgctggctggctgccttccgcctcttcaaggtgagaccctgggagtggcatggggggctggcctggccagagggatccccagctctgccctcaggaagtctcaggaatgaggagggcatcacagccttgctctctgataacccccagtccaagcctgaagttataggaagtgcccatcgaaggcagaaacacagccctggtctgggcaagtcctggtctgaggggggcgtcacagccacgcccccaggacctctcgacctcaagctctctttctctccccacccccagtacggggtgcagctgtacaagaattaccagcaggcacagtctcgccatctgcatccatcttgtttgggctccccacccttggtgagtgtgcccaaggggatgggagggtgggtatgcaggccctgtcttacgggtacctgggccctgttctgacctctctcctctccttccatctccagagaagtgcctcagataataccctggtggccatggacttctctggccatgctgggcgtgtcattgagaacccccgggaggctctgagtgtggccctggaggaggcccaggcctggagggtgaggcctgctgtgtgtgtgtgtgtttgtgctggggacccactctctgggtgggatccctgaaataggagggaggaagagagggcggggggaggcccctggctgggaagaagtgctctaccttcctgaggtgctgggtaatgcccccaagcacgccccgactctcccgtatctcccactgctccacagaagaagacaaaccaccgcctcagcctgcccatgccagcctccggcacgagcctcagtgcaggtgggtgacggccccgagtcctggggcgggggctgcctcaacttctctttgtattcccagtggggagtagatggtataggggtcccctccccaaagtgaccgcccatgtccttccccaccacagccatccaccgcacccaactctggttccacgggcgcatttcccgtgaggagagccagcggcttattggacagcagggcttggtagacgggtaaggggcagggccgggcaacagacccagggataagagagactggggtccaggtggcagccatggtccttgggtagtaatgctgccccatctcctgtcttctggcagcctgttcctggtccgggagagtcagcggaacccccagggctttgtcctctctttgtgccacctgcagaaagtgaagcattatctcatcctgccggtgagcttccctgcgtccccggagtcctgcaatgagacacaggactcccagcaacctgtcctcctcaccaggcccctccagaggctccctggcccccagtgcgtctcccttttccctgcacaagaagtgggaggctgagtgcggtggctcacacctgtaatcccagcacttaggacggccaaggtgggagaatggcttgagcccaggagttcgagaccagcctgggcaacacagggagaccccatctctacaaataatttaaaaatgagccaggcatggtggtgcacacctgtagtccagctactcaggaggctgaggtgggagcattgcttgagcccagagggtcaaggctgcagtgagccatggtggcaccaccacactccagcctggatgacacagtgagaaaactgtctcaaaaaaaaaaaaagaaagaaaaagaaaaagaaaaaagaaaagaataaaaggaaatggtggggccctggcccaggagggagcttcccaagcctcgggcccctccctgaacttccaccccctttactgtaccccagagcgaggaggagggccgcctgtacttcagcatggatgatggccagacccgcttcactgacctgctgcagctcgtggagttccaccagctgaaccgcggcatcctgccgtgcttgctgcgccattgctgcacgcgggtggccctctgaccaggccgtggactggctcatgcctcagcccgccttcaggctgcccgccgcccctccacccatccagtggactctggggcgcggccacaggggacgggatgaggagcgggagggttccgccactccagttttctcctctgcttctttgcctccctcagatagaaaacagcccccactccagtccactcctgacccctctcctcaagggaaggccttgggtggccccctctccttctcctagctctggaggtgctgctctagggcagggaattatgggagaagtgggggcagcccaggcggtttcacgccccacactttgtacagaccgagaggccagttgatctgctctgttttatactagtgacaataaagattattttttgatacacctatgagttctgtctggcaaggcctggctggctgaatcaagaagggaaccagagctggacgtggtggctcatgcctgtaatcccagcactttgggaggccaaggtaggagaattgcttgagtccaggagtttgagaccagcctgggcaacatggcaagaccctgtccctacaaaaaataaaaaaatgagccgggcatggtggtgtgcacctgtagtcccagcttctcaggaggctgaggtgggaggatcccttgttccttgagcctgggatgtcaaggttgcagtgaactgagattgtgccgctgcactcagcctgagtgacagagtgagaccctgtctggaaaaaaaaagaggggagacctggagaggtgggcacctgtggaggccttggtggaagtgtcaaatggatcgaggccatgtctcagcctgcctggatgttcctcaagggcaggagtggttatctgagagtctccagtgcccaccatgcagcttgacacatagtaggcgcccagtcattgctaattaagtaagtgaatagacaagagaccatcatcccagagagattttctgacagtctaagtctagagaggtaattaacagggcctgggagttggagatgagtccgacagcatgcttgtcctccgctagtcctggactagctgacggatagttggccccagcatgcacacagttatgcatccagccccaccaccaagacacagaatggcctcatcacccccaacaagtccctgtgccccctactatcagccatgctccctcctacccaaactgaaacctcctttctgtcctagttctgccccttccagaaagccatataaatggagcctgctagcattcagccctctgcatctggcttccatctccaacacatccttcagcacccagagtgatcttttctcaaatataaattcaccactcccggcagggcactgtggctcacacctgtaatcccagcactttgggaggccgaggcgggcggatcacgaggtcaggagtttgagaccagcctggccaacatggcaaaaccccatctctactaaaaatacaaaaattagctgggcatggtggcgggcacctgtaatcccagctactagggaggctgaggcaggagaatagcttgaaccggggaggcagaggttgcagtgagccaagatcatgccattgcactccagcctgggcaacaagagcaagactcagtcttaaaaaaaaagacagatgtctggcctctgcccactgctcatgccagtctatgtttttgtcttagaggtttttttgttttgttttttgagatggagtctcactctgttgcgcaagctggaatgcagtggcacgatctcagctcactacaacctccttctcctgggttcaagcgattctcttgcctcatcctcccaagtaactgggattacaggcgcttgccaccacgcctggctaattttttgtatttgtggtagagacggggtttcaccatgttggccagcctggccttgaactcctgacctcaagtgatccactcaccttggcctcccaaagtgctgggattacacacccaagccactgcgcctggccttgtctaagagttttttagtttgagctcttacctgatgggagctctttaataaatatgtcagatcgactgcatctgaacttgctgcttaactcaggagacagaccctcctgcagacctgtgaaccccaactagtcattgtttttgtcaaaacaccaaacctgaatctgattccttggattcaacaactagtttacgggaaatacaagggaaacaatgacaaaaatccagattgggaaattctacagaacagataacccagtttcttcttcaacagcaacaaaattaccagaaaagatgggcaatctctagatttcaagaaatttagacatatatcaaccaaatgatgtgttgacctttgattcaaatgcaaactaactgtaaaaagcatttatgagcaattgggggaaatttgaattctgatcagatattcgatgatattaagggattatggctaactttctaaggtgtaataatggtattgcagttacggttttttctaaatctttatctttaagaaattcattatgaagtatttaaaggtgaaatcacatgatgtctcagctttgtttttattccttttcttttttttttttccaacttttattttagattcagggagtacatgtgcaggtttattacctgggtatattgagtaatgctgaagctttgtttttaaaataacccagaggtggccaggcacagtgggtcatgcctgtaatcccagtactttgggagctgaggtgggaggagtttgagaccagcctgggcaacatagtgaggccctctctacaaaaataaaaaataaaaaattagccaggtgtggtgacatgcatctgtggtcccagctacctgggaggctggggtgaaaggatcgtttgagcccaggaagtcaaggctggtgtgagccatgattgcatctctgcactccagcctgggccacagaacatgaccttgtctcaaaaaataaaaagaaaaaaatgaaatccagaggttaaaggagagggtgtgggcatagtcatggtgtggccatgagttgacactggctgttgatattggttgaagcttggtgacaggtactggctatgtggggatttgttaaattatcctctccacctttgtatatgcttggatattctattatatattgatatattttaatggagagccccttctcaaatctttgggactgactgggcaggaggtggtgagacgctgttttgtaggtgaggaaactgacggcccagtgggcagcctggccccagatcacagtgggagagccaagattccaacccaggtctgaggaccaggtctgggcatgttctgcttcccctgtctggctgacgtccaggtggcattcctcagccacagtgacagcaatagtggcctactggggtcctcccttagagagcccctcccttccctgcagccttggtctctggcctggagggttgtcctgaggtgaccttgagactgtgcagcctctgcaatcagcccctgggctgggtctggcagccctggcagccactcccgaccaaggcacccccatccttggctaactccaggctgggaagctgggaccaggtccagcagacagaggtgggcagagaggtctcatgcacaccccagcctgggacctcctgggaatctgctggaagaacttactgcagcccaagggcaggaagggtggcagattttgcttctttttagcaggactggaggcaggacccagtgcaacctgctgcctgccacctgccacggttcccagagccatccccaccacaggctgtggctcgagcaccgaacagggcagtgtcagctgtgtggctggccatgggtgcccagggccacctccgaggtgtgggtgccagagttccaggctggagtgagagtaaaggggtcaagatgagtcacctcttcagcatgtccaggggttcagactgtaaaaaaagaggacccagtgtcccttcacagcctgaggcactgggcagagacaaagcctctctgtcaatcagctaattggagactgtgagacagatgtccttcccactttacaaatgggaaactgaggctcagggaaagacagggactcacctgcgacaggggtcgcagagggagttcgggacagaggccagactcagcccactggacaggtggtgaaatgcagccctgccctgctctagcctttgttctctgccccctcccttctcagtgctggccacagtgagggacctaggctgccgagagcccttagagggggcagcatttggccctgatctggccacctgagaccagcagcagcccattcttggtgagtgtctgagatttctggctttttggagacgtagctgctaagagtttgggggcacagggaccctctcagggccagctcacagtggaacccctgggtaagatcccccagctctgaggatgtgggaaggatgctgctctacctcagagactgcagcatgacctacagtggtcagacagcagaaaggactgccaaggacggctgcagtgctagatcggggaggcttgtggttctgagaaaatctgggctggtgggaggggaagcaggggcttctctgggggagagggtgggggctgggacctcagatactgtcttttcaaaattgatttattgggtttcattctaaaattatacgtacttattaaaaacatttcagaaaaaaacttgagggcaaaggggaaattcctcatcatctttccatgcagaggaggacccagtactgagagagggtgacagggcccacatctggggagctgacgcgaagtgctgcctgccatgcatcacacgttccagcttcccgggaccagcgtggccggtgggagccgggtgccagggcacattgctatccttggcagcaccatgggcctttagggtaggggttctgtggagggtgtggctacaatgttggcctccctgcctgctcaagtgtggaggggagggaggactgctgccaacgctctggactctgggatgggggtgggcatgattccaggggagcccacctccctgggcggggcatccagacaaagccctggccagttctgcaacatccaagttcacgggtggtggacaggcccaagggttcaacatcaggtcagggaccctgcctggctccttccttgggccccagtgccaggcaccctgatgagggatgaagagaggaaggacaggacacagacaggggagcccaaagccacttggaaggattctttcttccaaactatccacataagcagttttctaactccttcccagagcccaagggttctggcaggggcttgaggggcaggttggggtggtgatgggggatgcattgcctttctatctggaacttgagccttatggtatattcaggaaaaaggcttgaaccagtgaagtactgatctggtccaacagatagaaagagggcccagagaggtcagggcttggtccaactcgcacagtggtggggcgtctgcagactgctttcctgtcctgtgctgttggcagaacctcagctttgggacttgagggggagtatgcagtggcaattaggacaaacgactctgagctctcagttgagttgggggaggagagaaaagaaggagttagatcctgggggagttggatgttgcagactggactccagagcctgggggtgtgggcgatcctggggtgtggggagggcgggctgaggctgctccacaagcgttctcgaagttcaccatacaagaaggggcggtgtggggaaatggggatgaggcctgaaattcaatcccatgtgggttgagttatgatgtcatctgacaccctctcacacggctgcatctaccccaaggaaggggcaagtttttctttgatgggcacctgggggggctgtttagctggagttttttttgtttcgctttttttgtttttgtgttttttttgagacaagtttcgctctgtggcccaggctggagtgcaatggtgtgatctcggtttaccgcaacctccacctcctgggttcaagcaattctcctgcctcagcctcccaagtagctgggattacagacatgcaccaccacgcccagcaattttgtatttttagtagagatggggtttatccacgttggtgaagctcgtctcgaactcccgacttcatgtgatccgcccgcctcagcctcccaaagtgctgggattacaggtgtgagccaccgcgccgggcctggagctgcatttttgttgtaagcactttgttcttacttggattaggtttattttagggtggtttggggcagactgagggagattggaaggcagaaaccaccccctcaggacaaccacgtggatctccttagggtctgggtagtggaactgggccctgtgaccttggagttggaggggaagctgtaagcagggatggaacgggccacccgcaccctcacacagctgtgaccaacaggcacggtcatccgcattcacctgcccaactcccatgccctgagtcctgtcctccagggcattcctactggcactaccccaatttcccaaaagattccagggatctctctctcgctctctctttttttttttttacagtctcactctgttgcccaggctggagtgcagtggctgatctcagctcactgcaacctccaccccctgggttcaagcgattttcctgcctcagcctcttgagtagtttgggattacaggcgtgcgccaccacgcccagctaatttttgtatttttagtagacggggttttgccatgttggccagactgatctcaaactcctgacctcaagtgatcctcccgctttggcctcccaagggagggttccttcctcccaggctgaggcaccctgccccacacatctactggaggaacttagtgttggggccagggggtggctgggtaaggctggatcccacacttgtcaggccaggttggggtaggggaggatacacgggggacccgtctctcagccgttctgggccggtgcctgaggcgatctgccccgccgcccgcccttccgccaccacccaagtcgcatgcgcgcgccggggccgacgggcgccaggctccaccgagccaccctccgtcgtggcggcccctcgtgcctctgcggagggaaggccgccggcttcgccagggggcgcgcgtcggggtcgcggctctttgaactcggccccacgaggggacgcgccatcggtttcgtggcttgcgtggcgccgcagcaacgagccggtcgccccggggcgttgcttagtccgggcctcgctgcgagtctgtgggcgaggcgggaggtgcttccttggccaggcgggtggaggaaggtgtgggcgccgcatcccagcgtcgcggagcctccaggcgcgggcaggcgagactggcgtgcagcgcgacggcctagtcccggcgtcccaccgtcccccactcccgcaggcgccgagccgattcagccgcgcggctgcagtgacacccagcggccgtcgcgggaagtgcggtcgccgcggccaggcctccggggctcctgtctctcgaggttcccaccccggttacgcgcgggcaccccggaggagagcggccgcgcgctgcagatgcccgcgggggcacttcccctgcccctcccccgtttcctccccgcaggcgcccgagcgccgggagatcctgcgcagcggcagtgcccggaagggcggggcggggtgcagcagcggcgctgggctgtgacccgggcagtttcacttctggatcctgctcgggctgtgataggacagcgcgggggcagcgggggaacacgcgggcacgccgagatccggcgctcgggaccccgatgaggggaggcctttcactcctggggtgtcacgcgacccacgctttcctccatgtccactcccaccccccatgggttccactttgctgtcccccgagctgccgctcctccccagcagacaccgtctccgccggggctgccgacccccggagaggccccgagcggcgtgggcggcgggaggagggagctgtgaagccgcaggcagggggttaggctgcgggctgctgagacgccgagctgtttctcagaagtgcagctgcccctcccctcacacccccctcactcccaccgcgcgccgcacccctgccccctctccgccggcctccctttcctctcccaggcaccctagccgggaatctggggtctgggtccacgcagaattaagaggagaacctgagaaagggcgggggccgggggttcagacccagcctcagcgcgcgttattccgagcctcctataattccacaggtgaggggatcctgtcccctacccctggggtccaggattggaatttgatagaacagttaggaaaatgacatcttgagagagtcagggcccggccactattactctagctccagcgtccagtgaggagaggagagagagggaagacctggagcccggctggtgcagtgaggttgaggcctgtcttaggagtaccagctggaaggcccttcagagatccctgactctggggaaaatcaacgcccagaaggggaagtcaagtgtctgggctcatcccgagagggagagggctgggattggaaccaggactccaaatagttgcgggagtctgcgactgtcttttgcttgggacttcagagctttgctggattcactgactcagcctgctttccctcaacacacacaaacacacacacacgagacacgtgcacgcgcgcacacacacagatacacagacacacacagacagacatgcaaggagagagacaggcacacatggagacagacacgcacacgcaaagagacacacagctccccaggagtctagcggggcagctgaggtctgtgagtgagacattctcagtgagacactgagaatgcaattccagtgggggtgggatggggattgggcggtggaaggacaagcccgggggaggaggtggcatcgcccccctagttcccatccaccaccacccccagtgctgtggtttatttgcctaggcagctcttctgggccagggggccagggtactggggtggagaggcgaggtgatgggaaaggctgttctggggcttcctgccccctcactcctggggaaggggggtagctgccatcacccgcaggcctttccactgcagccctttccttgggtatgtgtgttattctgggggaagatctgttatttgcggagaagggaggcagctgcctacttcacaggtcaagacagagttaaaaacaaaaccacagcaaattcaacaccccgtgtccttcagggactttccatgacaccttccttcccccctctcccctaagccagggagcacctccccagagggcctccccaccccaggtgcagtggcttttggcttttatgcaaacaactgtctgatcccggaatgctccacagcccgaactgtggcctgggccgaatgtgcccctccaccatcccttgggccagtgtttctggtcttcctggagttgtgacctccactcttcctcagaccctggattctgagggacaggagatgagggcaggaagctaggtcctttccccctgcctgccctcgggtggcagttgcctgcaggtggagggtttgggcacagcaacctaagtgaatggtccggggttttgagtgatgggggaggggaagaaggagggtgcaggtgtggggtggcctccactgccaggcccaccaccctctagggcattgaattagctcccaagatcaggaaggaaaactcttctcaggctgggagtccattcaaccccaacgccagtgtggacctccggtcctgctcactggcaaagggggtcaggatctccctgtctccctctcttctgcctgagctgcttctgctttggggagggatttggggatggggaaggccatataatcttctctccagggctgaaaaccagctactgaggggccgtttttgaatgtattcagtgctaaaatgcaaaggcagggtgccatgccattcctttctcctcctcagcttgagcaagactgggaaacctgtaggagaccctcagccagtttgaacattttggagtgctgatgggagggagatgatgctgatcatggagccagaggacgctggtgccagcctagccccacatttgttagtcttaaaacttcagacaatctttctcatgcctcttccacagaagacggaaaatggagggtgctttagatgaggctgagcagaaggccagactctctctctactttctctaacgttttctaagagagaacacaatgatgatggaaagaaagcagcctcatccctatgccattctcctaggacttttccccctaacaccttcggtttgggtctccaggtatctaaaaactgtatttaaatatggtcgagtttaaggactgcaactcaagtttcccaatgtggatgtctgtgagcccccacacatgaaaaagtcagaacttgactgtattttaagaagaatctctgttgagggaggaaggcagagcagtgacttggaataggggtgcaccatgctgaatgtgctgatcatgctaagtccaggtcctcaacctcctccagtttccttagtgaactaaggaccagtggaaccaggaaccctatcttgtgggttacaggggccagcagcaggatcacagtggtaggctcagcaaggcgtcaggtgagaacctttatttcagtgataattcatttttcttgataactggactttaagaaatagaggggcaaaattaagaaagtattccttggggcgggatgaaacccttctacatcctgacaccagcagacacaaatcataagtgataaggatgcacaaggactaatttcaaacataccaggatttttttatttttcagtgtaaaaatcaaacatgataaacctagaaaactatcagcagggctatttcttacagggttccagcaagggttagcattgttacatttcagaagctgactttctttaaaccatctttacagaggagtaaacttcacagttccacacatggctgggctccaggtagaactccataggagtgacgagggaaagtcaccactgggcagggagggcatttctgagaaatgcagatgagaggagaggctgtgagcacaggctgtgtcaaaacccagggcaagggctccctcccgccttccctcccagtgggaaggccaccctgagccccaaaccacattctgttccttcctcgtcattctgcagacaatggtcatccacagaccacacgtgtggtggctttggcaaccagaaatttaaaataagctatggtttttccagtagccaaaatgatcctgcaccaaagctcatagactgagaacctgagcatgcaaaaccacagtctgggtgaagggatgtctgctttgtaaatgacctgctaattctttgcaacccacagtaatttggtttctgtgaacccacagaagcaggcccaccaaaaagggccttgtctgctagcctggagtatacatgagtcactggcggtgggatcagtcattttttaggctgccccattttcctaacatgttaaaatgtgtgttctcagtcttttcaagagaggaagaagcaaagcggcacttacagagtgtgagatagacacagatctgtggcgagggattggggaaggtgggtggcatcttgggactctctccaggctttctggagtggggtcagtggagagatgaacagtgagaaacatttgaaataactcaagttttggagcagcggggggtggggtactaatggctgaggactcacagacagtgagggagcaaagcgctttgacttccctgggtgcgacaccatgaagtgtctatagcacgtggttagctcacgctggttccaagggtcagcagatcctctgcccttgtgcattaaaacaacatgaaggaaactgttagagatcagttacctccataattcatttgtaaaggaattgctattatgatctagtatgatcttgggatatttttcatgtctttaaatttaggacacggtacattttccactgaaaatttacaatcatccaacataatgcacaccacccctcaaaggtaacattagctcatatacaaaatcatggaaaacctcacaacatccttggaaggtagatattgttatatccttacaaaaatttaatacacccattaacattcctatttcaaatagctcaatcgatatcaacacataagacagcccacaattgtgatacagtattaagaagaaactcaggccagccgcggtgcctcacgcctgtaaccccaacactttgggaggctgaggtgggcagattacttgagcccaggagttcaggaccagcctgggcaacatggtgagaccctgtctctacaaaaagtacaaaaattagctgggtgtggtgacccacgcctgtagtctcagctagttgggaggctaagacgggaggatggctcgttgcttgagcccaggaggttgaggcggcaagtaagccttgattgtgccactgcactcagcctggggaaacagagcgagactttgtctcaaaaagaaaaaaaaaaagaggaaacttgtatccaatttattcaaactgcaaaaccctgtgtatcttcataacaatggtggggcaaagactatctacagctggggcaagggagaggcacagtcttgtgttactttacaagctctcagaagtttaaagcccacaattgtccttcaggctcttctgagtccatggtcctaaagggtcaggagtcctgaaccctggcttattctcagaaccattcagtcgtgctgccttggagaacagagtccttttcctgaggtggcccaggtccagctgctggtttcagatcaaaattgacctccttcatcggcacttatatctcaaatcattctccttgtctgaactctggatatagaggttttttgaactatactttctgtgtgaacacaaaaatagcttcccattctctaaaagatgaggtatcactatatatcgggtttttttcttctgttcctggtgctaacttttaggacaaagtttcaccactcccttttctcttcttgagctcacaagtcccgatgctgactctttgagtcctcagatagccaggctctttcacatcttgagtgtcccagagtttccaaatctctgctagagtccaacatacctcttctcagtggggtactctttaaagtgaggacttaaacatttccattgtggtcttatcacctgggattatatgtaacagtactatttttttccttaaaacattctttttttttttttttttgagatggagtctcactctgttgtccaggctggattgcaatggcgcgatctcggctcactgcaacctccacctcccaggttcaagcaattctcctgcgtcagcctcccgagtagctgggattacaggtgtgcaccaccacacccagctaatttttgtattttttttttcgagatggagtctcactctgtcacccaggctggagtgcaatggcacgatctcggctcaccacaacctcctcctcctgggttcaagcgattctcctgcctcagcctcctaagtagctgggattacaggcatgtgccaccacgcctggctaattttgtatttttagtagagacagggtttctccatgttggtcaggctggtctcgaactcccaaactcaggtgatccgcccgccttggcctcccaaagtgctgggattacaggcgtgagccaccgcacctgaccctccttaaaacattctaaacctcacattcagtagggcttggggaggtgggggtggtacaggaaataggagaataatagtgatacagatgctacctggaaaaactttgttctgtctgttcctcacgaaacaaagccgaaaagaaaaactttatgtggatgtgagatttgatagtaacacagtgtttcacctgagcaaaattttgtgtttttaaacatttctgtttgccaaagaaatctgaggttgtggctgggcgcagtggctcttgcctgtagttccagcactttgggaggctgaggtgggcagattgcttgagcccaggattttgagactagcctgggcagtatggcgaaacgccatctctgcagaaaaatacaaaaaaaattagctgtgcatggtggtgtgcctatagtcccagctacttgggaggctgaggtaggaggattgtttgagcctaggagatcaaaatctgaggtcattttatatctggccgattttgagtatgggcctaacaaaatgttaagcactgcatttaaaaggtgagaaattttgtcactgacaaagtcagaagctgtgtcaggaacagctcacagtgggtcataaagcataagattagctggcttatctgtgccaaggcgaatgtctttttgggagaataacttgaggaaactaaagactgatgagttcattttctctcttttttttttctggtggtagtggtgggggctcacgggagagacacttctatttagttttctttccgtaggaagtaccgatgcaacacttcaggtagtgacagaaaacatttggagagctgggcattgtttgtgcatgcctgtaatcccagctacttgggaggctgaggcaggattgcttgagcacaggagtttgagtctggcctaggcaacatagtgagaccctggtcctctaaaatatacatacatatatatacatatacaaaaaaaataaaaataaattaaaaaattaaaaaacacctggagcactggttctgtttcttttccaccctcagcccagttctgtcaccttggctgcaaggaaactttgcctgggtttttttgtttgtttgtttgtttttgttttagacagagtttcgctcttgttgccgaggctggagtgcagtggtgccatctcggctcaccgcaacctccgcctcccgggttcaagcgattctcctgcctcagcctcctgagtagctgggattacaggcatgtgccatcacgcccggctaattttgtatttttagtagagatgggggtttctccatgttggtcaggcaggtctcgaactcccaacctcaggtgatctgcctgccccagcctcccaaagtgctggcattacaggcgtgagctatcgcgcccggccctttgcatgggtttggttgttcctcagaccgtggcctcctgggtgtatggtggaaagcccgcctgataagaggctggtgggaaatgaaggagaggggcctacaaggctcttgttcagagggagtctgcatgagaaagtacaggtactatctgaagctgctccagggcttcagtgcccagcagtggcagatgcaagtcctgactctgcccttctgctaagattctccttcaccctcacctccccagccctggcaaggggtttgttaattagtacagcataaggggtatgtacagaaggcagcgtttatctgtgtgatggtaaccactgcatatctggttcaacttcaagacttaaggatgcagagtttccacacataaattttttctggaattgatgggccccaatctaggctcagaatgccacaaagaaagtgcctttgtgagtggtcaccttactcagaaaactaacctcagaagaatagaaatcatgcagcaaattcattagtcacaggaaaaaggaggatcatatctataaaaagagtccccaggctggtggaatgggccttggtttcacaatcttgagatgcaaaaggtggtctcaggctgggtgcggtagctcatgcctgtaatcccagcactgtgggaggccaaggcgggcagatcacctgaggtcaggagtttgagactggcctggccaacatggtgaaaccttgtctctactaaaaatacaaaaattagccgggcttggtggtgagcacctgtaatcccagctacttgggaggctgaggcaggagaattgcttgaacccgggaggcggaggttgccgtgagccgagatcgcgccactgcactccagcctgggcaacagagcgagagactgtctcaaaacaaaagaaaacaaaaaaagttggtctcctctgcaaagacttgaacactaatctggtggaaaggcttcctttccctcgttttctcttctactaatccctgcttccaaattctctttctcttgtcccttgaagaaccaacaggatgtgcgatatttcaagaacgtaatgagcaactcctctttcacaaagggaataagcaatctggcatagcttggagtctagtattacggaaatacagtgatatactgaagactacacaccaaaatacatccattcctttagctgaagtctcaaacatgttgggactgttgccatggaatttcataaaaccttttttcctgagacagacgccatgccacaaagaaggataagccatttgtgcagtctgaggtggaacattttaattactggcagcacatagacgagttgagttggagccgaatgcataagccccttagaaataaaacactaatctaccaggaatttgggattcttggctctggtagaaatgttacaaattaagctgactcttaatttgtaaataggctccatgaagttgtccctggaagcagaatttattttccctaacataatttcttaaaaagtaaaaaaaaaaagaaggctttggcaaacagctgcatgtgccaatttgtgtgtatgctttgtggcaagatcaaaatacctttctgttttttgttcctctccaccaccttcttcacattcacaactcagtggttaaaggaaaaacttaacacaccattttcataccaaaggaatgtgaaacatgtattcatataaatactcttctgcttaatatccatacattaggaggtttaaaaaataccttgtggttactgcataatcacatatgaattaaagctagaagggacctaagagaacattgaaatctaattcctattttatggatgaggaaactgagttttttttgtttttgtttgtttgtttttgttttgttttgtttgagacagggtctcactctgtcgcccagactggagtgcagtagtgtgatctccactcaccgcaacctcaacctcccaggcttaagcgatttttctgcctcagcctccggagtagctgggattacaggcatgtgccactactgcccagctaatttttgtatttttagtagagacagggtttcaccatgtgggtcaggctggtctcgaactcctgacctcaaatgatgcgcctgcctcggcttcccaaagtgttgggattacaggtgtgagccaccgagcctggccggaaactgagttttaagagttaaataaggctgggtgtggtggctcacacctgtaatcccagcactttaggaggctgaggcgggctgattgcttgagcccaggagttcaagaccagcatgggcaacatagtgagacccctatctctacaaaaagaacaaaatgtagccagacatggtggtgtgcacttgttgtcccagtactcaagaggctgaggtgggaggatcacctgagcctggggaggtcgaggctgcactgagccatgattgcaccactgcactccagcctgggcaacagagtgagatcctgtctcaaaaaaaaaaaaaaaaaaaaagttaaacgatttctcaaagtcacatagctaattagccagcattttgtgacctcctattccagtgctaattttaccatgataacagcactcctcctgatagtatgtacatattatgagtgacaaggatgacttatacatctgcagaaccgtgatcagactttcaggaattttcatggaatacagcagttccatttaaatgggaaaaaaagggccgaagcctgcctgatcaaggagaacctctcaatagaggtgtccctcctcaccccattccggagctcaactccgatctaaacacacatgccatctatctccaattcctctcctgtggggagggggaggctgagccatactttttggactttttttgtggaaaatatcattggcaaatttgctttgggtctgtatcaccaattctccatgaactctttcaagaagttttaggtagctgttttttgtttgtttgttttctgttggtgctgccaaacaatttccccctttatacccttgctctgccaaccttgaccaaaggaaagcgatgtcatcatccacagtggataaatttctggagtttcgatgatggtctatatttaaaaccatgagttcttctggcatagattttcttctatagacaactggtttagcccaaagcagctcagcttttcactggagatgggaaggtaaaggacagaagcagaagtgccatcagatgacattttttaaaaatgttgtgataggaaatggatctgatgcttggagaatggggtcttcagttactcgtaacagatacttattttatggctgttcttttacttactcttagactgtcatttagattagggagattagatcttaacccttcagcctgtgaagggcagaagggtgaggcttcccagcaaggtcagctggtcagctcttcctctttgtggatttgcatgtatgactgaaaggcttttccacgtgtggttgatatatctcagaaagaatgtttcatatagcacatctccgggaccactcattccactgctgtagaagataatgaccaaatacctttttggcttttaaattccataaaattcaagtccctgatgggaaaacaaaggtttcacaaaagtaataatatgctagacctgcgaataatttctgaaggaagacagtgtttccctggctacccctgtgaacacagctaaaaatggtatgaaaagaagtttggaactgagtatgttttgagagcaatctgttaggcgaggtcattggtttttagaaacgatgctgaatacataggagcaatccctgagaccagatattcacttcagcagggctctgtgttctcctctggctatgtgagacgagaactcataccgatcatggcttcgatatccacacatgttacactcgaaagggtcacggaagccgtggcagcccatgtgaatcgtgaacatcacatagtccaggaagaggacgcggcagtggtcacaccgatacacatccatcacctccccttccttgttgatcactttgacggagtctcttgggcagatgggcgggggcttgaggagttcgtaagagcggggaacctccttcagaagtggcatcccattgcgggcccgagacaggaccatgtgattttgctgatagatgtgattctggcgttcttcatggttgctgtcagtgtccgtggagtcgtggccactattgttgggagagaggcctctctcagaaggcacgctcttctctggaaggtggatgcttttcttttccagctcttgaggggcaccgtttgacatctcagcccgggtgagggctatgggatacatgctgctgataactggaaccatctccgaggtgggagcaggcggtgtctggaccaaggggcgcagggcttcggcgccaagatagctgatggcgttattgatggcttggtccatcatgcgggtctgtatgagctcactctctttctcatacatgtaacttgaattatagttgacatcaaagcagtggcgcttctcacctggaacaagtgacagaaagggttacaaagggaacactgccaaggcagagagtttgtaaatattttctagagacctcaaaaagggaggagagttaagttgcctgctgctcaagaagaccaagcctggcagaatggtttcccatggtgctgtctcaggggacactggtcggcagcaacgtgtttggatggttaaaataaagccagcaggcagaagagaggggcagagatgtggttcagttgaggccacatggtaaggtatgcccactgtgcatgttagaggagagccctcaagaaaggagggaaagaagcaggacactaggatggggctagagggacaagggagccaccagcccacaggagcctgggacttctgctatagttcatgatctcttaagacacagtcggctcccaactcttattttgcttttgcttgttattttctgcttgcaatattaggtagccagggggacagaagtgctgcaaagagtggggacactcggtgcctcacctcggcagctttttaaatagctacagagatagagaaaatagccccccagactccaactggctactccccaaactcacccgtcctggctgactgagactgaagtgaaagagcttcaaatgtagaaagtttgagaaaagttttcttgagaagagatcatggtctttgtccctttcctaacgtgtgtttctcttcctttgcttggcaagtgtatctctgatacacatgtgatcattagggcctatctcacacttaactgaaaaaatatacttgtggtcaccctctcctacttctcatgtcaaactgctgagaagttttgaaaacagagtttagccaccttcagagtgtgtgggtgttgtgtgttagaaaacagaggctctctggtcacagggaaggcagggatggggactgcagtgagggcagatgtgctcagtggtgagtggtggggagaggggagagaaagcgaggaagtggagccgagtgctggaggtgaggctgaggtcactgttgagcctctccattctgtcagcttggatcctggagggatttgctaaaccatatccttctataatgtttcctagtcatgttgagattccaaaatttgtcactgccctacagtaaagggttcagcaatgaaaataaagaagaagaagaaaaaatgccatgagaaaacaaaaggattggaagaaccagttcctgttcttgaggtgtctccaacctagtggatgagaaataagacctatatatatatagaactcgagaaaaagtataagttaaaagttggccgggcgcggtggctcaggcctgtaatcctagcactttgggaggctgaggagggaggatcacttgagcccaggagttcgagaccagcccgggcaacatggaggaaccttgtctctacaaaaaaatacaaaaattagccaggcatctgtagtcccagctactcaggaggctgaggtgggaggatcacctgagcctgggaggcagagattgtagtgagctgagatggcaccactgcactccagcctgggtggcagagtaagaccttgtctcaaaaaaaaaagttgtaaaaggactgctttgctctatggaggtctttgcttttattctaaatgcccacatttgaggcatttaggcagggaagtaacgtgttctttaaaaagaataataaggtaacatacaggcatcggtgagacaatttggtataaattgtatatttaggcattaagggaatgcagaaacttcagaagtacttggggaagggaaagcattcttggaaaatctaaattttgagaagggtcttgaactggaagaatttagattttcagagaagcgggagaggacatcctagttgagggggagtgcaggaatgaaggcagagaggtgggactacacgggacgtgtgcagaaagcgagtctggctgaaacgcgatcaagaagtatgaaatacagtatttctcaggcttcactcttccttcacattctgcaatatccacacaccagggcagtgtggtggttgagagaataaactctggtgtcagatgggctgggtttgatgctggctccattggtcaccagttttgtgaccttgggcaagtcacttaacctatgttccgtgtcctcatgtaaagtgaagataattgtatgtacctcacagggtcactggaaagcacttagaacagggcctgccacatggaaaacacttggtaaatgcttgggtttttttcctctgtttgatttggttcacattttctttctttttttctttttctaaaataaatgtggtttttaaggaaactttatatcactaacataaacggaaaaccagaatcactttccacaagtagaaggtaactatgaaaaataaagacaatgaaacagagcatttcattaaattttgatcggatactactgtgagtacttggagactaagatcccttccccctttgttaaaaacagagattaccaagtgtgagattagtgttaaagacaactggcatcaaattaagtctaaatttttctccttagtatgatccaggagactgaaagagaactggaaagaaaataattatcctgctgtgtggacccaggtttttaaatgctccatgtgcttgctggcaatttgcatcctacatttggggaaacactgaaaaaagataatgcatggtaggaccgaatggtgggcattccgaatggcccactgtagggtgtgaatccgaaccaagagccaaggctacctgcccttgagaaagacaggtttgtggttaacgtaacagcaatgtgtaaggcagaccagaacagtgagaaattggagccagaagaaccagctaaaagatctattcccatgagatgaatttgtctttgcatccccacaagcagctgaccttaaggccaacctgatagtttccagagaaatacctgagagagaaaaaaaatatgcaaacgaaaataccctgtcttggaaactcaatgagaagcaacagcagagtagaccttggccaaagtaatcaatgttttttattttcagtttccagattggatatatctttggtcaaggccatctggaagactgagaacatgagagccagctaaggtcacagacattcattccctagaatgtgacacagaaatgatgaacttcggtttcttggcctttttaaggttattggttattttccactgtggccacctctattcatctccctaaataccaggggtccttgagaaactttttctcttttcacccaacagagaggctccagaaggtttctgggtggggtaggcacatcacaaactctgattttatcctttctcctaagagtttgctttacttaacaaggcctacaatttcacaatctataccacctgcagcatatgtcagaaaacagctgagtgctaaaattgtaaaaggcaaaacattaagaggaagataaacccctggatgagtggaaatatgtgactgaattctgtagttaacacagaccattgttcattgttaaggagatggggcagcctcagatgttcacgtgcatgcaacttgcaatcatcagatcccctcgtctctgagttacggtaacttgagcagtgcagatgattatcagtcacctgtagacacgatgactcaatgtgtatgaaacccagaaagggtaaactacagtaattgaaaagccaacagctcacgtttctttagtaacacactcataaaaaaggttagtcaaaccacaaaagtgtaactgcttccaaacctgcacggagcatctggtccagcttctagtcaaaatcacaccacgcctttgaatgattcatgataccagcttcaggctgaattagaggtcttcttccaacaaaaatacacacggcaacagcaagtcctaagtttagaaactaaggctgcctggttgggccattccctacctgtggttctttttaaaggtgtcaatgtcttatatcttggctttgttaactctaaactaagaaaccacctgacctgaactgatgcaatgtggtgaggacatatggttgttggcttctaagtgccaacttggaagtacagaatcacaggctagagctaaaagggcccttaactgagcaagtggattcagaactctgtctgcagggttgagggggaagacccaccaccctaatatgtttacttctggtctttatatttcacagtaccttgcactgtgccttatatacaataatcccaataatgataagtactatttattgagcccctgctgtatccaccgtgccatcctagatactttgcatactgtctcattttaccagcccattaggggttgatactttttttttttttttgagacagagtcttgctctgtcacccaggatggagtgcaatggtacgatctcgactcactgcaacctccgtctcctgggttcaagtgattctcttgcctcagcctcccaagtgtctgggactacaggcacgtgccactatgcctggctaatttttgtatgataccttttaaggtatgaattatcatctcttagatgaagaacctaaagcacaaacagtttgattcactttccaagattgcccagttggtgaacagagaaccaggatgtaatccaagagcccacatatcccagtatatgtttgagtgttaactgatgtttcctggctgctaccttgcccatggctgcacagccccaccaccagcagtgacttcaggttttctgctgtgatggttcccatagcagagggaaagggggcttagtggcagcaactgctttttccacatggaccagcacatgcactcaagaagtatatgctgtgcagagttgttatgatatctataaagtgcttagcagtgccaggcatgtgtaagcactctattcccattatttgcttagcaccatggttaggtgatttgaggaatacaacaaaattgcaatccactagaggagatgcagcatgtacatcatttcatgacaaatcagtatccttaatgctacatggtagaacaaaacatagagtagccaagagagtggaaagagaaaactgaattacttctcaaatatgccacacttaatatggggcaaagattcatctattctttaaagtctccttgaaatcagaggtggtggtagtgacggtggtggagacagtcatatctataataagaagcagactagtaaactcgcctggagtgcagagggaggatggagcagagagagaacacaggggtgtgggaatgtggacaatgtgtgcttctttttattttttatttttgagacaaggtctcactctgttgctcaggtgggattgcagtggcgtgatcacagctcactgcagcctcaacctcctgggctcaagtgatactcccacctcagccccctaagtagctgggaccacaggcccatgccaccacacctggctaggtttttgatttttttttttttttcagagacagagtttcactatgttgcttgggccggtctcaaattcctgagctcaagtgatcctcccaccttggtctcctaaagtgctgggattacaggcatgaggcactgtgcctggcctacaatgtgtattttaagggcagatgtgagggaggccattcagacaagagtgagatattacacagaagagggaggaggagttcattgtggctgaagtaaaggactggttggctgaaatgataaaattagaagaggtaagttgaagacagattgtggagggctcagaaggcctgactgaatggtttagatttgattccactgggagccattgaaaggtttttttgaagaggggggcaaaatgatcgaacctttagaaaaataacagaaatccaatatttagagtcaccatgatggggtaaggtgaaatattcaggtcttaagtcttaaagttcttcaagtcacttaaatgtgtttgctgctgcgtcatataatttcccacaagtgttatccctcactcttactatcagcacacatccaaaagcaaatgaacaaaaaaggcaggaaaatagaatatccaaccatcatcatggctctgatctcaacctaagtgaaactaacacttcttgcaggaggtggaaaacagaggggagccagagaacaagaagaaacaggaaggaggaaagaacagagagagctgtgggggtggcactggggaaagctgagctggagaccacatttggttgctgcagaagtctttgtcctctgtgagacactgggaagtgctgtgtggatgtcatctgttctcatggagtcaccagggaagactgttcttttctaaagagaatcacccttgagggagaacaattgcccttcttcaagggtttttttcctcctatcaattttcttttttgtttttgaaacagagtcttgctctgttgcccaagctggtgcgatctcggcttactgcaacttctgcttcctgggttcaagtgattcttgtgcctcagcctcccaaatagttgggattacaggcacccaccaccacacctggctaatttttgtatttttagtagagatagggtttcaccatattggcccggctggtcttgaactcctgacctcaagtgatccacctgcttaggactcccaaagtggggaattacaggtgtgagccactgcacctggcctctcccaccaactttcaatgaccagactccttgctgtccaaagccccgcgcatgacatgcactgctcttggtcacctcctggggaaggaagggcctggactgcagtgccttataggccgaggtctggcgctgctctgtcacctgccagctgtgtcactccacctctctgatcctccttccttccatggtaaaagagcctcactggtggttcctaatagcccaaaaatactatgacattgtaatgcttacaggattatggacatcaggcctttgggaaggggttggaaaaatacttttttttctcttagaaacaggtattaaaactgcttcctgttgctgttaaccaaagcaggcaatttctcattagttacttcacagggagatccgatggtttgttgaagtgtcaaaacctcattaacatgtttaccacaggtgagtgagatctttttttcatgttcttttcgttatgaaaacttcctttaataaagtaatacataaaacttttaaaataaggagatgctatggtaaccactttggtctgaataacatctgtttttttgggaaagaataaaaatcaggagaaatatgcagaaatgtagtcatttttcttctgcatccaagagagaaatccattttgagccaagtatttgaggatggcctagtttgaagtgtagtcaaacaagtttataacaggagaacaagattcagagaaaggaaatcccctaaaggacagtatgtgcaaaggaaggtcttcttgtcctttgaaaagaacaacttaaacagaattattctgacaatgtaaagatggtgattcctgatggacgtgtgtccatttttttttttcccatttgaaacaaagacatacaaaatttcttggagaattagaaaaaaaaatatttttctccaacttgagagcatgtttgtgtctcaaaatacatttagacttgatccaatctgtccctcttccccagttcatctctaatggatgcaaaatgctccctactggtaattatcgccagcccgcctgagatagcagcgggctgacctgatggtctattttcacctttaccctcacagttcaagaggtcagggaagtcaaggctggtctgagtgctgtgcaactgtcagcaaggattaaagggaatgactcactcttccttcacaccttacccattgccattaccctggcagctgaatcttcaaaaaacagtgccttggagaggaaatataggagaaaggagagaagaggagaagagaagggaggagaggagggaagaggaggggagggaacaagaggacaagagaggagaggtgaggtgaggcgaggcaaggcgaggggagatggagagaaaacagtagccccatgttttacatcacttcatctcatacactgcacagtgtcacaaataatgttcctttctccctccgttgacattactattttctatcacaaaggttgattcaattaaataatttaaggggtttcttttatttttaatttttaaaaacctttcaaacaaaagtttaggatataagttaatgcaagaagattagaacagtgcccaaaacaagaataccatatatatgacaggaactcttaaccttctgtatgatgaatgaatggacaaaaaagtgagtgaacaagtagtactgccctaagtaaaacacatgaatgtcgggctaatgcgactgtgttttagattctcagatttataccatcttcctaaaacaaaaaagactctaaaaacctaggatatggtttatagcataaacaccacatctgtatagccttgagaaaaaggctatctgaagttacgcacatgggctttctaaacacacagtggtatcaataattgctgccttttatttcttttctaattaatctcacagacttgtacatgggaggagacttcctggtcacttcatcacctattcagtctcctcatttcacagatgagtaaagagaggcccagaaaggttctgtgattggtctaaacacacagttaagaaatgacagagctaggatcagaacctgggtcttttagcttctaatccagtactcttcttattgcactacaacacaacttacgaaaaaaaaaaaaaattcccccagttattctgggccctgaagccctgaagttgctacctcaatcaagagctaactctactaggtttctgattccagcacagagagaatgtgatggttcagaagatgagagaaatcaacacctacaagatcagcatctctcacaagtctggaagtagtgaagtgaaaatcctctggttgcaattgtagcaaacaaacgaaatagatccccgaggcaacaggcaaaatggcatgaatttgcacatatgaaacatgctatatttttgaacccatgaaataccaaagcaacttttattatattaagtagggctttagttcaactataggtttagggcaaccgaaaatactagggactgtctctcaaattttagttgtcttacaccaaaatgcattgaccacaactggattgaaattaagtcacagctgggcgcagtggctcacgcctgtaatcccagcactttgggaggccaaggcgggtggatcacctgaggtcgggagttcaagaccagcctgaccaacatggagaaaccctgtctctactaaaaatacaaaattagccaggcatggtggtgcatgcctgtaatcccagctactcaggaggctgaggcaggaaaatcgcttgaacccaggaggcagaggttgcggtgagccgagatcgcgccattgcaccccagcctgggcgacaagagtgaaactctgtctcaaaaaaaaaaaaaaaagaaagaaagaaagaaatgaagtcgctttacatttttttcttgcccagctctccctatgatgtccctcctcttgtcggcttcagccatttctagagtcaaagctttctccagaccagcctgggcaacatgaggagactctatctctacaaaaagtttaaaaattagctgagcctggtggtgcgtgcccatagttccagctacttgggaggctggggtaggaggatttcttgagcccaggtgtttgaggctgtgattgcaccacagcacgccagcctaggcagtacagtgagaccccgtctcaaaacaaaccaacaaacaaaacccataactttctccaaactaaaatacactcagaataataaggcaagctttcttttgtactccagtcagaacctcttcacataagtaaagcccaaaagatatatgggaatatttgtagacaatgtcttaaactcaccatttgtttactgtgcctaaactctaaatggaagtcactacatgctcccctgacatgtctcaccaaggggagggaggacagcaaggaggaggggatctccctaaactgaaatataccaacttttctctgacacaatttgttcttaaagtgactaaaagtgcacaaaaacctttcagctagtcaaaataaaataagtaggcagaaataccaaattaggtaattttgaaatatatgggttctttcaatatacctctataattcacatagactgtttgcttgtcaaaacattatctataccagaatcaaatttagtcagatttaaaaaccaggcaggcaacttattatctgtaagagctattgagaagaataaatacaaaaggactgaaataaaaaatcaacagcggcaagcagctttggaaaaagaggctgagacaggtttctaaaatattactgatgttgagggaggtctattttcatgtgataactatttttgttcaatatcaccaactttcaatttatagcaaaactgatacattcaatttcagctgtctacttcacaaatacaaatctatttcaaatatcatggtcacatttatgtaaacatctgggagagttcagcaaaatgtctctgccatttggaagtcctaacacttcaatgaacataattatttcatacccatctcattctgctgtattttttgacaatgtgaaaaccaatggcataaaaatgaactccagtaagacaaatgattaaatcaaaccttgttatttaaatctatgtttgcccaaccactttcccttaaagccaattctcaaattcaagaaaatatggcaatatgttttagagcatgaaaaaagtttgagcatgctaacgaaccaacttgtaaaatataattacaaaagattacaaaaatgctatcttgaacatcttactggtataaattgcataaactctctcatgcaacatatgtcattcagagtaaagaggaaggaacaggattttaaacatcacatccatttaggaaattggatatcaactactcccatctcctgtcatgatgatgctttagttaatatcttttattctattttccagagctatcagaatgaaccatgaagaataaaagtacacaatgaaaaactaattattttaacagaggttaagctaggaaaggccttgtgtagcaagcatcctatgttatttcattcaaactatctgctaacaacagcaggaaaaaggtttgtattcttaccaatgaatttctgaggcattgagctttttcgttttgccacattgcttgctaatctgtccagtacgagagctctttcacttcccatctctgctttgatgtgtcttgcctccgcacttgctagtttggaaaaatgtaaaaagaagagagaaaagaacacattggtacatggggagaaaaggaaataaactggaaggagaagtgtccgaagttggatgcacactctattgttgttacctgttataactgctcagattcttgcctggggtacctgctgtggtcagtgaagccgacaccagggcacattcaaatcttgcagtcttatgccgagatgggaaagctcgacccatccccaaccagtaccttcattagcaagaggaagtattaaataaacagcctggacgtggttggttgcaaaaagatagatagatggagatctaacccccgatcagccttctttctgattctgagtaactgcgtgtgacacctgcagactgatataattcttaacaactttgaaaaaaaagcatggtgccccagatttactgctctgtttatgttaacagcacttttgaaaataggtacactcacacagatagcaagacatctactcagtgatttgtgtattgaaattctgagtggtttctttctttttctttttctttttttttttcagcacgctcctctcagttcctatctttcatattctgtttctctgtgctctgtattatctgtttcatatgctcttcacatttcaaaatagtctcaattaaaatttccctaagcaacacttctgccttgaaattaaagaacaatttgtataatgcatctgtattgaatttctaataaaaatgtgaataaaaactgcctatgggctgggtgcggtggctcatgcctgtaatcccagcactttgggaggtggaggtgggcagatcacctgaggtcggagttcgagaccagcctgaccaacttggagaaaccctgtctctactaaaaatacaaaattagcctggtgtgatggtgcatgcctgtaatcccagctactcgggaggctgaggcaggagaatcacttgaacctgggaggcagaggttgcagtgagccgagatggcgccattgcactcctgcctgggcaacaagggcaaaattccgtctcaaaaaacaaagaaacaaacaaaacacaaaaaaacctgcctatgaatgtgggcccatccacaaatagacctgtgagtggtgtaggcctgtggttctcagacctggctgcacattagactcacctgaatagcaggtaagaaatacctatgcccaggccccccttcagatcaattaaatcaggatttctggtataggggcctaggcaagaatattttcaaagctccccagatgattttaaaatgcagccagaattgagaactactagaagagtatataaatagtggcaatatctaatcaactaaaatagtaaactgtaatgaatataatttacctcaattcagcaggcagtgcccaaatttatgtctaaagttcaaagaaggccaggcacggtggctcacgtctataatcccagcactttgcaaggccgaggcgggcagatcacctgaggtcgggagttcaagaccagcctgaccaacatggagaaaccccatctctactaaaaatataaataattagctgggtgtggtggcgaatgcctgtaatcttagctctcgggaggctgaggccggagaatcgcttgaacccaggaggcagaggttgtggtgagccgagattgagccattgcactccagcctgggcaataagagcaaaactccatctccaaaaaataaataaattaattaaataaatttcaaagagataccagcttctctaaatacaaggcttgacattttaacacatgatgctagcctgaaccagggatcagcaaacttttgtctgtaaagggccagacagtaaattttaaaaatttgccagacacatatagtctctatgttatattctttgttttttgttttttttttttctgttccacggccttttaaaaacgtaaaaatccctgtacacaaacaggccactggctgcacttgcctagagcgccacagtttgccctcacctgccctgggcaaacatattgtgatgctgtaaacatttttctctgttttctcataaacacttcgggagatccaaactaaaatgaactatccatacatttctattatgtctaaggaagaataaattgaaattagtttaagggattagagtaaaaagcaagtagtggctggcacagtggctcacccctgtaatcccagtgctttgggagactgaggcaggaagattgcttgaggccaggagttgagaccaacctgggcaatatagcaagatcctgttcctacaaaaagtaattttaaaaaattagctgggcatgttggcatgcgcctgtagtcctagctacttgggagactgaggtgggagggttccttgagcccaggggtttgaggttacggtgaactattaaggtaactgcaaagaccacaattacttttgcaccaacctattagtgccagtgcactccagcctgcgtgacagagtgagactctgtctaaaaaaaaaaaaaaaagccccaaagtattaaatatttctaattttattagtggccttaaaaaactgtatgttagtcattacacaatacattataaagctcagttttcattatttagttaatttatttacttatttttgaaacagggtctcaactctgttacccagggtggagtgcagtggcatgatcacagctcactgcaggctcaacctcctgggctcaagtaatccttctacctcaggttccaaagttgctgggactacagtctaaagccaccatgcctggctaattaaaaaaaaaaattattagtctcaatatattgctcagtctggtctccaactcttggcctcaggcagtcctcccacttcagcctcccaaagtgttgggattacaggcatgagccactgcactcagccaaagctcagcttttttttttttcctggaataacataaaatctggctctgccaggtgtggtggcactagcccatagtcccagctactcaggaggctgaggtgagaggatggcttgagcctaggagttcaagttcagcttgggcaacacagtgagatcccatctcttaaaaagaaaaagaaatccagctccaaaaatgaaaaagaagaggatgataataatgtgataataatgacaatatttactagacagtgagtttcttgtcaaaaataattctaggctctaaaggaataaatcatagccttcagtgaagctattaacaactatttgtgtaaatgaaaacagtaagggtcagaatagggggcctgagtggcttttgggctagtgcaaaagtactcgactgactctggctgaccagcagttgtaaataacgggcacttcagccacaagacactgctattgagtgaagagggtcaaattctgtccagcacagggataggtttaaatgaccaaacaggaaattatttatatatattatttcctttcacacaaaaccaccaccagatgtggcactacccaaagccccaagagcagagagatgaaagacaaagcttggaatttgcagtaagttcctggggctgttaggagacttttttcttagaatcaggggagaggtagctaagtttgcactttgactaggaacattcatcctggttccagcaattttgagaagattaaatccaagtaagcctcccctcaaccctgtagttatcaacaaaaagatttatagggaaaaaaagaatgaaaaacagtattctgggaatgtttaccttttatgcccattttaccattgttcttattagtctattgtggtccctcctctcactgccaaatcattacccaggaattaccccaagcacggtgctacccatctagttttcccatttgtttctcagcagtcgctgtctacattttactgaagtcaatgtcaattaaaacaagcagctttctgaggacacgtaatcaacatcctctacatttgggaggatgctgaagtgtggacacattgacctaaataactgtaattagggcaggtcactaaatggcaaacttttgagataacatcaccttttattcctcgttacccaccaaactggtctttagagtcatttccagataaacattattctgtaaatcagtgaccaaatgcctgacatttaaaaacataaaattctgcagtgttcatggatggacatattttgaggcatgggtggagactttcccatttccacaactccgattagattgaaagaaatcctctgaaacgaatctagaggactcctgttcacccacaccctctttctgggtcattcactcaaaatattaactacaagagctccactctcattgtacatgtgaacacactcctactgattcagttgatcttcactgaattaaccttgttttctagttgataagttaggcaaaggctagttttcaattgaagatggcactcattttctttcctaaactgctagtcttttgcctcacacttgttggatagctgatgcacaataccatgaaatgagtgccctttgaaacacaaagagccaggttccatggtttgcgcctgtaatccagcactttgggaggctgaggtgggaggattgcttgagcccagggagctatgatcttgccactgtactccagtgtgaggaacacagtgagccctgtctctaaacaacaacaacaacaacaacacacacacacacacacatatcacacatacacaaagaaatgctttgtaactggacaagctctttgggattactgagtggtttaggcagtgcactgaaaagaaaaaaaagaggactattggcttttggtccttttctccaactttaggacccaactgtctatttatacgaacagtctagacttgttatcttgccacttcatatctcagaaatgtaagtggagggaaaccagtttggcaagatagtaagggaacaagataatgggtttaaatgacgaaataggaaatccgttcctgggtggtgtttggcggtgtaatgctgcaagtggtgggtgtggggaatatgggatggtggcaaggaacaatttgcacattcagctcatgagtgagaacagaatgagtagaactgtcattgtggatcaatttcccttcacattgcttgcctactaaatagtagacatactaattttcattagaaaagttattttaaagacgtgctgaaaaaataataaaatgtagtacaaagtcacatttacagattaggttactactacctttattccctgtataagtcttaatatttggttttagttaactatttccatgatacaatttctacctcaaagtcattggaggtttaactatgtaattgtgttgtgcttttgtttttgttcaaaatccttcattagatcttgaagtgttaagtggagcttaaataagaggtattgcttcctgtctcttctatggtgtagtcagtcagtaactaatggagagtggaacaaagtggtgttattatgcaatagaaattgtctaacaagagattggtatcaaagacagaggcaggttctaacaaaaaagtttcataaaactgttgcctttttgaacaagtaaaatgaatactacctgtgagatagcattttttattttttgagatggagtctcgctctgttgcctaggctggagtgcagtggcatgatcttggctcaccacaacctctgcctcccgggttcaagcaattctcctgcctcagcctcctgagtagctgggactatcagtgcatgctatcgtgcctggctaatttttgtatttttagtagagatggggtttcactatgttggccaggctgttctggaactcctgacctcgcgatccgcccacctcagcatcctaaagtgctgggattacaggcgtgagccaccgcgcccggccagtattgatttttaaaaagaataggttggggccaagtgtggtggcttacgcccataatcacaataatttgggaggccaaggtgggcagattacctgagatcaggagtttgagatgcctggccaacatggtgaaaccccgtctctactaaaaacacaaaaattagctgggcatggtggcaggcacctgtaatcccagctactcagtaggctgaggcaggagaattgcttgaacccagaaggcggaggttgcggtgagctgagatcgtgccactgcactccagcctgggtgacagagtgagactctgtctcaaaacaaaaaacaaaaaacaaaacaaaaaaaaataggttgggaaaacaaacttaaaaatttttaaacattttctttggtctgctaagttggtaaaaatgtaagtttattctgaagccctcatgcttgtattagcttgaagaactattgaagatgaaaagtttggagtcttagattcataaatagatgtgattattcaattatttaaaaatattattattgctagaactcattgttacataaaatatttcctgctccaagtattcataatctgtgtgaatgaggctaaatgaatctctataccggctgttagtctctttctgaaataagaatcaagctaatgggaaaatgcagtccatgttcttctgtatttttccttcttttcatatatactccattaagacagaattggaatattctgatggtgtcacttgtgatgcctgatgtagaaacttggactaaagtagcaatatcactagtgtctttttttttttttgagatggagtcttgctctgttgccaggctagagtacagcggcatgatctcagctcactgcaacctccacctcctggattcaagcaattctcctgcctcagcctcctgagtagctgggactacaggtgagcaccaccacacctagctaatttttgtatttttagtagagacggggtttcaacatgttggccaagatggtctccatctcttgaccttgtgatccgcccgcctcggcctcccaaagtgtcaggattacaggcgcgacccaccgcgcccggccaggattgtaaatccttaaagtgtaggggcttaaccttaactcatctttacaaacagctttgatacagagcctggcacatagagaactcaacaaatgctatctggataaaagaaatgattagcaaggccagaagtcctgttgcccaatacctgcatttttttgcaggctggtcttcactccaaggcctttttatccatctgcttgcttctagaaagtcctgcttccccttgcaggcaggtttgtccacaggcttggctctcacactacgctgcacttcaacttacaataagcacttgaagaatgagtgctgcaggcacaacagcaatggagcatcatctctttacaagtgacggatgaggcataagatgtactatactgctcaggctcagaatagaaccccatgtccacaatggactcccaattctaagaaggaaacagaaatggaaaccacacatggaagggtgcaaaatagttaaaggattggcttatgttgggttaaatattctgtaaattttggcctcaggaaaaattataggaactatttgaaatataaaagagtaatgtgtgaactgagatgcagtaacttgattaagctgtgaatttacacatttataacctgaaaccaccattacaacatatttgtttgaaaaaaaaatcaaaacttgctgacttagttaaccctttatctttttttgctgagacttaaagtatggtgcacgcatccaccaaaccaccctatgaaatgcaaattaactcaacctctgtatttcagcatttcctgaatcacctaatatcactgagaatagctaaaatattacttttgatacttttccttatttgaaattcctaaaaaaggttgtgagaatgggaagtaaggtggtgaccttacttcaaaatcaataattttgaacttactgtttatagagtgtagttttctgatttttccccctccttccaggagaatcaggacacacatatatgtatatacatgtgtgtctattagtatgtgtgttactatatttcttttgcaaaccagataatatataacctttaagaaatatagctaatcaagccaaaaagtggaaaaggtgtaaaagactcaaatgtccattagctgatgaatggataaatggaaagtgccatatccaaacaatggaatattattcagccacaaaaaggaatgaagtcctgataaatgcttcagcatacataaatgcctcagaaacattatgctaagtaaaaggagccgacacaaaaggccacatattgtatgattccatttatgtgaaatgtccagaacaggcaaatccatagagacagaaagtagattggtggctgccaggagctagaggaagggggaatagggagtgactgctaatgagcacagcactgcttttgcggatggtgataatgttctgaaataagatagtggtgatggttgtacaactttgtgaatatactaaaattattgaaatgtgcactttaaaaaggtaaattttatagcatgtgagttatatctcaagtttttgaaaattaaaaaatatgactaatcacaaaaacaactaaagttctggtgaattttaagtaggtcactgaattttgggcgagtctcagtcttgtcacctctaaaatgaagaagtagggtcagatgctctctttcattctagctttaaatattagtgattctacttggaatatgatagatttcatagcttgggaatctcttacagtgagagctttgcctattgtctgaaatacagaactgcaagtagagatgcctacattccgtccttgagcgagtactgcctgactgccatgaagcatgccacttaagatgtcaaaatctttcctagcaagcagactcagataaaagcaaaacaaagagaagatgtcaaaacccaaatattaggtttttctttttattttattattattgttttagagatggtgtcttgctttgttgcccaggttgggcttgagctcctgggctcaagcaatcctcttgcctcagcctcctcagcagctaggactacaggtgtgtaccactgtgtatgacctgtttgttttttataagggggtaaacatttctttttatttggataagctttatccaaataagttggatttcctttatcaaattagaaatccaactccttgataaaaccaaagatgccattaggataaaaagcagaagcactgcaagccatcagaattcagttggccagctcctaacatcatgcaataggttttatctaaaataaaagtttcctctcactcaaaatgagggcagtttaggtagtcatttctactccatttttcctgagtttcacattatttctgtcatctttttgtaacttttctgttttagcctattcaaactactcaactgcaacaattgctgtcaaacactaaatcccatgagggtttgtacctattctaaataagcaattggttcaagttaccaaataaaaatgtcagacaacccaagctgcagaaccaggctgacagccaactcaatgggacaaaggacagctgaagagatgtgacacaaaaaagtttcaggctgttccaacaaagaattaaaaggaaataaaaccacaattgagatatagaagaacatctagtgtttcaaccaattgccagtaggcatctaattcaaatcactgaataaaacaaggaatccccaaagccaaatagaagcatcacaataaatcatatgagtagacaaggatataaattgggccctgtgcaaagaaaatccttgtagttttaattgcctcttccctagccactccccaacctcctctaccctcaatttttgccattttttgtaaacgacaactccactcttcatcaatctgttaggaaatcttgttgactctacctttaaatatacagagaattagaatacttctcaccacctctaccactaacaagacataattttctcttgcttgaattattgcaatggcctcctaactggacccccaatttccaaccttgccccaaatacaatctcttctcaaaagcaagtagagtgattctttcaaatgagaagaccaatgatgtcacctctttgtacaaaaccctctaaagatttttaatttcactcagagtaaaagccaaagcctttacaatggcctgcaaggcctgagaagatctggtttcccatttcctctctggcttcaggtcccattactcactgtgttccagacacacagaactacgtacacttcttcaaatttgtgccccagggcctttgctcttgctgttccctagttatctgcagggcttactcaccctgttaagaagtctgttaaaatgttacctcgttgaagccttccctgattctcaccctcactcctcagcaactgcttcatttttctcaatagcacttaccacccgctaaccttccaacttacagtttgctcatttactttctttataatctgtctgcccccagtaaaatataaactccacgagtctttttacttactattgtatctcaccacctaggacagcagatgctcactaaacgtgtgttgcgtgaactcaccagtgtcccctgggtcagtgctctgaagaaatgtacggcagcgctccttgtgctcctcaagggaacttctctgcttgtaactccttccacaaaactcacatttgtagggtttctccactagaaggagaacataaggggcactcagtgaccctcaggggttccacacaggtcaggtattggggctctgtgacaactgttcactagaaatgagactgctgagtgaagccagagtatttggatacttttgaatctatattttaaatttggtaagcttaaataaggttatggtctatgattaattattacgtcagagtattcttcaaaaggatcgcctcctatcacaaatggaagaatttggatttagtgattaccatttcgcatactgttttggctccaggtcaaattttgttttctttgggaaaaagaaaatagggcccttttattcttcaaggaggttaatgtggtataagcaatgaaataggaaaggattctttattttggacatccatctggctgtaagtaaagattgctgtagtttgtgggagttagccattcggctagaaactgatggccttttcagaacattgacatatttgggtaaatttagctcatccttgccacgtggctatagcaaagtctaggctaaaacaataaaaactgagctaattaactacggatttttttgtttttttgtttttgagacagggtctcactctatcacccaggcttgggtgcagtggtgaaatcacagctcgctacagccccaatttcataggctcaggtgaagtctgggcctcccaaaggccaccttggcctcccaaagtgagaggcttacaggtgtgagccattgcacccggccaggatatttttgaataatagaaataaaaataggccgggcgcagtggctgacacctgtaatcccagcactttgggaggccgaagtgggaggatcacctgaggtcaggagttcgagaccagcctgcctaacatggcaaaaccccatctctactaaaaatacaaaaattagccaggcacagtggctcacgcctgtaatctcagcactttcggaggccgaggcaggcggatcacgaggtgaggagttcgagaccagcctggccaatgtggtgaaaccccatctctactaaaaatacaaaaattagccaggcgtgatggcgtgaccctttagtcccagctactcaggaggctgaggcagaagaatcgcttgaacctgggaggtggaggttgcagtgggctgagattgcaccactgcatcccagcctgggcggcagagtgagactccatctcaaacaaacaaacaaaattagccgggcgtcgtggtaggcatctataatcccagctactagggaggctgaggcaggagaatcgcttgaacctgggaggtagaggttgcagtgagctgagatggcgccgctgtactccagcctgggtgacagagtgagacaccatctcaaacaaacaaacaaacaaacaaaattagctgggcgttgtggtaggcatctataatcccagctactagggaggctgaggcaggagaatcgcttgaacctgggaggcggaggttgcagtgagccaagatcacgccactgcaacagcctaggcaacagagcaagactccgtctcaaaaaaaaaaaaaaaaagagagaaataaaaatgaattgtaaaaatgacttcgtctaaatgtctaagatgaaggaaaggtttcacccatacaattcatgcaaactttattctgccaactccccaaatgctttattgcttgaaatatgtaagtaataacttcaactatctgtgcaaggctggtctttctgattgttgatagaatatactcaatgaatttgtcagttttaggggctaaaatttttattttctaactcttgctctgtttaaaacagaggctttgggatttaaagcactaaaagatccttatggaatcctaaattaaaacaaatgcaggtttgctagggctaaaaatgttacgtttctgcataaattgggttctctggaatctgtctttaaaaagcctactattgtttcttacttgaaaaaggcaacagtagagaactattctaatttttttcgaaccaaactcatccttaattcactactttgaaaaatgagctgtaaaagagagaaacccttcaattgccaattatgatctctcatggtgggttttgttggggctgacttgtttaatcctagtggctgaattataacaagttttgagtttggggctaggttttaatcaaagcagtagatgtgaactgacataaaaacaagcctttttttccaattaaaattttgccagataacatcaagaacatgaggtcccaaatttgaaaataaactcagtcttatttttctaggacggaaattctaaatcttgaaaaaaaagtattatcttggtcaaaataaggagtaaaaacatcacgacagcacataacttttacaaatctttaccgttgttcaatcttttagagatttaaaataagtaggctggctgggcatggtggctcctgcctgtaatcccagcactttgggaggtcaaagtgggaggaatgcctgagctcagaagtttgagaccagcctgagcaacatagtgagacctcatgtttatttaaaaaaaaaaaaaaaagtgggccaatcaagaggaaagttggatttaataaatttatcccaaatggccaaaaagtagcccccaaacaatgatttatatccagatcacagtttttcataatttacaaactgtacatcatttgcttgtctcgtcttttgaatggaaagagtgtgtgtgttgggaaaataatcttctaataaagtttaccagaagaaaatactgatggctataattttctcacaaaaattaaaaggacattttttatagggtgggctcttcctatctgactgtgttgttctccatgggtgcaaggatggtgaggagatgatcatctccactgaggcagacggagagcaattagtgccttaatggtcgtgtaattagccctagaggtctctgctgttgtaacccttcagaacaagaatgacagattgaaaccttcctacttaactctttctagtttccacactgggctctgaggaatgcacttcctagacaaggaatgctcatttctctcacttaccagaatgtgtcctaagatgccccgtgagcgcatctcttctttggcatgcatagttgcagaggtgacacttaaaaggtttttcccctgtgtgcagtttaatgtggcggaggaggttacctttctgagtaaaagatgccccacactgattacactggaatgggcgttcacctttaaaaaggacaaaaaaggagatttctggtcacaggcaagtggagaaacatatgcacagattagatgcctaggggaaaagctcatcttttagacaattactgttcacattgggatcagttgggagctgcatttcaaggcaagcctaagacttacttatgaaatctcctctgtagaagagaaaaagcacccactagcaaggctattttaggtatcatattgaatcagagcaaagaaacaagagcagctctagaagtgctttctagatctaagtttttatattactatattacttggtactcccttttttttttttttttttttttagacagggtcttcttgctctgttgctcaggctggagtgcaatggtcccatcatggctcactgaaaccttgacctcctgggttcaagtgagcctgtcacctcagccttcagaatagctgggactaccagtgtttgccattatgcctggctaattttttagtattccttttgaatataatctcctttgaaaaaagagccagaaactaaagtccttacaaggtgttgagggctagaaattctcctttttaaagtcttcatatgagatatgggatggaatcgactggctcaagtgcgatggttgtgtttgtatgcatttctatagactacctgtttattgtctgaagatacattattttaagctggaaataaaaactatgtcctttcatttaccaaatttgaacccaatacaataagaagatctgctcttattaaaaatgttatgcaaaaatatacaaaagatggctaagaagcaaatcacacaattcaactcctacttagaaactgaagaaaaagtatttggctgacctagaacactgtgctctctacagtctttttttattcatagcatttgcaatatgtttgccaaatgcatggtgaggcaggaataaaaagcactgagtgaacagcaatgcagagagagagatacatcagcattatagcaaaaatcaatgaaagtaaccaaaagttccaaattccaccacttcatttctcacgtggctgcattaggagagttttcagaagaatgaaaaaagcagactatttaccagtatggcttcgcttatgaaccattaagacattgaagctgatgcaggataatccacacacatcgcagttcatctttccactggttggcctgctactatcgaatgagacaacatgtctctccaacttaatgttttcatattcattatattctcttgaatagctgtaagggatttcaggctcttctgcatttcccatgggttctgactttaaaacattctcatctctttcactgtattcatctttcactttcattgaatcatctgcagggaagaaaatgcaagaaatgaacaacgactatacttgaagctatcaaagcagctcaaacagcagagacccacaactgacaattaaataccaatcgaagctaacaaaacactgtacatctacaaaacaagaaagcaccattagcgtgaccgcacgttatttaaattcagaaccacagtcagaggaaaacacacatacttacacacataaaaatagacgatagtgttttaggctatccagaaaattacagataatagattttagctaagtttgctcaaagtggccatgaaacaaacattgagcaactcttctccagtactaggggagaggaagggttctcagatctagtactgtttttggtggctgcagttaaaaaggcaaggtgatgtactcttaggtttcaaggagaaaatattgtttgaatccttcagatgcatccagtgtaagccattaagattaagagttgactagttaacatagtttttctaattttaagccatgcattgcctcttccccttccacgtatatgaattgctaaaacacatcttatctctgtctctcttggagctgataaaggcacaacattgactgtagaggaagttgtcagtactaatgaaaaagtgttgagaaagacaaaaggaaaagtaattctttcatataacctaaggagtcactttcatcgacacaggtaagtggggctcaatctaaataaggggaaggaccattaggtcccaagttagggagaactaaactcaaggactcaaggattgtgtaataggactggataggagaggagggactggctcaagtgagttggctgaccaagtactatcttaagaactgcaatgtaaatgaatgaaatttaaaagaagagctgtaatactcttcatgaagagcataagaacatatgaagaacgtgggaaaaatatgaagaacataagaaacaaagaaggcaaatttatgtacttgcactgacactagtaaaacctaaaaatttgcctgatgtaagaataataaacatttgtaagggattttgcatatataaaatatgctatataaatgcttactttttcaaccattggtccttagaaatcaaaagttgtacctccccatgaggaatcacaaatcaatggagtgtagggctggaagggaatttaaaggtcatctaatccaaccctcttgtttctcagatgaggaaatctgggagcagagatgtttttggtcatttgtcgaaggttacacatccagttactggcagaggtgtgattagaatgcaaaacttaagcttgaactatcaattacttggatttgacctcatgcactagacatataaggcctaagtgggttcttaccaactgtattacacaccctcccatcaatggtgtaaatgttaaaacccaaaacagtctgaaaaaagatattttaaaaaactacatcccttccaaaaaacatcagtaagtgttgctcctcttgctgcataggaggaagtacaactgcagctgtgcctggcttgctaccttcaacccaagtttcaattttcacttctatcaaggttacctttcatctatattaactgtgtttgcttaatagagcaagacagggcctaaccaccatcagaggagccagggctgccacacagttccactgcttcctaccacagttcatggttcacaacttttcactctttgactagcaaagatgtagggctgtaggataagtccaacatgtttcaaatttgcccaccctatggatctggattatataagaaatgatatctgtttcctacttggaaagaggtttacttctttctctggataggtcttccctgctttcaagtggaatttgtttgcttaagtgtttattttttatttttttaagagaaggatgcacctgaggcttgtacttgcctcccttcctccatcactccagctgtgggtaatatcccaccaaagcttgagtgctcttcagtttgcatgtaggcgtttaaaagaacctcaacggaaaatttcagctacttaaaaccaaaaacagcagatagaaaaggccagcagaaaaggatcctttccattttggttagaaaatgtgaacatgaccagactcaggccactccatggtcactgaactttaaaatgtagtaagatcaatgtgttgagtctttctgaaaacagaggacataagagagctgctcctttccctcaggattttggctttagttggcctgacctggaattcaatacgacaccatcctggctcaagagcagatcttagctttagtcctttaggagtcagctatagagcaaggaagacagtatttgagacccagggacataaggacacagggacagggcattagagaagtcctttgggcttacatagttgctggtttgcctttggagtcttaccagttttagatgaatgacctggatgacctctctgcatggttactggggattagcaacttatttttattttattctattttattttttgagacatagtcttgctctgttgcccagcctggagtgtagtggcacgatcagctcactgccacctctgcttcccaggttcaagtgattctcctgcctcagcctcccgagtagctgggattacaggcatgcaccacaatgcctggctgatttttgtgtttttagtaaagacggggtttcgccatgttggccaggctggtctcgaactcctgacctcaagtgatccaccctccttggcctcccaaagtgctgggattacaggcctgagccaccgtgtccaaccagattctaatttattctaatattcaactctgttaccttctcaaggtaagccataataaattgctggctgggcatagtggctcatgcctgtaatctcagcactttgggaggccaaggcaggtggatcacttgaggtcaggagtttgagaccagcctggtcaacatagcaaaaccccgtctccactaaaaatatagaaaattagctgggcatggtggctcccagctactggggaggctgaggcaggataatcgcttcaacctgggaggtggaggttgcagtgacccgagatcgtaccactgcactccagcctgggcgacagagcgagacgccatctcaaaaaagataaaataaaataaaataaattagaatttaaggtatgaatgagattcctgagagatattaggcttagtactcagcctccaaacacagtccaccaaaaccaggaaaggcattagcctgctctaatgaagagattcatcccattccctggaagacttattgaagcagagaaaaggggtgttctacttagaaaaattctattagaaaatactaatgaacatgtctaaaatcaaacttgtcatctttgaacccaaacttgcttctaatttatgacttatttatgttgacaaatggcatcacccttcttccagtctccaagccatcaaactgtggaaccttttctctttcaatttctacatcaagtcagtctccaagatctatcaactctatgtcttcaggctctctaggtgccaactcctcttttcctttccttttgcaatttggtttcacctttcatcacatcatacctaaattcatcctctctcaacattcctttcttttttttttttttttgagtcagagtctcactctgttgcccaggctggagagcagtggtgtgatctcggctcactgcaacctctgcctccctggttcaagcgattctcctgcctcagcctcctgagtagctgggattacaggtgcccaccaccacacctggctatttttttaattttttttttttagtagagacggggtttcaccatcttggccaggctggtcttgaactcctgacctcgtgatccacccacctcggcctcccaaactgctgggattacaggagtgagccactgcgctcggcctcaacattcctttctagacagatttaagacacaggtggtccaggagcggtggctcacacctgtaattccagcactttgggaggccgaggcgggtggatcatgaggtcaggagatcgagaccatcctgactaacatggtgaaaccccatctctactaaaaatacaaaaaaattagccaggcgtggtggtgtgcgcctatagtcccagctactcaagaggctgaggcaggagaatcgcttgaacctgggaagtggaggttgcagtgagctgagatcccaccactgcactccagcttgggtgacaaagtgagactccgtctcaagaaaaaaaaaaaaagacataggtaagctatgcttactgcctctacagcctcaaaaaggactcagaattctctgtaatatggcttccgcctccacaattcacttaatctgctcccttgaatatcaccaaccataatctcctgattcctagattcagagcctttttgtatgccactctctccaacttctttgtaatcctcaacactactgaccactcaccattccttgttcttctgcactcctatgtcttttctttctttctttttttttttttttgagacagagtctcactctgttgcccaggctagagtacagtggtgcgatctcggctcactgcaacctctgcttcccaggtccaagcgattctcctgcctcagcctcccgagtagctgggactataggcacgtgccaccacacctggctaatttctgtatttttagtagagacagggttttaccatgttggccaggctggtctcgaactcctgacttcaggtgatccacctgtcttggcctcccaaagtgttgggattacaggcatgagccaccgtgcccggcccctgcactcctatttcttcaatgaaaatgtaccttctttccttgcctttctgattgcttccttcttgccccttttcttccctctgcatcctaaatactgtccttaaccttcttttttcttccctctacacccctcttgtatggcaatttcattcattcttaaggcttcgactaacatcttatatgattaatttccatatatataactccaggtgtaacctctctccctttctttagtcctctatttctgaaggcttcctaggtatcttcccagttactcaggctagaatccttagagtcatctttcctttctcctgattgggccccacattcaatcattcagtggttctatctgtgtatccaatctctaatctgtttctccactcctgtattttgcatgcccattacctaattctcagaccctatgactttcccacgatctacttattgctgtagcccccgcactgttctctttggctcccttctttctcctttccagcccgtcttgtttgttgctacaagattgctcttcctaaattctacctctggtcatgtcatagccctgtcaaaattcttcaatattttccactgccaacaaaataaagtccaaactcagaaacaaataatttaaaaggcctttcgggatctggccccaacctatctttggcatattaattttgactagttagatctttaactaaagagcttctaagtagtcttatttctactgcctaaaagatctttccccaatatggccacaggtccaagtcctacacatcctacgtattttttttttttttttgagacggagtctttctctgtctctcaggctggagtgcagtggtgcgatctctgctcactgcaacttctgcctcccgggttcatgccattctcttggctcagcctcctgagtagctgggactacaggcgcccaccaccatacccagctaattttttgtatttttagtagagacagggtttcactgtgttagccaggatggtctcaatctcctgacctcgtgatccgccggcctcggcctcccaaagtgctgggattacaggcatgagccactgcgcctggccactgtcctacacatttttaaaggtcaaactaatatgctgtctcctggctactatgccttctctgatcaacccagctggaaaatagcctgctccttcttcctgggttacttatgaactcacctcccctagtctccccaataaatatgtaaactagctgagggcagaagctatacagattgtgtgtgtgtgtgcgtgtgtgtgtgtgtgtgtgtgtgtttaactcagtattccctatgacactgcttaacctgtatctgtaagaccagaggttatgtggttttaaaatagaaaatttggggctcctaccatagatctactaatctgggggtggagactggaaatgttcatttaaaaccatgctctccagataaaccttatgcacaatggagtttgagagccactgcctcgagttagatgcagtgccctacataaagtagacatcccataaattcctggtgtatgaatatatcattgcattagcctcctaactggcccacggtacatgtgacctctgttatactgcatcctattgccagaataatcatgctgtagcaaagaaactcttatttaaaactttcaatgatttcatttgcttatagaataaagtccaaactccttaatgaggtattcaagcacctgtccagaacttgccccaggactacttaatcatctcatttctcagtcttcttgaatcacctttctctctatactagaactttactatgcaaagtgaggtccttggataagcagttctgcaaccgcctgggagcttgttagaaatacaggtgctcaggcctcaacctagacctactggaccagaatttgcattttaacaagatcctcaaggattcttatgcacattaaagtctgagaagcacagcagcaacatgactaatcacagttcttcaagcctcttctccagcctttcccacacctaaaatatccttctaccatttcaatagtgtattcaaacttccacatgcagtttaaatgccacttcttccatgaagtcttccttgatacccttaactagaaaaaaaattatgtttctttgttctcatacatccgtcttattctgctttatatttagtatgatataattacattgctacagatccgcttttatgtagttgatgtgttcataaaatgtttcatgcaaaaccaataacactgtcccgctgattaacattctacattcagaaatgtttattttgccctgatttcagttgtcagtgactggcaacacccgttcatttaataaaggcagaaaatcttaaagacctggcaacaaatacttgaatatatttggggaactgcctgatagtatcctgaagtcttttgtaaagtgaataaaccttttatagtatgaataatctcatgttttggttttgtaaattctaatcttcttataatatatatcaggtttcttagacatacatcttaagttgacacttagaagactatcaagaagcctcatagacactggtgaaagtttatttcttaagtcaggtggtgggtgtatggatgttttcttattattctttaatctatacatgtaattatacttgcctttttgtacatatgatctattttataataaaaaaagttaaaggcttcctgaataccttttttataactgaacttgtggagaaaagaatataccaaaccacaaattgctgataaaggtaattgctatacattcccagaggcagggaaaagatgtctaaattgaatctaacccataggaaattagattaaactaaactttctaaaggagctactctagggtacaattgctcccatctttgtctatgttttcaggcctcttaggaagatgacacacacgaacacacacacacaccccagagagaattttgtaggctgaagagaacaaaggtttggctcactggggctgatgcacatggtttcatttcctggggtgatggttatcacatgaaaggcttgtactccagagcagacatttttggtttcacctgagacactgcaaaaacaatgggtcctggaaaggatccaacatctaaatccttcaggggcaatagcagtctcagccaactgtgcctcagtttgtttttacaggcacataaaatgctcagttggagagaagaacctatcaaagatggcaaacagaatagacaacttgggtatcttggagagcatgttgatactaggaatttcccagtggaaaaaagagattctgaatttccaccttaaactatgagatctcagaatccaactctacgaaggacaaagttggaagtaatatcctcaggtctgccggagatattgtgagaagggacaaaacaagatagaggctgttagggaaggcacaaaagggtgatgttatttaagtgttttacaaggatcgggggtcataaccatgaaatcttcagcaaatgcaaaagtcaactggataacaaagaagcttaatcatcttaatgtggcattttaatgatgccactgatttgctatgccaattcagagataatgaggccctaatgctacagatgttcagccaggctaaaagaaagggggtgggggggggcttttctagcacgccattttctaactatccaattaaacaaattgtgaaagcatctaaatagtttaccaggttttgacagctgttaataggatttagaagcttgaagcactaaagagcaaaatgggaaatatatgtattgtaggtattcagtctacaaagtttgttactgtcgcccaatctagcacaaacagatgaactagaacagttttccttataaaattaatgtctatacttctctcccacaatgacctctttgtattaggaagaagaacactgaaacgatgggtcattttcattttctaatttacatttttgcatgtaaagtaatgagagagagaaaccgatgatatttttagaactaaagagtaaggaaagttttaatatttgctaaccagtaaaattataaagcttcaatgcaaactaaacttttggtcattgatttataaaatctattatgttttctttttttctcttttaaaatttaaaataatggacgtctgttaattttgaaaatgcctatttttaaattaggaaaaaactggaaaaggtaaatcaggctaacaagagatgaaatactggcagggcgcagtggttcacgcctgtaatcccagcactttgggaggctgaggcaggcggatcacgagatcaggagatcaagaccatcaagacatggtgaaaccctgtctctactaaaaatataaaaaattagccgggcatggtgacgggcacctgtagtcccagctactcgggaggctgaggcaggagaatgctgtgaacccgggaggcggagcttgcagtgagccaagatcgcaccactgcactccagcctgggtgacagagtgagactccatctcaaaaaaaaaaaaaaaaaaaaaaaaagagagatgaaatactgatatctcaatacaggtttggataaaattctatagatttaagttctcattgaaatacatttttggccaggtgcaatagcttacatctgtaactccagcacttcaggaggcagaggtgggaggatcgcttgggcccagaagtttgagaccagcctaggcaacaaagtaagaccctgtctctacaaaaaatcaaaaaattagccggatgtggtagtgtgtgcctgttgtcccagctacataggaggctaaggcaggagattcccttgaactcaggaggtcaaggctgcagtgagctgtgttcatgccattgcactctagcctgggagacagagcgagaccctgtctcaaaaaaaaaaaaaagaaaaaaaattaaagtcatgagaaaatagccaggtatggtagaatacctgggaatagctgggaatacagcatgcctgtagtcccaactactcaagaggctgagaagggaggatcacctgagcctggagaggtccaggctgcagtgagctgtgatcatgccactgtactccagccagcctgggcaacagaatgagacctgtctcaaaaaaaaaaaaaaaaaagaatctaaactggccatcagtaaatcacatcacttcaaacacaagagcattagcatgtaaaaagtttcatttgcaaaggaactaccctcaattttactaataacattaatttttgccttatctgactatcaaatagctcattcatgggcataataataaaaataattttgcttaataatttcagtgcaattctttgcttccccattagaagaagaggagatttactacttttacaacagaaatacactatacatcagcagtaggtaaggttccagctgctcagctgggctaagctcttcaaatgtcatggggccaggtataattctttatctagaattgtgaggactgaaggccatgatgtatgaaaggtctttctaaactataaagagtctacaagtatattgtttcatttctgcccattataacaattactttttctattgattattttcatctatgtattaaactcttttgtatttatatttttgagaaataactgctacccatcaaaaaacaatggatgaaatacatttaaagaggctgaagttttagatgttgcctaaacaagcatagactaaagtagttacctggtagaaacttcatttgtaaatccgaaagaaaaaaaacttcctttttcattcaaaattcccttgcatagaatattcactctatcttttttttttttttttgagacagagtttcgctcttgttgcccaggctggagtgcaatggcgcgatctcggctcacagcaacctccacctcccgggttcaagccattctcctgcctcagcctccggagtagctgggattacaggcatgtaccaccatgccctgctaattttgcatttttagtagaggcagggtttctccatgttggtcaggctggtctcgaactctggacctcagatgatccgcccacctcggcctcccaaagtgctaggattacaggcgtgagccaccgcgcccagccactctatcttttttaaaaacaggaatgaaaaagtttaaagcatgttaaaatacaattcttagtaaaattcaaaaactgtcatccaaatacaattggctaaaaaacattctgactgtcacaataccaaactcagggtcacaggtaaaggaaggaatgaaaaagtcttctatatccagagcataagtagttcttggtgtatatagcatgttttgtgttatatcacaattagtgtatttatctcccatatagactaggagtattttcaaggtggggaccaggtttaaataatatttgtgtccccagaacctaacaagggcctcgttactttagaaattgaatgaatgggccgggtgtggtggctcatgcctgtaatcccaacactccagcactttgggaggccaaggcgggcagattatttgaggccagcagttcgagaccagcctggctgacatggtgaatccctgtctctactaaaaatacaaaacattagctgggcatagtggcacgcgcctgtaatcccagctactcaggaggctgaggcaagagaatcgcttgaacccaggaggcagaggttgcagtgagccaagatagctccactgcactccagcctgggtgagagcgagactctgtctcaaaaaaaaaaaaaaaagaaattgaatgaatgaatgaatgaacttcttgggcagcctgaaccaatttagtgatgataactaggccaggcagagaagaagtagtagatcacaatagacccctaacttgtctacaagattctgatgctgtcatgcagtatgtagtttctcttaatgcatcagaataaggtccatggcccacagtgatagccagtcatctagttgacttctttgcccattgtggtctggcttctgcccttcctgctccaccattttgcaataggatgccactggccagtccctgctttttaaatctctttccttggcttattctttgctggtcctactcctacctcacttatttacttatatcctctgtttattcctctttctctatctcctagatgtgaattatttcctagggcctatttcttgaaacttttgccttttcactttacatactctgtctcctgatccaagtttttattgctgttgactctcaaatttttatttccggtagacctggaaagccatagacatatacttcctgacatgtacaatcacttcctgaatttccaacacttatctcacactcaacaagttgcaaacaagctccttatctctcccatttcttctccgcttttcctataatattccccgttgtcctctctacatagtggctgtttgatgtcaacgtctgtatattatgctgcttctatcaacatttagcactgatacagagctcagtgactacttaccaaacaaacaaggaagtaaggaaggaaagaagataagaaggaggaaaggaaagcgtgaacaactatactattatttgcttcaagtacaaaattagggttgacagtgtttttaaaaattgtacagattgcaattttgcctaaagctagcatattagccgaagacagagggaaaaaataaattgttatttctaactcaaggtataacaatcagacccaaagcgtataaaggattcttggatgagaaggaaatgagtataaggattaagaattagaagactcttgttctttttagcattacattaaaatacaaaataaaaattaacatttaccatctgtaacatattatttagacttttacccatctctggttcttcccttccttcttccctggttctcaaataatggaattagagcactgagaaataatagaagaaactcagcactgacttctcctgggtgaatgtacaacattaaaagcacacaagggaatgagctatcttgtcactggaacatgttcatccctggggataaagtgtaacaactgcttaacagctgcccagtaacatacttcaaggctgcaagcaaagatgcatcctagctctactggaaactgcagagggaatattgtctggcagaataaaactagaatagaatctggccaacaaactgcaatctatgtcctttctatttcaaacagcagcttctaatgatcacagagaggtttctactaacaatattcaagtaatattggatgggtattggtaattacagggaaggaacaatatggtatttaacttatttttttccactgaaaatagagttgaatgacttctttttttttaagtttctgataaaagagcatgggctttggagtaagacagaacccaggttcaagttgtactaactagctgtgtgacctcagcaagtaatttgacttccgtgaattttctcatttgtgttgcagtaatgataatatctatacctaatagggctgttacagtaatgaaattaagcaaaataatgtatatataggcgtagcatagtagctggcacataatatgttcatgaccttgagacaggcaaagatttcttagatacagcactgaaaacatgattcataaatgaaaatatcctgcaactcagtaagacaaataatccaattttaaaatgcacgaaagtagtctttagcttttctaaggtaataaataaaatttttaaaacgcacaaaagatgtgaattaacatttcaccaggaaattatatgaatggacaacagaccaatgaaaagatgctcatcatcctcagtcattagagaagtgtgaattaaaaccataatgagattccacttcacacctgctagaatggctactataaaaaagacacaataaagagcgctggcaaggatgtgaagaaaatggaaccctcatccgttgctggtgggagtgtaaaatgatacagtcattttggaaaacagtttggcagtatggtgggcagccttctaaaacggctcctagcattcacacccttgtgtaatattcccctccagtgtgggctggacctaggtgattgcttctaatgaaaaaaacatggaaaagtgatggaaggtgtctcttctgtgtttaggttataaaagactgtgacttccatctctctctctctttctctctgtggtgtttcttgcaagcttctcagatgaagtaagctggagagcaaggagctgaaggcagtgtctggccaacctccagtgaagaaacgaggccttcagtctaacagccttcaggaactgaatcctgacaacaaccacatgagtgagcttggaaactgatccttccctagtcaagtctttagatgagaccacagttcaggtcagtatcttgttagcagccttgggagagactgaagcagaggacccagatatgctgtgcctgtattcctgagataatatgttttaagttgctagggtttggggtcatttgtcacacagcaatcaataactaatataggggtagtttcttataaaattaaacataaatttaccatacaagccaacaattctaggtatctgctcaaaagcagtgataacctatgtccacataaagacttgtacataaatgttcatagaagctaaaaaatgcaaacaattgaatgtccaccaaacagtgaattgataatcaaaatgtactatataaatacaatgatattctttttttttttttttttgacagagtctcactgtcacccaggctggagtgcagcggcatgatcatggctcactaggcagcctcgacctcctaggctcaagcaatcctcccacctcagtctcctgagtagctgggactatttaaatttttttttttttttttttttttttgtagagacggggcctctatatgtttccagctactcgggcggctgaggtgggaggatcacttgagcccaggagtttgagaccagcctaggcaacacagtgagatcccatctcaaaaattttaagaaaaaagaaataaaagaaacaaactactgatacatgcagcaacatagatgaacttcaaaaacattatgctaagtaaaagaagccagaaacaaaatattacatatggtattattccatttatatgaaatacccagaaacagtaaatctttagagacagaaataattagtggttgcctgaggctgcaggcaagaatggggatcaactacaaacaagtacaaagggttttttagggtgatggaaatgttctaaaacatggtggtagttgtacagctctgtaaatttactagaaaagtcattgaattgaacatttaaagtatgtaaattataaccacattaaagctgttttaaaaagaaatctatacagataaacaaaacaaaataaaattgatagctctgatactgactctgatactgactctgtctcaaaatgggaatgtttagctacccattcaccaatgattacaagaagcatcatggtaagtatagtttctgagctatgattacttccatatgacaaatgctcagaagactatttttaactccttttgttcctgtacaactgatttcattccctttcaacaaaattaacaagaattagcttgttgaaaaacacaagggcacccgctacttgacagtaggaaaggaaggttaaaaaatcaagtataaaagagttggcctgattggacatttcccatacttagttattttattatcgatttcagacaaatacctaactactgatttttgctctttctaaattgggctaaaattcataaggatccagatacataaggatatattacttctttgttatattttgtgcttttatggaccatactgtctcactttctgttctgttaataatttagtgtgttttactaggctgtggttattaattagttaatgagcactatctctggactgcaaagcagcagtgatataaatgcacctggggaagttcactgagggttcattcaggaatgtgagttctctcgtaagacaaaataagaaaataaagaattatcttttctttacagtctgagagagagagagaactagtacaacctgaaggactagaaccggaaaatcaagctgatggtaagtaaggaataggtcatataaaaatgcaagagagagttctgggctccaagtaatgaaaagagtaataatggaccattaagtagtgtttgttcaaatgtcggtggatgggaggtatgaccacagcctaggctgacttaacagaagttaacaaagagcctttcctattttctcaagggctgctatgaaattacttaaggagtaagaaaggataacaaaggccctggctgagatttttgcttctgtagacgcaggtgcagaaaaggctggttctaacacatcttgtcaatgtctttaatgccaccagactgatgaatatagtgaaatatctatcgtgatcccatttttacttattcagttgacataattagcaaatctattaagggtaaggtcacaaattatttttagttattaaaccataggtctccatatgttactgtttagacagtatcacccagtgcagaatgtagttttcaagactgtcattcctgcaacctcaaatctagatccaaatgcagtcagttaaagcagatttcaaccaggcagctaaacgagaaaacatctggacctaccagtcaaaatgagaaaggtcacatgttaaacccagataatcttgtttattggtgtttgaaggttatacaccaagggctggattaccagggtgctcctttaggcctggctctgacatcttcattcacctgctgtgtgtgtgacgctttaaaatccaaagctttgaaagtactgtgttattagtcacttccaaatgtaattttcctaattctaagcctgaatactatgtcaacctattgctagactgctgattagatcctggaagaaaccgcaagacacaactgtcaggggcagatgatgtctattcttttaaaaactgttttccacatttccattcagcatttttctatggatgaagcacctgtaattttctccatcaaaattaagaaaagaaaaggcctctgaataagcaaggaataaaattaaaagattgacatagatttcaggatgatgatgaagaaagggagattgaatctttcattatttttcataattagtattattttatatacaaacaactgaaccaaaattgtttatgttggaagcaattccacatgccagtgcatatgaaactattatgaaaacagcaaagtcaagtttcttaagactttacatgctttggtcagatctttttaatcttttttaggttgtgaacatctttgagaactgtactctttgcccagaaaaaggtacacatgcccataaacacgaaatttcacatactattgattgatttctcaaaccctgagatctcaggttgagaatctctgcctcaggcctttaaataggctcaggcttaaagacacctctgtgttatattttgtaaacttcatataatagtggttggcatttttcaaattttttgctcaagcatcctcaaaagaattttgaaaaattatatatctctcttatacatagtggacattaagtacatactaagttgacatctataatttttcatcatgagtttaactatttttaaacaaaagaatacagtttgtgtattgtaaataatgatagtttaaaccattaccacaccctttcaaatgtatctacttaggaatatatacatatttgtgatttaatttactccatcatgaatttaaaaatacataagtaagcttttcaagaaagtcaggaaatttctctttgaacttctatttccatttcactacccccatggaattttctcctaatgtagtactcttgtatgcttgagtcatctattgttcatcccattatatgtatctgcagcaaaaaaaaaaaaaaaaacccaataaaatatagttacttttgttaacatgaagtgctatgtgtcaaaatgtgttttcttctggattgaattagcattacaattattaacatacaattgagtaaaacaatataggtatattataatttgatcaataattaccaaatacaaaaagtaaaatttattgggactgtatctcctaatgagaaggatagagaggaaataagttatgaaaatttgataaaagaaattatctaattgatcctttgtttggcatcttggaagtacttacaccttagaggtgggtgagaaatgttcttttcttttataaagtggagaaggaaggctgggcatggtggcttatgcctgtaatctcagcaatttgggagaccaaggcgagaagatcacttgagtctaggagttcaagaccagcctgggcaacacagtgagacccctctacaaaaagttaaaaaattagcagggcatggtggtgggtgcctgtagacctagttactcaggaggttgaggtggaagtattgcttgagcccacgaggtcaaggctacagtgaactgtgattacaccactgcactccagcctggacagcagagcaagaccctgtctgaaagaaagaaagaaagagagggagagaaagaaaaagagggagaaagggaggaaataaaaaaagagaaagagaaagagagaaggaaagaaagaaagaaagaaagaaagggaaagaaagacagaaagggaaagaaagaaggaaggaaggaaggaagaaaggacggaaggaagaaaggaaggaagaaaaggaaggaaggaaaggaaggaaggaagaaagaaagaaaggaagaaagaaaagaaaaagcaagcaagctcaatggcagcagtcttctaggcagatcagttttaggaagaagggcagagaatatactgaagttgcggacctggaaattgattctcttaaaattatcccatgcaatccttggaaagttttcccagcatttcaagaacactactaaaataaaagaccccaatgccaaaatgtactcacatgctgttcttcactttagttaatgaaccaataattatttagtgagcacttgtgaacactgcaggggataaatggatgaatggatggttggatggaaaggcagaaagaaaaatggataaacactgagcatttactatattcccagaactttggcacaaaagaacacaactataaaagactgttcttgccatgtctttgggacacaatcaagtacaataacaccctgccacaatacaatgtgtacaaatttggatgtaaaaggattgctgattgcctccagttgtctacccttgcccacttctcagacaagagcaagctaaagttcttatgggaatggataggaagtaattgcttcaagatcatttgggtcttttaaggtttacaattgtgtccagtttaaacttcactgtcattgctttgtgctttttgtaacagtatattaaaaacaaaacaaaacacaaaaccacctactatatttcatttacttgcaataatatgacccccatattttacaagataaaatttcgggatcccatctactatgttgtggagagagctcatgtactcttcttgtctccgacactattctctttcatgcaaactacaacacaaaaacaaaaacaaaacagaacacccaaaacccaaaatccctttgggctgacaaattacaaaaaatttgatagttctgatgagccaggacaggattttgttcagtcttcagtccagtggtgttctggtaattgcttaacaaccagctcaggatcggggaagggcttatttgtggcatttgctgatttcagtggtataaatactccaccatggccaatttcaagctaccatcatggagtcagccagcatacaaaattgttgaaaatttaacaagcagctatgagctgattctggcacaccactgggactcctcatttatccctcagcagggtaccttcctctagctatcaaatggcaccaaggtacacaatggctcgggtcaccgtgcctggtgccaaagtttatttgagaagcagaactcacttggcaagaaaagctgctatgaaagttagcaggcacataagggtgtttcatgcgttctcttaatccagctggaaggaggcaccaacactactgcttaacagacaaagaatgcaaaaagaggcagggcgaagtggctcacgcctgtaatcccagaactttgggaggccgaggtgggcaaatcacgaggtcaggagatcaagaccatcttggctaacacggtgaaaccccgtgtctactaaaaatacaaaaataaaattagccgggtgtggtggcgggcgcctgtagtcccagctactttagaggctgaggtggaagaatggcgtgaacccgggaggtggagcttgcagggagcccagttcgcaccactgcactccagcctgggcgacagggcaagactccatctcaaaaaataaataaataaataaataaataaataaataaaaagaatgcaaaaagaagggagaaaactctccagaggatccactaaggacagtgggcagccccatttttctgttaaccattgcaactgtctgtggctctttggcagatgtcaaatatcttcctacacattccttttagtttgctgtgctacgcagcttagttatgaaaaaaaaaaaaaagaagaaaagaaaatccagagatgttttctgttaaaaagtttcaagggccaggcacagtggctcacacctgtaatcccagcactttgggaagccaaggcaggaggattgattgagtccaaaagtttgagactagcctgggcaacatagcgagaccccgtatctacagaaaaaaaaaaattagccatgcatggtggcatgcaactgtagtcacagctactctggagtctcgggtgggaggatcacttgagcctgggaggttggggctgcagtgagccgagatcgtgccactgcactccagcctgggtgacagcgtgattaaaaaaaaaaaaagattcagggagagatgtcttggttttatcatcaacagaacttacccgtttgacacagtacaagctgtaaagctctgcccatggtaagcacttacagaaatcccctgtgagtgaacttctgcagcacagcactgctgattttgtaagataacccctgcatcccatgagtgacaggtcttgatctgggcttgagagatgtaatattttgataaaaaacggcacttccttttgaagcatatatttgcgtgtactaagcagtaccgcgggagcctcagcgagtgcctaagcgaggctgacgcggtctctcccagctcgctccagccacccttcttcacacatctaaatgtggcggtaattagcatccataaaccacacatgtggcttaattttttttcccctttcagaagcatcaaagtagtttgtacttcttctaagcaccaaagagttgtacacctcaaaagggaccgagactatgccatgggaagctactgaagatgggagttatttctcctaaggggaagaagaattatttttttcagcaagctttctaattaaagttcttatctttgatctaagcatctacactgcacaagatgtcacaatggagaaaatataaggcctttcaaaagtgatcaaattcaacttttctcttggaatcaggcaagacccatagcttgtacagaatggaagtaattaaatacatacaccgattgatcaccactgcacaattaattaaaaaagaaatctatttcatgatgggtattgggtctatttgatatttagttacagagccaggagatgaagggtgtactgtgttgaatagtgtccctcctaaattcatgtcctcctggaacctcagaatgtgactttatttggaaatatcgtcatagtagatgtaattagttaagatgaggtcacactggattagggtaggccctaaatccaatgactagtctccctagaggaggacagaaacaggagatgcccacagagatgaagcccacgtgacaatggaggcagagattagagttatgctgccatgaccaaggaacaccaggcattgctggaagtcaccagaagccagaaagaggcaaaaaagaactcttccctaggcccttcccatggtcctgctgacatcttaattttgaacttctaccctccagaatagtaaaaaatttctgttgctttgtgacaaactggtgttttgtcacccagtttgtggtaatttattatggaagccctggaaaactaagacagagggtaaatgtgcaactcaggcagggtaaacagctagtgttgatgggtatcgaggtatcgtgtgtactttttacccctacagcagctccagaacaaatggcttgtgtaaatagagatagtggatgatgggggctgctgaaaaatagggggccagtagagtgttaaatacagggggtcagtagcccaacttttattcctcagctattcaaagaggaaaaaatactatcggcaaatgcatcataccctcataacatatacatgctcatgacagaacctttccttctattttctaagtgggaaatggcaaagacgggaatccaatttcagaggaagaaggactgaaacaaaaagtcgcaagagttctatttcagtcgttcaggccttaaggccatgtcttttccactaatttaagcacctaattacattctctctgaaattgtttgtgcatgacaattgccttgctgggatgacattccaccatctcgagtcttatctctacctagttaatatccctcagtacactagcatgaaacacatcttccctctagccttgatactcagaggtttttattttttagttgctctgtgatcataggccaagatataagcaacaataatattctttctcatgatattttataaaattgttttaactcttgcttttgacatcacagtatcttgctgacattttagatccaagtagaaggtcccaaatcttttgtattcagtaaagtggctgtgatattcccagcactcattggatgctaaacaaaaataaagacttggggatctctgggttatttcctatggctcaagatcagtctgaagatagttacagttggtcactaagaggaagagaaataataattgttcataagagtgaatgagcaggctagaaaaagaactctgaatttcttcatttcttctgctttccaaactggttggattatatcacttcataggtaagtattcttagaaagatgtaaatataggttagggcttcttttttcaaaaagtttatgatataatggggtgaaaccttgtcatgcacaaacaatttcgaacagaatataattacgtgtttaaataagtactaactaaacatactcttaaaaattcagctctgagaccacactgtggaaggtgggatagtataaaaaggcctcctggaggaaataaacttgagttgatgtaaatatttgccagtgcttgttagatttaaattttcaggaataaaggagaaaaccaactaaatggtaacacaacatttagtctacatatggttttatttatgtctaattaatttatgtaaatagagctatatcaactatacatgcatgtgataaaaagctgttagtgatatatatttttctgatttttaaaataatagtattagaatcctcactgatgcccttttgaaatggttacacaaacactgttcctttcaagtgccaaatcttttcttaactcatcatacaataaatgtatacactaggttaggagtaagggaattatggcctgcaggtcaaatccaacccactgcctatttttgtaaataaagttttattggtacaaagccactcacattcatttatgtatcttctacagttgtcttaccttgcaatggcagagttgagaagatgcaacagagattgtatagcccacaaagcctaagatatttactatctggtcctttacagaaaaagtttgccaatacctgcactaggctcctgggaatatactgtaaaaaattaccacaatgtctgtgggatcacaagcaagcgtatttatgttcaaagttaatacttttgtttgttttgtttttgtttttttgagacagagtctcactccgtcgcccaggcttgagcacgatctcagctcattgctggaacctctgcctcccaggctcagaagattctcccacctcagcctcccgagtagctgggattacaggcatgcgccaccacgcccagctaatttttgtatttttagtagagacggggtttcaccatgttggccaggctggccttgaactcctaacctcaggcgatctgcctgcctgggcctcccaaagtgctgggattacaggcctgagccaccatgcctggccaatattaatagttttttaaagttttttccaagtatttttgttttgttttccaaacttactctagttgggtaaagccttttcccctagaaattagtctgtctttccgcaagagaaaaaataaagtgagtgtttccatcagggtgtgaaattttctacaaaacaattttctaagaactggaagcttataaagatgcacacgatatttcattttttaacatatacattaaacatgattgcaattattctgaattttaaacactccagacaagtctttggttcctaaaatctttcaaatgacattaaaaaataaatgctgccattaaacttaaacagaatagaattctctaacattttaaaataattattacattgtagctaaattcccctaattacctttaaaagtataattctaattctagtcttctttttttatagatggagtcttgctatattgcccaggctggagtgcactggctattcataggtgtaatcatgatgcacaacagcttcaaacgcctgggctcaagtgatcctcctgcctcagcctcttgagtagctgggactacagtcttgtgtcacagtaccgggcctaactctagtcttaaatgttttcctgtgctgcatatggcagtggtaccttattatgcagtaggtataacttctatcgggcaatgctgtttttacattctattacttttataatttagcatgtataatttatacatactgatcatattatatattttataaaagcagggtcctggtaaccaccttttccaaacatatatgacccagattaagtgccagtgttaatagtacagtagagtagtccccccttattcacagaggatactttccaagacctccagcggatgtctgaaattgcagatggtaccaaaccctatatacagtcacatgctccttaatgatgggatgcattctaagcagtggatcatcaggtgatttcatcattatgcaaacattatagagcacactgtatttatacaaacctagacagtatggcctactacaaacctcgggtatatggtacagcctattgctcttagactgtacagcatgttatgggtacagcatgttactgtactgaatactgtaggcaactgtaacacaatggtaagtatttgtatatctaaacttagaaaagatacagtaaaaataggtcttaacttatgagaccaccactgtttttgcagttcatcattgacccaaacattatgtggtatatgactgaatactacgttttttcctatacatacatacctatgataaagttttaatttataaatctggcatagtaagaaattagtaacaataacaataaaatagaacaattacaacactatactataataaaaggtacataattgttgactctctctcaaaatattttattgtactgaactcacctattttgggatcatggttgaccatggaactgaaactgcagaaagtgaaaccgcagagaagggggactactataatctgtttgcagattaatcacaaaataatggaatgatctttcaacgttaaaattagcctactcaggccaggagtggtgtaatcctagcacttcgggaggctgaggtgggcagatcacttgaggtcaggagtttgagaccagtctggccatctagtagagatggtaaaaccccgtctctcctaaaaatataaaaattagccaggcatgatggcacatgcctgtagtcccagctactcaggaggctgaggcacgagaatcacttgaaattaggaggcggagtttgcagtgagctgagctcgcaccaccgcactccagcctgggcaacagagcaacaacaaaaacaaaacaacaacaaaattagcgtattcatttctttctgaatgaagcttaaagtaaataactgtttcttttctctttcccaaattatttagagtgattgatcatatcttctctatcaagaactgcatgacactcctagacccctagcaactgagaaaaataatttatttacacaaacatcctattaacccattgacatgtagttggaggtaaggcgatactattgtatgggttcctaacaaggtgcttcaccacttgggtttttacaatatttattttaaattcctattgttgaatggaaattattggtttcttgtttatgtttgagtatttaatctgttttttttaccacaaactatctgaaaatataaaactcataggctacccctgaacccaaagtaaatttataacataaattataaattcccaaaccaacagtggcatagggatcactatttcaactacaaatttaatggtattacctaccagaactcagaaactgtaactcagaaaaaaaacaagccacaggcacagctatcatttgcctcattctgagtgagactccatggatgtcaccttcaagaagttgcacgaagctgatacaacatcatatgcctttcctcagcacaaatgaccacatcctgtgccaggcagcatttttctgtctctgtggttaaaaactggtacaaattaatgtatagctcagtacagctggaatgttagttgaagctgtgatttgaatctcagaagttttagacaaataactcaatttcttggtctcttaagaaatttaagacaaaagaaaaagactctgagaaatgattttcttttcttgaaaaggagtctcactctattgtccaggctggagtgcagtggtgcaatcttggctcactgcaacctctgcctcctgggctcaagtgatcctcccacctcagcctcccaagtagctgggactacaggcacacacaaagctaattaaaaaaaaattttttttttgtagagatggggttttaccatgttgcccaggctggtctcgaactcctgacctccagaaaaatccgcccaccttggcctctcaaagtattgggattacaggcgtgagccaagccactgcacccagcctattttcttttcttcctttaagaaactcatgtatacacacatataactgacctagggctttcatttagtcacttactcaacaaatatttattgcacacctaccacagtagggccaggtactgttctaggtactgtaaatatctagcaaggaaaaaaatagcccaagaaggctggaaggagagtagacactaaacaaaactccaaagttatctgtgttcagtgtcatgcgatgaattaaaacagggctgtgttaaaatagtgactgaattgtcaggaaaagcttttctgaagaaatgacatttaagatgagatctgagtaacagagtaacattcataaagcaaaagtgattagatttatcaacataaatatcactataaaatgtgagcaatattaatgtgaatataatgctcaaaactcacaaaaaagcctggaagtaagtactctgtaatgctattagagactatctttgggtggtaggatagaggtggggttttcttttttctttctatttcaatgaactttccaaactgtggtataatacaaaaacatatttggtctttgttcctgctcccaggatcaagcacagaacttctaagcccttggaatttcctaagtgataggagtattgttttgctttgttttgttttgttttgtttttctcactagatcctcctgcctcagcttctaagtagcaggggcaggagtgtcttttgtattcataacgagcccctttcaatagcaccttagattatgctaacgaggtagctgaggctggggccactagacagcctcaggatggagctgttcaccagaaggacctggtaattagagcgttggacctttcagccccacccagtgacctcagggaagaagagagaggaaagggagctggagattgagtcctataaacgttcttgaacaacaagattcagagagcttcaggagctgggggtgtggcatgcccagagaaagtatggaagctccacgtcaccccttccttgctctatgcctcccttccatttggctgttcctgagttgtatcttttataataaactggtaatgataagtaaagaaactttttgagctctgtgggtcattccagaaaattactaaacctgaggaaggatgtgggaacactcaaatttgcccaagttggaagaagtgtgggtcacctgagggcctggtacttgagactggtgtctgaagtaggggcggtctgtgggactgagcccttaacctgtgtggtctgtactaattctcagagttagtatcagaattgaattgaattgttggacacccaacaacggaatggcctagagatttggttgtggatggaaaacaccccagaattggagtgggatttgctagatcagcccaggctcacagaaacatatggtttggaaggataaaataaaagggtaggggatgaggaaattttgattcctgagtggccatatagtcacctaaggagcagcaaaggggctgtgatcagttactaaaggtaaaagttaccagtgaaatttaaagatgaacccaactcctggggagctggttcactgaatgcttaaggaaatgcaaactaataagaaaaaagtgaaatacacaatccaatggttattgttatctgcaacagctaaaatgaaagttaaaaagagtgttgggttggaccttgatgctgaaccacgctcagattctggtgggcctgaacttcggatgctagacccaaagctgcctctaatggaaaaaatatgtgggaaaaacagaaaatacctctaagatctctggtcaccaaaaagagagtccaggtaggggagggcaaaaccaagaaactactgaaaccagggggtatagtgtgaaagagttactttattttgtagatcagtaccatcagcttcctaaagaattttgactaaaatgaattgtaagaataaataatttaggggcagtatcttggcttttaaatgcttcagagtggaagagcatgtttgggtttatataggatccacagctcactatggaacaatcacagatggctacacatgatccagacacagagcaggtcattcctaagggaacagctgacctggtggaccagataagagccattataaggtctatttaccctgagaaagggaactatctgacttcccctttcaatgccaactggaataccccagatgaagcagctgatatgcttcatatgcaagccatgtggaactggctttgtgataatcaagattcacacattgaatatgcccattacccaggtgatatggtttggctgtgtccccacccaaatctcatcttgaattgtaagccccataatcccatgtcataggagggacccagtgggaggtaaatgaatcatggaggtggtttcccccatgctgttctcgtgacagtgagtgagttctcacaagatctgatggtttaatgagtatccgatatttcccctctggcactcactctctcttctgccaccctgtgaagaggtactttctgccatgattgtaagtttcctgaggcctccccagccatgcagaactgtgagtcaattaaacttcttttcttctttataaattacccagtcttgggtatttctttcttttttttttttttttttgagatggagtcttgctctgttgcccagcctggagtgcagtggcgcgatcttggctcactgcaagctccgcctcctggattcacaccattctcctgcctcagcctcctgagtagctggaactacaggtgcccaccaccacgcccagctaattttttgtatttttagtagagacagggtttcaccatgttagccaagatggtctcgatctcctgacctcatgatctgcctgcctcagcctcccaaagtgctgggattataggcatgagccaccgtgcccagctgggtatttcttcatagcagtgtgagagtggactaattcagtatattggcaccacagagagtggggtgctgctataaagatacccaaaaatgtggaagcaactttggaactgggtaaaagacagaggttggaacagtttggagggctcagaagaagacagaaaaatgtgggaaagtttggaacttcctagagacttggagggttcagaagacaggaagatgtgggaaagcttggaacttcctagagacttgttgaatggtttcgaccaaaatgctgacagtgatatggacaatgaagtccaggctgaggtggtctcagatggagatgaggaactgcttgggaactggagcaaaggtaacttttgctatgcttcagcaaagagactggcagtattttgcccctgccctagagatctatggaactttgaacttgagagagatgatttaaggtatctggtggaagaaatttctaagcagcaaagcgttcaagaggaagcagggcataaaagtttggaaaatttgcagcctgacaatgtgatagaaaagaaaaacccattttgaggagaaattcaaaccagctgcataaatttgcataagtaatgaggtgcctaatgttaattacaaagacaatggggaaaatggctccaaggcatatcagagaccttcacagcggcccctcccatcacaggcccaaaggtctaggaggcaaaaatggtttcctgggctgggtccagggtcaccctgttctgtgcaggctcaggacatggtgctctgtgtcccagctgctccagctgcatctaaaaggggcaaaggtacagctcaggctgttgcttcagagagtacaagccccaagccttggcagcttccatgtgatgttgagcctatgggtgcatagaagtcaagaattgaggtttgggaacctctgcttagatttcagaggatgtatgaaaacatcggatgtccagacagaagttcgctacaggggtggagccctcatggagaacctctgctagggcagtgcagaagggatatgtagggtaaaaccccccatgcagagtccccactggaacaccgtgtagtggagctgttagaagagggccaccatcctccagaccccagaagggtagatccattgacagcttgtgtcgtgcacctggaaaagctgcaagacactcaacgccagcccgtgaaagcagctgggaaggggactgtaccctgcaaagccacaggggcggagctgcccaaagccatgggagcccacctcttgcatcagcgtgacgtggatgtgagacatggagtcaaaggagatcattttggaactttaaggtttaatgactgccctattggattccggacttgcatggggcttgtagtccctttgttttggccaatatctcccatttggaatgggtatatttacccagtgcctgtacctccattgtatctgggaagtaactaacttgcttttgattttacagacttataggcagaaggggcttgccttgtctcagatgagactttggacttggacttttgggttgatgttggaatgagttaagactttgggggactgttagggaggcatgattgtgttttgaaatatgaggacatgcgatttgaatgggggccagggcagaatgatatggtttagctgcgtccctacccaaatctcatcttgaattgtaacccccattatccccacgtgttgtgagaaggacccggtgggattgaataatggggtaattgaattatggaggtggtttcccccatgttggtcttgtgatagtgagtgagttctcataagatctgatggcttttttttttttttccttttgagacggagtctcgctttgtcacccaggctggagtgcagtggcgtgatcttggctcactgcaagctctgcctcccaggttcacgcaattctcctgcctcagcctcccaagtagctgggactacaggtgcccaccaccacacctggctaattttttgtattttcagtagagacaggttttcaccatgttagccaggatgatctcgatctcctgacctcgtgatcctcccgcctcggcctcccaaagagctgggattacgggtgtgagccaccgcacctggccaagatctgatggtttcataagtgtctggcatttccctgctggcactcgttctctcctgccaccctgtgaaaagctgccttctgccatgattgtaagttttctgaggcttccccatccatttggaagtgtgagtcaattaaacctcttttctttataaattgcccaatcttgggtatttcttcatagcagcatgagaacagactaatacaccaggtcatggtaaatgccacggttaagtggtgtcttaagaatgtacatgtcagatatgatatggtaaagtcagtgtggacacaaagaaaattagaacaaggcccagaaagaagtttatcacattcacaggtcccagagaggtggttattatgtgctatgcaagatcacaggagaaagcaccagtgttggtcaggaggcagaaaagaggaatgaggaaaaaccttaggtcagagccttaattggggtttctgtggaaaaggcaaggcagggctgggtaaacagtttaggattggctagttttaataattctggtgggctctaaagcatagagatggtctctggttgactggtatctggccctgggatgacttagggtaggtgaaatataggcttggtgtgtgagaattgggtaatggcttatggcaaaaacctgtgagtactttccagcaatgacaacaattggattttggaccagagaatttccatttgaggggaaattattagcctgctattgaatattaattgaaattgctcttatgattgaaggacaaaaaaataattttaaaacctaaaatatcaacgaagtcttgggtgatgtcagagaagtgttctaatggggagagcattgcccagaagagttctataataacatagaaatagtttatagagaatcatggtaccttaggaatgaaaggatgatatactcaggggcagggatcctcttttcccctacaattgactttggaactatgtgaggagctgctggattctatcatcacttagacagtgccctataaagtagtctttgaccaacaaagagatgcttgatttgtggacggtagtttttttgtttgttgagacagggtctcattctatcatccagcctagagagcagtgacacgatcagggttcactacagcctcaacctcccaggctcaaacgatcctaccacctcagtcccccaagtagctgggaccacaggcatatgccaccatgcctagctaatttttaaatgttttgtagagacgaggtctcactatattgcccaggttggtcttgaactcctgagctcaagcaatcctcctgccttggcctcccaaagtgttaggattacaggcataagccaccatgcctggctgtggatggtagttttaaggtaaatggacaacatcctgtttggaacaccacaactgtaattaaagaaggtaaaaacaaatcagcttggtgagctgaataatctgctgttttcctagaagtgatggaagaactgaacagtgatacatgcccatatgtttcagtttctgattcatgggcaatggccaacagcctggccatgtggtaaggcaagagtgcaatggaaacttggcatattaaagggactctcatatgggacaaagccctgtggaaatcactatgggaatttgaggggtgcattaaagtaggacatgtcaatgctcggtaaaagaccccccttccagatttggaagctgatcagaaccaattagtaggtatcacagtgtgcgtgtttgaggtgagcacgtgggtccataaaatgagtagacaggatgggggatgctacagccactgcagaagatgggctgaatttggacatatttcccttggacctcctgaggcacaaaatagcaacaaactattatgtctgccaataagagagacagttactataggtgactatggggaagattccccagggggaagaccccacacatagttggcaagtggattgcattgaagagccaatgctggtagtcccaagggctacaaatcatttttgtttttgttctttttttgagatggagtcttactgtgtcacccaggctggagtgcagtggtgcaatcttggctcactgcaacttctgcctcccgagtccaagcaattctcctgcctcagcctccccagtagctgggattacacgtgagtaccgccacacctggctaatttttgtatttttagtagagatggggtttaaccagttggtcaggctggtctcgaactcccaacctcaaatgatctacctgcctcagcctctcaaagtgctgggattacaggtgtgagtcaccacggccggcctgttgttgttcttttgagacaggatctcactgtgttgcccaggctggagtgcagtagcaggatcacagctcactgcagcctcaacctcccaggctcaagtgatcctccagccttagcctcctgagtagctgggactacaggcacacaccaccacacctggctaatttatttgtattattataatttttttttatagagatgaggcctcaccatgttgcccaggctgggcccaaattcctgggctcaagagatcctcctgcttcagcctctcaaagtgctgggattacaggtgtgagccactgcacccaacctataaattgtttttgacggggataaacacagactctggaaggggctttgcttacctggttgtatacacaaatggtcagtaccacgaaagaaccagaacagaagatattgcaccaatttgaatggctgagccacatttctttagactaaggagcactctacttacagcccataatgtcaaacaatgggcaaagagctatcctcctcagagtagtagtttgatagatatctaaaatagggtaaggtataggtgtgaagggttggtttatgcatttgcacaagtgtgaggtcacattgaaatgagctaagggagtgttcccactaggtagattcctctgtttttctggtggattagggaagaggaggtgggggaggatgctgatatgactatacaattcttgccaaagaggaggatattggtgtgatgactattctttttttccttccctacattgtcacatcagctttctctttcctaccagatgcagtggttgcaataccagcactgtaattacaagtgccagaaacagagatgatttctaaagcaagaaagtgtaaccgtagctttaaacctttatgtcagaactcctaagggcctgatgaggcaggctgtgcctttaccccatctggcaaaattggggttaacattgaatgcagatgtattgcctagtggtagaaatagcccactagttccgtacctgtgtaaccctatcctgtatgtatgggagttgactgagggagaggtgcttgctagactagtattgctgcctacgatctagaccagtgcagtggtcaaacctaatattcctcccaaaggtgggaaagtttgggcataaacagtaagaaggaggaagagtagctgagagtaaaggaatgaataaatgagttatgtaacaagtcctgtgagtcatcctagcaaattattaaacatgtggaggggagtccccgattttgtagctaagtcagacaaaagtgcaggtaacctggggacctggtacttgagactgttgtctaaagtagggagagtactgtgcagtactgtgagactgagcctgtaacctgtgcggtctacgcaaacatcaggaattacaatcagaattgaattgaagtgggctgggtatggtggttcatgcctgtaatcccaggactttggaaggctgagtttggcaatcacttgaggtcaggagttcctggccagcctggccaacatggtaaaactccgtctctattaaaaaaaatacaaaaattagccgggcatggtggtgggcgcctgtaatctcggctatttgggagactgaggcaggagaatcactaaaacatgggaggcggaggttgcagtgagccgagattgcgccactgcactctggcctgggcgacaaagtgaaactccgtctcaaaaaaaaataataataataattgaattgaattgttggacaccaagtcattgtcggaaaaccagaaaattggtttgttggtgtcagaaaacaccccagacaaactttctacaataaacatgtattacttttataatggaaaatagtcaaacatcatgttttaagtgaagttaatataattggaacactggataagcaccttaaattctcaaaatttgctgataacctacaactatgaaatgcaaatatttgtgaaattaacaaaacagaatcactcctaactaaacctacaattgcaagttttccttggagagctgatttcttctctacactaagcctaagcaatatctacaggcatcagtgtttagtctgcacactacggctcacctcctatgtcttcatcttcattggctgggccttctccactgtccacattttccatttcatgagatttggttaaactgtagtcattcaaaaccgctgcactttctaaaagataaaaggaattttaagtatgtggttcaacgttaaaggatttttataaatatatattaagtagacccccatttaactttcagcttcacacaatcctttagtgacagatagtaccccttcacacatacccaaaagggatgtatacatgaaaactcttgaggtttagaaataagcccagggttcgcagtggctcacgcctgtaatcccagcactttgggaggccgagatgggcagatcacctgaggtcaggagttcgagaccagcctggccaacatggtgaaaccccatctctactaaaaatacaaaaattagttgggcatggcggtgcatgcctgtaatcccagctactcgggaggctgaggcaggagaatcacttgaactcgggaggtggaggttgcagtgagccaagatagcaccactgcactccagcctgggtgacagagtgagacttcgtctcaaacaaaaaaaaaagagaaaagaaatatgcccagggttcatgtaccctctgaatacacacaactttcttgaatatttctttcatctgagttaaagggcactcatgttccttctggagaaaaactatctctccattggtatatctcacgatattcagtaggatgccattgctatttatgacaaagtagtgaccagaaatactaagcgtgcaaacactggcataacctaatttgggaaagatgctttcctaggaggaagatctgtaagctttctgtatgccaaattctgtttttcccttctgttcacattataaatgtgattctgtggaaaacatattggaccccaagtttctttatttgtttgaacatttactgaatgttgacaaggctacagatatgaataagtcattatgtcttcaaggagctcatactttgagatatagataagagaagcccacaactctaacacatggtaggctcagacaaaggattaaataaaggaaatacaaagtgttattaaagttcataagtgaaagggagcagacataataaagacatgcttaaacaaacagcaaacttgttacaaaataagtttaagagaaatgtataataaatattgataatactagaagaaaaaggaacaatgcaactggaattattttcacatataggcatagtagcttaacaaaaagatgatagcagaagaaatgaactgaaaagttaccctctttttatctaactccttcccaatcttcaataaaatatttgctgagttcccattaatataaaaaatagtcaaagacactgaatcctgtggcactgaggctgggctgaagtagggaggtaactagaagctctgcagtggcactcctttcagctgagccatgaccaaacacacgcgggagcgaaagagaaacacgtttcacaaaacccatcactaagagcccctgaaaatgtggtcaccatggactcagtgtttgatttatgaatatctgaagtttctaatttctgcatattatgatgtatactctgtgaactctaagataccattctaaacaatggttcacttttctcaagcctgaaatgactaaaatatagtggacacctaaacaattaatatgagatttaggttcagttaaaagatgtgattggccgggtgcggtggctcatgcctgtaatcccagcactttgggaggccgaggcgggcggatcacctgaggttgggagttcgagaccagcctgaccaacgtggtgaaaccccgcctctactaaaaatacaccaggcatggtggtgcatgcctgtaatctcagctactcaggaggctgaggcaggagaatggcttgaacccgggaggctaaggttgtggtgagccgagatcacaccatcgtacttcagcctgggcaacaagagcgaaattccgtctcaaaaaaaaaagaaagaaagaaagatgtgattacaagttacagtaacacaaaaaggcatttcagtgataaattaaattttgtaatataatgtaagctttgattcacacagtgagttaatcaatggaggacacagaagttattttcaggaaataaattattgtaaatgtttataatttattctagagcagggatcagtaaactatggcctgaggtacaagtctgaccatagcctgcttctgtgtgggcccaagaggtaggaatggtttttacattttttaagggttgtaagaaatacaaaaaataatacgtgacagagaccatatgtggcctgcaaagtctaaatatttactatctggccctttacaaaaaagtttgcagaccactgttctacagtaaaaatcgcaagtcattcaaatacaagctactatattattcaacaaaaactgtcttcagagcaatgagctgaaaaatcaaaaacaaacaaacaaacaaacaaacagtgatcaacattaggtagtgtatgtttggccctaagatgctaaagaacttacatgatctaaatggatgagttattttttcatcagcaacagacaaccatatttaaaaaaaaacacacacacatttccatagcatttttactgcaaccagaataagcacattcctctctctttggtattttttttagtaaaggtatatttccagagaggaaagacctgatgttacctgcgggcacagactgctcctgagtgcttttcagttccgcatttgtttgtatatctgaaaagaaagaggttataaatattagctacttagggtacatttctacaggtttgagcattccaaatttaataagggataccatttcggaaaacttaacagcagaattcctctttcagagcaagattactctttctctatattctccctaaaagcctttcaaggagcatgaaaaaaaaatattgatgcagcaatgttactctaagaactttctgccagagatctacttacaccaagaacaatatgcaaaaagtgggttccattagaaataatttcatatattctttattcttccccaatattttattatgaacacatagaaaaaaagagttcaaagtggtatatatatatatatgtacatatatatgtacatatatataatgaaatactattcagcaattaaaaagaataaaatcatgtcatttgcagcaatatggatggagctggaagtcactatgttaagtgaaataagtcaggcacagaaagacaaatatcacatgttctcattcatatatgacagtaaacacgttgatctcatggaggtggaaagtagaatgatagacagggtgtgtgggtgggaatgggggatgaagagagattagttaatgggtaaaacatatagttacatagaaggcataagctctaatgtttgacagcagagtagggtgactatagttaacaacgacgtattatatatttcaaaatagctagaagagaggacttgaattgtttccaacacatagaaatgataaatactcaaggtgataaacattccaaattccctgacttgattattatatattctatgcatgtaacaaaatatcacatgtgccccataaatatgtaaaatattatgtatcaataaaaaattttaaaaaaagaactgcacagttgaacatccattactcaccctctggattctacaattaacattttgctatttttgctttctcacatatgtttccacccattcatctctcaatccattcatcgatccagctttttcaacgcattgcaaaataagttgcagatatcagtatacctcagtcctaacatttcagcatgattattattaactaaaattcaatatctgtttacaagattttaaaaagtaaattttacatacagtgatatgcatggatcttaagtgtaccattcaatgagtttttaaaaatgcatatcctcatgtaatgcaaacccctatcaagatacagaacattaccatcatcccagaaaagctccctcacatctcttcctagtcaattcccacccacatactccagagacaactactgttttgactttttccaccatagattagtttagcctattttagaacttcataaaaacagaatcacacagacatatggtataaattattttgcccgaggcttctttcactcaacataatgttttgagatacatccattctgtggtgtttatcagtagttcattcttttttattgctaagtagtattccatatgaatatcccagtttgtttatccattctcctattgatggacacctagactgtttccagtttgggctatttataagtcaaactactatgatattcctttttaaaataataaacttttaaattttagagtagttttaaatttatggaaaaattgcaaagatagcacagagagttcccatataccccacacccaatttcccctattattaacatcttatattagtatggtacatcagttataattaatgaatatatattcatacattattactatctaagtattcagatttccttagttttcatctaatgtcctttttctgttgcaggatcccttccaggatcccacattacatttagtcatcttgtctccttaggctcctcttggttgggacagtttctcagactttccttgttttgatgatcttgacagttttgagtactggtcaggtattttgtagaatgtccctcaactgggatgtgtttgtttttctcatgattagactggagcatgatcatccttgcacaagtatttctgtggtcatatgctttcatgtctcttgagtcaatacctaggtgtggaattactgggttatagggtaggaggcatatatctagtttcaacacagtgaaactagaacttgttcaaaagtgcttcttccctctactttgggcttaacttactctgcttctgccctcttaaggtgaaattttagtgactgactttattcctttcttcttttctaattgtaaacatttaaagctataagttttcctgtaagcattgctttagctgcatctcataaatgctgatgttttgattataattcagttctaatttccctcgagtcttctgtgatccactggttatttataagtgtttaatttccagatatttgggggaattcgggaattctttagctaacttgttattgaagtcaaattccattgcactacagtcagagaacacagtctgtgtgactgtagtccttttaaaagtattaagactggtgttcttggtgaatgtgccatgtgtagttgagacatatgtatgttctggtttttgttggttttctttgtttgttttgttttgctttgcagatctggctgaggctttattttggaggaaaaaaaaatgatgtaattgttttgtagctggaggcatgggcaaggggggtatcccaggcagtaaactccccatgggtgggctgagggttagggctgagcctcaggtgggtctcctgttccctatactcccctgcacagtggcctcctccacaggctctggagaagccatgggagggggtaggctgggaggggctgctatggcctttcacctgggcaggacatcagaggactgggacaccagcttcccatcgtggtcttgatcttcttcacaaccacagccctagagaagcaggcacagccaaaggagctggagcccccgccagagccaaagctggatcccaagccatagctgaggccagggcttgtaaggcccctgtaggctgagctcagcccacctgagtagcccctggtggtcttcatatggatactcatgctctgcatcccagacttcagctggctctccttgccctccagcaacttcctgtaggtggcgatctcaatgtccagggccagcttgatggtcatcagctcctggtacttgagcagctgacgcgccacgtcctgcttggcccactgtagggcggcctccagcttggaccccctggcattggcatccttaatggaccgctccccacacatacacaatggcggcctccagggaagccctctggcctttgaggccctctgtctcagactggagccggctgatgttccagtttatcttggagatctccgtctttgtacaacgcaggtcatcctgtgcttcccaggcagggtctgcagctcctcatacttgatctggtgcatgctgtcagccttggcctggctgcggttggcgatcttctcatactgggcctcgacctcagcaatgatgccgtccgtgtccagggagcagctgttatgcgtggacagccccacagatgtgtccaagatctgggactggagctcccagatctcctcttcatacagctgcctgaggaagctgatcttgtaagcttgccatccaggtaagactccatccagctccaccctattcatgtatgcctcatccacatccttcttgatgaggacaattttattctccatctctgtatgcttactgatctcatcctcgtacttgttcttgaagtcctccaccagcccctgcatgttgccaagatctgcctccagtttcagcttctcctggcctagagtgtccagctgccacggaggtttgttgatgtagctcttggacatgttgtccatgctgctccaagctgtcttctgctgccgcaggaggctctacttggtctccagcatcttgttctgctgcttcaggaaccgcgatgaagggggcaaacttgttgagggtcttaatctgctccttctcctgagtgcacacggcctggatgttggggtccacctccagcttaagggggctcagcaggctctggttgaccatgatggctgtgatgcctcctataaccaccagctcggccatagcctccacccagacccatgctggcacccaggacaccctggacactgctgctgctgcccacttgggagaagctcgaggaactgacgcaggcaccaggcctactcatgttggagtggctgctgaaggtccggggccagaggtggacaccctgtagaacttctgggtcaccctgatggacatggtggaggcgggagtggaggcaggtgggcagaaacagggggagattcaataagtagtggagaaactgcttctaggtattctgcagttctcaagtgtactgtttaataaatgttaattaaatcaaggtagttgacaatgtcattcagatctatggatatactaatttttgactagttgtttagttgctgaaaaaggagtattaaaatctccaaatatgactgttgatttgtctatttctctctgttctagggactataaaatatatctttaattttccaggcttcttagagttaaaattatacacttcacataaaatgtaaaaagcttgcaaccatttaggcccatttcctaccctccaacctttatactatagttgtcatatgtatcacatctgcatatactttaaaccttaccatacaatgctaattcttgctttgaatagtcatattgtattttaaagattaaaatgaaaaaatagtactttctaattacccacatatttaacatttctggtgccttttttttctttttttgagatagggtctcactgtgttgccaggctggagtgcagtggcacaatcatggttcactgcagcctcgacctcctgggctcaagcaatcctcccacctcagcctcccaagtaactaggactacagaagcaccaccatgcctggctaatttaaaaaaaattcttttgtagggacgggggtctcactgtgttgcccaggttggtctcaaactcctgggctcaaatgatcctcccacctcagcctcccaaagtgttaggattacaggtgtgagccactgtgcctggcctggtgcttttcattttttcataaagatttgagttctgatctggtatcacgtccctacagtctaaagaactttagcatttttaatagtgcaattatctgagggacttttcttgttttcaattatttgcaaatgtctttactttgtcttcaatcttataggatatttttactagatatagaattctgagtttacagggtttttttcttaaaactttttttttttttttagagacagggtcttgctttgttgccaaggctgatctcaaactcctggcctcaagccatcctctcacctcagcctcccaaaatgggattagaggataaaccaccacacctggcccagtttttttttccttccagctcttttaagatggcattccactgtcttctgtcttctattgtttctttttcttttttttttttgagacggagtctcactgtgttgcccaggctgaagtgcagtggtgcaatcttggctcactgcaagctctgcctcccaggttcatgccattctcctgcctcagcctcccgagtagctgggactacaggcgcccaccaccatgcctggctaatttttgtattttttttttagtagagacggggtttcaccttgttagccaggatggtctcggtcttctgacctcataaactgcctgcctcagcctcccaaagtgctgggattacaggcgtgagccaccacgcctggcctgtcttctattgtttctgatgagaagtcagtgatatcttgtgttgttgttttcctataggtaatgtgttccttttctctaagtgctttcaagatttttctctttacttttggctttcagcagtttgaccataatattcctagctgtaattttatttgcatatatcccacttgggttcatggaacttcttaaatctgtacagttacgtttttcaccaaacttaagaaattttcagccattatttcttcaaatattttttctgttccattctcctccccttttccttctataagttcaattatatgtgtgttagatcttttcatattttcccacagttccctgagacattgttgttttatctccccacaatgcttttttctctgatattcagaaggaataatttctattttcatatcttcaagttcatttactctttcttctgtcatcttaatttgctgttaagcctatctaatgagttttctttttcagatattgtaatttttagttctagaatttccatttagttcattttaatttctctgctgaggttttctatttgtttattaaaagcatattttcctttatatccttttcatttttctctaaatgctttcaaatattttttctgttccattctcccacgcttttccttctataacttcaattacagaagtgtaattactatagtttatacaagttcttgtctgccagttccattatgtatgccatcttgaggtcagttaccattgatttccttttctcttgagtatgggtcatattttcctgcttcttcatatgaccacataattttggattgtatgctggaccttgtgaatgatatattacataaattgtgaattctatatgttcctctgaagcatgtaggaatctttgttttactttttttttaagagataggattttgctctgtggcccaggcttgagtgcagtggcatgatcatagctcactgtaaccttaaactcctgggctcaagcagtcctcctgcctgagtctactgagtacctaggactacaggtgtgtgccaccacatctggctcttaaagttttttgtagtgacagagtctcactatgttgcccaggcttgtcttgaactcctggcctcaaggaatcctcttgccttagcttcccaaagagctgggattataggcatgagccaccatgcccagtcctttttgttttaatttttcttctttttttttttcgtattttttgaaatgaaaggtctcatatatttattactgaatgcagtcaaccaacacgttcataagagattcagagagaaaaaatatattcccaataaaacatgttcaactctccagacagtggtgacattttcagcttgatatggtaacatgattgtgaccttgagacagcataaatatgtgtgccatctcatgtgcaattccttacagactcagcttggttcttttccaatgtctccttttggagttgtacctgattttattaccagttttcatctaaatccactgcggaatgggaagattttccttttgtttcttggccaggaatcacttaatcctgaaagtcttgtgagaagacatggtgagaagtggaggcaagcacacaccacgatggcggagaaaggaagagaggactgtttctttatttttattttttttagacagggtctgactctgttgcccaggctggagtgcagtggtatgatttgagccctcttcatcccaggctcaagcaatcctcccacttctgcctcctgagtagccgggactataggtgcaatcacagctcactgcaaccttgacctccctgggctcaggtgatcctcccaccttagcctctcgagtagctgggactacaggtaggtgtcaccatgtccagctaatttttctattttctgtagagtgggggtctcgccatgttgcccaggctggtctcaaactcctggccttaaggtaatcttcccgccttggcctcccaaagtgctagggttacagacttgagccacaatgcctgaccagactttttactttttaaaccttgcaactaacttgccttggcttaaactcaaactccgtctcacctgttgtgggcagcagctggggtgaccaaatgtcccaatatgcctggattgaggggtttcctagaacacagaactttcagagtcccaaagaaactgggatgagttagtcacctttgcagaagtataaatctgtttagttattttagcctcagttgggctatttagagtgtaactctacacattagtggatcagccagagaatttatatccaaaaaagccctctctggctttctccactgcagaatgtctcccttcacttcccagttgctgtggttgttatggtttgtcaaaactgtggattttctatccactctgaggctgaaatggggcctgcccttgtataaaaggccataaaacaggctgcttttggtcatttttccagtgctttcaggtgataatttttttaatattttgtccagaatctatcattcttatccgtggaaaggttggttcaataggaggtactattccattacagaaattaaaactctcctttgttctttattttgactgtgatcatttactcaaaactatttagaaaagtactgatttaaaatggtctataatcaggtcatattccaatttttagtttaaaaaatacagtcactatagtcatattgtattctaatttaaaacttttaatatgttagccattagaggttagcaacaaagcataaaggcaggggaaatacacatagtttaaaaatacgcaaaggagcagcttggcatgggatgtcaaaatccaagctggatgagaaaaatgtccatgcaatgaataggggtagcccagggtgggctgctggagaccagccagcatgaagagtgtgtccatgcagggtaggcagtgtgaatgaggtaaggagggtttcaggccaggtgtggtggctcatgcctgtagtcccaacattttgggaggccaaggtgggcaggttgcttgagcccaggagttcaagaccagcctgggcaacatggcgaaaccccatctctacgaaaaatacaaaaattagccaggcatgttggcatgagcctgtagtcccagtcactcgggaggctgaggtgggaggatcacttgagccctggaagtcgaggctgcagtgagatgagacagtgccactgcagtccagcctgggcaacagagagattctgtctggaacaaaaaaaaaaaggcaagtttccacatggagggacagacagcatgaaaagtcagagctcaaacagtataagaggacatgcagggaggaggactgcctggcctggactgctggagcctgagagggaatgaagaggggaatgaagagggaatgaagtggctggcagcccccactagaggctaaatggaatgaggagaacttcaatgccaggagtagtccagtgcaaagtaccaaaactcgagtggggtgaagagggcatctacattttaggggcagtcctgcatggggctgtcagagctcaagcagttgagaagaatgtccacacagagtggaggccacagtacgggattatcaaaaccaaatgagtcaagcagagcaactgtgctgagtaggagatgccaagtgccaatgggagactggttgtattacatagtggaggaatggtcaaataagtaaatataataaggataatgagagccaggtttttctgtgagagaagggagttacaaatatggaagcctgtggtcctgtattggaagtggatgtactggcatgaactcatggcttctactatatataaaaagataggccaggcgaggtgactcatgcctgtaatcccagcactttgggaggccaaggcaggaggattgcttgataccaggagttcaagactagcctgggcaacatagtgagaccctgtctctacaaaaaaatattaaaattagaagggtgtggtgaagtgtgcctgtagtcctagctactcaggaggctgaagcaggagaatcacttgaactcacaagttcaaggctacagtgagctatgaaggtgccactgcactccagcctggatgacaacaaagcaaaaaaaaaaaaaaaaaaaaaaaaccagataaaatatagatgtaaatgtgtgtatatgggtatacataaatacagtccctttccccgttcactgagagcacctaggaacagtgaaactacaatagcgtctagatattaacttctaaatattattctccatttaaaggaatgaggctccctgaagaaatggtttactccaagatgggcatagtggctcactcctataatcccaacactttgggaggctgaggcaggtggatcatttgaggcccgcctcagcctcaagtgtttgagacaagactggccaacatggcgaaaccccatctctaccagaaatacaaaaattagccaggcatggtggcgcatgcctgtagtactagctactggggtggctaaggcatgagaattgaaagtataagtcgggaacattttgctgtgccagaaagcaaggaagtgctcacagaatgaagtggatatcttaaaagtatagagcagtcatcctgaaggggtttccattggccaaatctgggacaagggagcataaaataataatagtattagactataactcattgggaaaaaaacagaaattcatgagtacattctgagtacattattcatgagtacattattcatgtacaaattcatgagtatattattaacattctgatgttaataaatgaataaattaaaagtgtggtgacagatgggatatttatatagtttcaaagtgcttctctccaaaaatacttattaattacaaggttgaaagaaaagagcacctatataatggaaaagcctgttcgatatcactgtaactgagcaaagttacatgtggtcatcatcagtaatgggacaaacaaaaattatgtgccttctgatagtgagtagaacacagcatcacttctgtgatattcctgccaaatatgcaaaacacaaatcaaaccataaagaaacaaccaaactcgaatttgcagggatagtttacaaagcagctggcttataatcctcaaaagtttcaaggtcatgaaagactgaagaactgttccagactgaaggagaggaaagagacatgacaacgaaaagcaatgtgtgatcctgaaccgaaatatcttgtggtaaagaacatcacagaagcaactggagaaacttgaatggggtctgaggattgaatggtagtaatgttgatttcctggttttgatgattttattgtgaaggcagggcacatactctaaagcataggacagggatagagcaccgtgtcagcaacttactttaaaaacttgcagaaaaaaagtttttttgtgctgtattgcaacttttctgtaagttcgatagtgttttttaaaaacgctaactatgaaactttcaactgcatgctgaaaagattcttaacggagggaaaaaaaaaaagaaagaacgaaaactagctcaaagctttcacatgagcaaccttcatgtgggaacatcttttagtcactacacagaaagatggcttttgatttggtgaactaaaggcaaaaggtcttggtcccctgaatattttaaaccctctgacatttaaatagctctcaatatttttaaagtgtcctttgtgtactgtaaatagcaccagaagtaactgagtgtagtttcgaagagaaaaatgagattctgactaccttagcattcataacaggaaaatcgcttgaacacggggggcagaggttacagtgagccgagatggcaccactgcactccagcctgggcgacagagtgagactccgtcttttaaaaaaaaaaaaaaaaagagataggaaaaccatctgtgatcaggtcacatgaatgttcttattagctactaaattaaaacacaacaacaagatagattgaagtgtatttcccccctaaacttcaaggtatttataagaacatgaagcccattcaaagacaggagtggacagatggtgaaggaactcccaaatgaagaccagaaacttgttaaatatttctaaatgcagcaaaaacatcttagtttttaattaatcattttgtaacttctttacacttcagtcccccctaacaaatccacaaaaagtttccatttgatggggtctactgtggtctttttaatgtgtaggcagtcaacatagctttgaaatattttccaaaagaatgctctacaaagttaagtaggaagagtccctatattgcttttgatagaaatatagtttcctgtactgatgtttatacatatctggggcaaatgatggaagaatcttggagtgggttaattttgttgaaatataaatctcatcaattgtctacatttctcctgttatttgaacagggaaagcatgctcctgcctcaaggcctttgcatttacccttccccctgactataatgctttcctcttagaagccacttggctcaatttctcttttcattcaagtatctgcttaaaagtcacctattcaaacaaggtttacctaattaccctacataaaatgtcatcttccattgtcattttctttcctcttacctgctttatttttctttataaaattttttcattatcaccatcattcatttttttgggggggacagagtcttgtttttttattttttatttttttgctcttgttgcccaggctggagtgcaatggtgcgatctcggttcacggcaacctccgcctgcccagttcaagcgattctcctgccttagcctcccaagtagctgggattacaggcatgcgacaccatgctcaactaattttgtatttttagtagagatggggtttctccatgttggtcaggctggtctcgaactcctgacctcaggtaatccgcctgcctcaggctcccagatcaccatcactcatttttttaaatctgtcttttcccacaagaatgtaagctccatgagaacagtgatgttgtctgttttgtattgctgtatcttcagcccctacactagtgtctgctcatgatggacactgaataaatacttgttgaatgaacaagtgaagttttatatctctattgttgatccctatgaacgcactagatggttttgcaaactatggctcactgcctgttattgtactgcctgtgaactaagaatggtttttacatctttaaatggtttttaaaaatcagaagaatacacttgaacattttacaaaattcaaattgcagtgttcatcaataaagttttattggaggccaggcacggtggctcatgcctgtaatcccagcacttcggaaggctgaggcaggtggatcacttagtcaggaggtcgagaccagcctggtcaacatggcaaaaccccgtctttataaaaaaatacaaaaaaaaattagccaggcttggtagcaggtgcctataatccagctactcaggagggggaggcaggagaatcacttgaacctgggaggcagaggtttcaatgagctgagattgccccgttgcactccagcctgggcaacaggccaaggctctgtctccaaaaaagaaaaaaaaaaaaaaaggttttattggaacacagctaaacccattcatttgtatattgtctatggctgcttttgtactccatcagccaactaagtagttgtgacagagaccatatgacctgcaaagcctaaaacattcactatctggtcctttacagaaaaagcttatggagccctgttctaggtctattactaatacttctatgtttactttcaaaaccctgcaattggaatttcaagagaaagttgcggttttcactgacgcagtaatcaaagaaataaaacatttagacagcacctttcatacaaagcactttacaaatgtcactgattgaaaaattaatgcgacttttcagagggtaaaaatatcgaccacaggatatccaaatatccagataaaatatttttaaatgaacatacatgtatgtatacaaatatatacttagcatcatgttttcatcaggatttttgggtatcattagataaaaccattttcttatttcatttaaaagccagagttgtaatctagcagaaaactctagttaatacctatttcatttgtctttttgctctttccacaactaaataaccaatctcctgatatgttttaaggtttaattaaaacataagtgttttccattaacaccttatctcttaaataacacatcttctaaaggacacaactagtctactactgagatactgacatatatattagactgtaaaagttaaagcttatttcttttgcagtgttccacagcactctcccattcatagctactcatagccattctagcaatctcaaattgttttctaccagtatagaaaacaagacttcatcacatgcttactaagagatgataatttcaaattcgtttttggctttttagattctcttttcattgacgatgacactatataaattttctcaccggttagtttttttaagataccaaggtttttttttttttttttttcagagtttctaacatttcatgtgctgtaaaacgaaagggggcagattataaataaaatttaaacttggaaatggcaggagtctagttaattgagatttcatggaagttcacatatgaatgctttacctattagttcaagtataaattagctatgaagaaaatcaaatatttacattagcaacaaaaatgtacaatcatgtttttaattctaatggttataaacttgcctttatttctaatactgtactattaaataattaccattgaattaagaatattagctaacaaaattttcctcttaatttcagagatcatatttctactccatggtctgttttcccagtaggaagtataagcactaaaggaaagcaaaatgtcaaatctcagaaagaatcctgtattgagtttgccagctgtcaggcaccagaggtgcctggcagctgccagaaagctatctctgaatgttgatattccattccttctttataatagtaaatggagtcctttatacccatacctcttttttaaaaagaaaaagtttatcttatctaaaatgttcacttttactttataattaaaagttttagaaattgaggcactgattataagaatgttttcagaattgcaacattaacacctgggactgtaaatgtggcagagaagcgttcgctgtcatttctgcaaaatcctttaccagttctccgtatcaccatcatatataatcattcctcaaattccatcagtacaagaacagttctgtaggatgaaaaatgatccctataaccgatgaaattagcatattagaatcgaaattattatcataactagcttacctctccttcctctgccatctgatgtttgaatgtcctctaatatccccctacttgggttatacagcctctgcttgaacacttcgaataatacagaagttattcctttccatttcagaaaaactctagtagttaaaagcattctttcttaaatgtagctgaactcaaatttactgaaatgtctatttcaggtcctagttcagctttctgggaacatacaggataagttatagctcagatgttaccacccagtttcctgaccatggtgagagctgtcttctgaacccgtttttgtttgcctgtggctctccaaaaacgtggcatcaagcactcagcctaatagtgcaatgagatttctttttttctcataacaattctggaagataaataggggcaatggcatttattattttccccattttacagacaaaatccaagatacaaataatgacaaaaaacataaaggccagtaatcgcccaagggcacaaagtcagtgacacattaagaagagaagcaggatttgtctcttgagttttactgttgcttcagagaatttaaatcgtgttttaaatgccttcctatacagattacagattttagaaggccagaactagaagaaattttagatccaattaatttcaaacaccctaactgactgtgcattattgctgattgaggggaaaggaagataacaaaaacaaagacatgcattaaagtgagagtaatccctccaatcatgaaatacttccttccctatttccttgggctaaggtaaatgttaagaaacatcaagactgcttgcttaaaaacaccagatcaaatacaaccaagttactgttccagttcttcctaccctccccctttaaaaaaaaataaagcattccattttttctcctagattaagtgtttaatgaggaaactgtagaccgtggggcacaggtgaactgctgacaactgttgttaaaacaacaaagtcagtgtctagtgttattttccttcaaaggtcagttacccttaagttgtagacaaaaacatacattccaattttaccttgtatatcacatgctaccaaatgaacatgcagagagaaaaggaaaaatgggcatttcatgtcattgctactttaaaaagatgtttctggtaaaatgattgaatctaacatattgaaatgaagacttgttttataactgtaaaatgcctagttttataactgtaaaatagctggagccaaaaatagaatcattaatttgaagtgggtaacagagctaaatatgaaagttgaaacaatcaaacttctagaggaaaacagaatattctcatgaccctggagtaggtaaagatttatttttctttttttcttagagacagggtctcactctgttgcacaggctggaatgcagtgacatgacgtagctcactgcagcccggaactcctgggcttaagcaatctgcccacctcagcttcctgagtagctgagactacaggtgtgcatcactacactcagctaatttttaaaaaaatgtttggagagatggggtctcattatgttgcccaggctggttttaaactcttggccttgaatgatcctcccgctttaccctcccaaagtggtaggattacaggtgggagccaacgtgcctggcaaagaattctttagcaagatataagcagcacttagtcacaaaaaagaagctgataaattaatcttcattaaaattaagaattctattcatcaaatagattaagaaaaataaacaagttacagactgggataaagtatttgtattacacatctgacaaagtacacattactggctgggtgcagtggctcaagcctgtaatcccagcactttgggaggccaaggcagacaaaccacctgaggtcaggagtttgagaccagcctggccaacatgctaaaaccctgtctctactaaaacaatacaaaaattagccaggtgtgatagcacctggaaaaaaaaaaaaaaagcccacaaaatcagtatgaaaaaagacaacccaattaaaaaaaaaaaatccagccaggcgtggtggctcatgcctgtaatcccagcactttgggaggccaaggcaggcggatcacctgaggtcaggagtttgagaccagcctggccaacatggtgaaactccacctctactaaaaacacaaaaattagccaggtggggcggtagtcacctgtaatcccagctactcaggaggctgaggcaggagaatcgctgggaggtggaggttgcagtaagccgagattgcaccactgaacttcaacctgggcaacagagcgagactccgtctcaggaaaaaaaacaaaacaaacaaacaaaaaaacgtgaatgaccagaaaaccttagacgcttcaggaaagaggatccaaaatggccgataaacataagaaaagacactcaatgtaattactcatcaggaaaatgcaaattaaattaaaaccacaatgaaataccactcactacacacccaaaagaatggtaaaaattaaaaagactgataatagcaagtgttaacaaaaagatgtggaacaagtataactctcagacattgctagtgggagggtaaactgatccaaccactttggaaactctttggcaatatgtatcaaacctaaacatacacctatattagaacccagaaatggtattcctgggggtgtgtgtgtgtgtgtgtatatatataatatatagtatattatatatgtatatatactatatgcatatatactatatagcatattatatatgtatatatactatatgtatatatactatatagcatattatatatgtatatatactatatgtatatatactatatagcatattatgtatgtatatatactatataacatattatgtatgtatatataatatatagtatatacaatatatagcatattatgtatgtatatataatatatagtatatacaatatatagcatattatacatgtacatataatatatagcatattatacatgtacatataatatatagcatattatatatgtatatataatatatagcatattgtatgtatatataatatatagcatattgtatgtatatataatatatagtataaatatatagcatattatacatgtacatataatatatagcatattatacatgtacatataatatatagcatattatacatattatacatgtacatattatagcatattatacatgtacatatagtatatagcatattatacatgtacatataatatatagcctattatatatgtatatataatatatagcataaataacatatagtatatatactatatatgtatatgtatatatacacatattatatatacattatatataatacattatatatatacatatataataggctatatagtatatatactatatattatatataatatatagtatatatacatatctaatatgctatatagtatatatacatatataatatgctatatagtatatataatatataatatgctctatagtatatatacatatataatatactctatagtatatattatatacgtatattatatatacatatattatatatacgtgtatatattatatacacgtatattatatacgtgtatatattatatatgtgtatattatatacatgtatatattatatacacgtatgttatatacacgtatatattatatatactatgtgtatatatatatatagagagagagggagggtcttgctctgcaactcaggctggagtgcagtagtgtgatcatggctcattgcagacttgacctcccagtattgggactacaggagcacatgactaggcctggctgatttttgtactttttcttgtagagatggggtttcaccatgttgctcagggtggtcttgaactcctgggctcaagtgatctgcccgcctcggtctcccaaagtgctggaattacaggcgtgagccagcgtgcctggccacctaggtatatattcaagagacatgaatacatataggcccaccaaaagacatgcaaaagaatgtctgtaatacagccaaacactggaaacaatcaattgtccatcaacatcagaaggtataaattgtggtatatccatactattcgatcataaaacagagtgaactactaataaatataacaacttggatggatctcaaaaatctattgaggaaaagaagctagaccccagaaaagcatatattgtaaaattaatttatatgaaattcaacaacagggaaactatctatgaggatacaagtctgaatagtgattaatttggggcaaagggggaaattaacaataaatggacagaaggaaaccttctaaggtgatgcaagtgttccatatattgatctggaaggttgtataaaggtgaaaaataatcaagctatatacaaaagatatgtgcactttaattatatgttattccttaatttaaagaaaatccattgaatactcacacatctccaaatatctaaatcctaaacctaagaaatgcaattataacagtatcttcttgcttttgaaaaaaactttgaatctcaagagtttctcatgattttgctacagaatttttataagttgcatctacaccaaccactcactgaatgggctccatatatagcttaaaactcacgtggtacagaaatttatttacatgtcatgcataaactaaatatgaagatattttcagtgatcactaatttcccaaacttccctgcaaattgggatttcaaaatgtttcaatattggcatttttctctcaataaacttacactacagatagtgtaaatgtcactcatctttgaaaaacaaaacaaacacaaaacctctcttaatccacatttccctccagcaacatcccactgatttctcttcttcaccctcatagctaaacttctggaaaaactggtctgtaatcaacgtttctacttcttctactcccattcccactctacccacttcgatttggtttccatccccaccactccacagaaaccacttttgtcaaggtcactagcaagtgttatgttgccaaaaccaaccacactctttgtccttatcttgcttgatttctcagccacattcaacatagctgaccacccactccttcatgaaatactcccctttcttgaattccgttacaccacactctgctggttttcttcctgtctcactgactgctctttctcttttgctggcttctcctctacctgaccaaatgaggtatgtctccaggcactatcctgagagcccttctctcaatatattctctgtttaggtgatcccattcattcccttggctttaaatatcactggctgggcgcagtggctcacacccatagtctccagcactttgggaggccggggcggacagatcaagaggtcaggagttcgagaccagcctgaccaacaaggtgaaaccctgttctctacgaaaaatacaaaaactagccaggcatggtggtgcgtgcctataatctcagctactcaggaggctgagggaggagaatcgcttgaaccccagaggcagaggttgcagtgagccaagatcacaccactgcactccagcctgggtgacagagtgagactacatctcaaaaaaaacaaaatatcatccatgtgctgaagaaaacagccaaagccacattcctatcactagccagacctcttctttagaggagaggtccctgaccctgcctccttccattactctccaaattagcattctttttatttccttcatagcacttagcataaatttaattatttcaattgttattacttgttctttggtctgtcttccttaccttaccaaattccataagggccaaagctttgtctgccttttttaccactgtattgccagtattttgcatatgtgacacaaaaaaggtattcaataaatagttttagaacgaagaatgaagatttctgacttttgaattatattgtataataaatgtattacaagattcatcaaaattaaactttataaaactgtcgttcttcaactatcttttaaaatcttttaaacaataaaaaacatacgttaagtacatatgtgaagatgacccaccactgatgcaatgtatgctatcagagtgatgataggttttgctgatactgtttaaactgtaggcaatgcttgtcaaaattttttttattttaaaaaaataacaggccaggagcggtggttcacacctgtaattccagcactttgggaggccaaggcaggtggatcacctgaggtcaggagttcaagactagcctgaccatcatggagaaactctgtctctactaaaaatacaaaattagccaggcgtggtggcacatgcctgtaaccccagctactcgggaggctgaggtaggagaatcgcttggacctgagaggtgaaggttgtagtgagccaagatcgcaccattccactccagcctggcaacaagagcgaaactccgtctaaaaaaaaaaaaaaggaagaacacggtggctcacgcctgtaatcccagcactttgggaggccgaggaaggtggatcacgaggtctggagttggagaccagcctgaccaatatggtgaaacctgtctctactaaaaatacaaaattagctgggcgtggtggcacatgcctgtaatcccagctactcaggaggctgaggcaggagaatcacttgaacctgggaggcggaggttgcagtgagccgagatcacgccactgcattccggcctgggtgacagagcaagactccgtctcaaacaaaaaaacaaagtcccaattgtaatataaaggtgaaataaatgacagtaaataatattctatatttcaaaatgtaaatgcaccagcacaattattccagaagacagaataaggtagatagacgtatttgtagaatcaccatgaatgcaacagctaaatgcagaaggatgcatgctgcatcaatttaaaaaaaaaaacaagcaaggaaataaaatttaaaaaacaaggaaataaagccatggatcaaatgaaaaacagtaataataatggtaaaagtggctaagctctaaactaaacaaaaaaaatcatcctctctcaatgtaggtggtaattccaatcctagataaatttgagtgtactaaaaccatgcaaaaatgcttcatgtttgaacataaaatggagttacagtctagaagtcattagacagcaaaaaatgtcactacgtttcagaaaaggaaggtattcctcttagaatgagggatggcttcctaaaggagatggcatttaggatagaccataatggatgagtgaggatttcagttggcatgattgtggtgctattaacagtgttgggaagtcaggagaagttggtttggattggagagaaaattagttcatttttggacttgttgagttggaagaacagcattagaaaaatggggagtgagggaaagcaatgcctgaacagggaacactaagcagcagtccagagtcacattacaggacagaagataccactggaaaggtactgaagctgtgttgtggagtatcttaaatgtccaaccaaaaaatatttaaaatggtgtctgagtaggagaataactttatgttttaggaagatcattctggcagcaatcctcaaaacagattaaaagaggcaagtctagatacagggttactagtaggaaaaacatgtaacggtctaaatcagtcattttcaaaatgtgttttatggaatccagggttgcagagggctgccacagggctgatctatggcaagaggaagataggcttagcagtggtctcttgctccttctccaatctctcatttggaacattacacttgcatctgatcccacataagattttggtataaacggtgtcctgttgcaaaaaaaacaagtttttgtcttgtttttgtgtctaatcctaactcttgttgaaatgtgagactaacagtgaaatacctcaaggtcatcgtgtaatcatcaagtctcattgtgtagagtagtagttataaaatctataagcactacatgaattcctaatatcaacttgttcagtcattatttgtcctattatatagattggatctccctccccaaattggattacgtgtaaaaatgttctagttgtttaggtctggggcaactaagtccatactaggtcattgatgtttgcaatggatatctatagagtcctttgagaatctccaaattccttttattgagatgtgcatactatgctattggcttggcacacttagaagctgttacttgtttgtgcattctggtctcctagccctactaattcaaatctgaaaaattagtcgggcagtattggcacatgcctgtaatcccagctactcaggaggctgaggcaggagtgcttcaccttattatttcagaacagtttttaattaaactactcccagaaacttgagaaaggatgataagtaatctttgcttcaaagttgaatcacaaaaatatttaacattcattttatttcattctgaacataaaaatcaaacaagaaatgccccaactttattataagtatttaagatttataatatacgatgatgatgtaacatgtattataatatacaatgtatattgtatatgtacaatataacatgtatattgtatatgtacaatataacatgtatattgtatatgtacaatataacatgtatattgtatatgtacaatataacatgtatattgtatatgtacaatataacatgtatattgtatatgtacaatataacatgtatataataactcttttaaatgcttgtaaggttacatgttacatgtctttgttagtgagtagttgattactatactgtgacagaagcatgtcccaagcagctgagccttagcctttacaggcacttaataaagtacagggaataagacagttagtaatattcttttttatttatttatttttttgagacggagtctggctctgtcacccaggttggagtgcagtggtgcaatctccactcactgcaacctcggcctcgcaggttcaagcaattctcctgccttgctggtggtggcacgtgccaccacacccagctaattttcatatttttagtagagataaggtttcaccatgttggccagctggtcacaaactgttaataatattcttacttaaataacttttacagcgtggtggctcatgcctgtaatcccaacactttgggatgccaaggcgggcggatcatctgagatcaggagttcgagatcagcctggccaacatggtgaaatactgtctctactaaaaatacaaaaattagccgggcgtggtagcgggagcctgtaatcccagctgctcgggaggctgaggcaggagaattgcttgaacctgggaggcagaggttgcaatgagccaagattgcaccactgcactccagcctgggcaacaagagcgagactccatctcaaaataataataataataataataattttacatgagaaaatatgcacaggagaaaaaagaccagcagcaccatgattttactcatcatgtttataaaattttaatatttggaaaaaaaagcctcattttgaggtcagaggataaatttatacactgatcatcttcaatactttaaagtctggaattttatgtgaaattcaaatgaaatttaaatcaagttagcccgtgaagcacctttgtggaactgcctacactgtatgtaagcatataaatcaactattagtgatttttagcagtctaggtcaagggatttcttaactaagagatagaggtagatgacagcaaaaatgactagttgttatatattataaaaattagttacttccagttttcatactggacaatattttccatcagttatgatgtaattccatatccataaaaatgttataggtttgtgagagtgatctttttctcatatccacaaactcctagaggaaattgttctgatgtgccaaatattctggtaaattaatagtctctctaatatacattacttcttaaatgaactgatgttgctgtgatagagtattcaaattaagtgatgttcaacaattttaagaatcaaaacatctattgtgaagaaaaggtttatagtggaaactgcagtgcttcactgaaataaaaaatgtaccaaaattattaaataaagccaaaagttagaaggcattgtattttgtggggggcatggattagaaaaatggccgtattcacgcattggatttagccaatacttcaatctcttctaccaaacctttaacagtacctttaacaaattagccagcaaaatttaccaatttcaatgtctctattttccttcccccctttactataaaagctgggcaagaaaagagtcaaatgatcaaacacacaggcaactcattcattaatttattaaacaaatatgactacaggcctactatgtgctggggactgggttgggtactagttaccaccgattataaaaagatccccagctacgcatggtggcacatgcctctagtcccagctactcaagaggatgaggtgggaggatcgcttgagcccaggagtttgagaccagcctgcaatgtagagagacctcatctcaaaaattaaaaaaaaaaaaaaagagagagagagagatccctaaactttggaaaataacagtctagaaggggctataggtgtattaatcaacaaaataaacaagaaacttagttgcataatccttagataattcagagtagaaaaataatagttttgttctgtttcatgagtgacagtattgaaatgttttccatttcttattttaaaagtttccttcattggctgggcattggtggctcacatctgtaatcctagcactttgggaggccaaggcaggagaatcttttgtgctcacgagttcaagaccagcctgggtaacatagcaagactatgtctctattaaaaaaaaggaaagaaagaaaagtttcctttgtaaacccacaataacctaatctgccaaaaatttcatctctaagaacactactaagtacaatttgtgacatattgccaattccactgttataaaaaatcactcagtaagctgattttaagtactgacaataagtaaagagtaatgcactttgtttcatatccattaccaagtacctagttttttgtttgtttgtttgttttgagatggggtctcacactgtcacccaggctggagtgcagtggcgcgatcttggctcactgcaacctccacctcccaggttcaaccagttctcctgtctcagcctcccgagtagctgggactacaggcgcctgtaaccatcaagtacccagtttttaaatatctcctggattggacacatatctaacataatattttcatatggtattggtatttaatataatacggtaattccatattattttcatttactgtataccactttggacttacattttttgttgttgttgttgagatgggttctcactctgttgcccaagctggagtgcagtggcgtcattacagcccactgaagcctcaaactcccaggtcaagccatcctcccacctcagcctcccaagtagctgggacaagtgcacaccaccacaccaggccaatttacttttattttattattattttttatgaaacagggcctcaccatgttgcccaggctggtctcaaattcctggcctcaagaaatcctcccaccttggcctcccaaagtgctgggattacaggtgtgagccactgtgcccagcccttaaattttttaagtaactttttaattaaaaaaaaaacttttaattttggatgcaaaaaccagatttcaattagactgaaaaaataacctcattcagaatcactagggataaaagtattttgatgagttatatagtaatattaattaataaagttatacacagattacttttcaaacaatctatatatattataaataaattataattattgtttcattattgcatcttttttttagtgatccaaaaggccttggtgtcatccttatgattttttttttttttgagacagggtcttgctctgttgcccaggctgtggcatgctcatgtcagtgcagtggcatgctcatggctcacggtagcctcgacctcccaggctcaagccatcttcctacctcagccttccaagtagctgttactacaggcatgtgctaccacacctggctaatttttgtagtttttgtagagtcagggttttaccatgttgcccaggctggtcttgaagtcccaggctcaagcaatctgcccgcctcagcctcccaaagtgctaggattacaggcgtgagccaccactcctggcctcatccttataatttctaattatcataaatataccagttaatatggagctaaatttaataaaggctaaatagcagagtacattctatggccttgtgatgtgtagggtctcttttcaaaataattaatgaatccttaggacaaaagacatttattgagcacctactataggcaagtttctgtgttaatcactcagttcttctcatacatggtctggaactatagcttgacatatgagccaattatcattggacatctatctaggccaggtgcagtggctcactcctgtaatcccagcacttgggaaggttgaggcggaaggatcacttgtggccaagaattcaagaccaacctgaccaacatagtgagacccccatttctacaaaaaatgaaagataataaatcagcaggtcatggcggtttgtacaataaattaccaggttatggtggtggatgcctgtagtcctagctactcagaaggttgaggcaggaggatcgtctgagcctaggagtttgtggtagcctgggcaacagagcaaggactatctctttaaaaataataataaaaaaaaaaaactggatgtctgataaaagatctaccaataatcaataatcttttagtcctaaataagtgtaagtatatacatttatatatgaatgaaaagtttataacaatgtatttttaaagtatcacttgaaagcgtatgctatttttatggcatcatctatatcttactgactgagaaaacaaatttctgctcatattcaatggatattttaatggactaattgcgatcctgaaatctgcttatgtaaatttaacagttaaaatttggctttacacaaaaaagaatgaaatcatatcctttgcaacaacatggatgcagctggaggccattattcttagtgaattaacacagaaacagaaaaccaaataccgcatgttctcacttatgacggggagctaaacactgggtacacatggactgttatgaattaatgtgacccccaaattagacactgatgaccccaaaatggggaagggtgggaggagggcaagggttgaaaaactacctataggacactatgctcattatttgggtgacaggatcaatagaagcccaatcctcagcatcacataatatacttatgtaagaaacctgcacatgtaccccctaaatctaattttgttaaaattggctttaagtgacagtctagcaaaaaatatccaataacatttttgttttccaagctttctttttcaattatacagtttaagtgcttaaaaaattactgagctttatcaaagaattactagccccaatctcctactttaaaaatttatttaaataaaatgcatcacaataaacataataaaaagtactttttcagcactattttaattgaatgcaacaaattctgagggccttctatgaaccagaaactgtccttcgcattcagtgtacaaaaacaagacacagtctctgttctccagaagcttaaagaccagagggggaataaacacctacatcaataaataatttcaacacaatgtggtagaagtatacacagaaaggagaggcccttagctgaggtgaaggaacatgagagactgggtaggggtgatcaccagaaggcactaggaggaggtcatcagaagaaggtcatcagagagccttcatggcgatgatgcctgagcagagtcttgaaagatgagtaggcataagcaagtagagaatgggtgaacataatagcaaagacatggaagcatgaaatagcatactggattaaaggaagtacaaacaggaattttgaaaaattatgttctaccaggacgccacggcctttctgtggcttttgtttcttaaaaccttcgcatttcatcctccatacgctcacaatggagggcaaacagattccatcatctacaggctttatctctgttaatctcagccatccagaacatggaaagggacctgaaacaaaaccctactaccacaaaatctatgtggtaagaaatataagctgacatcaagaaggagacaaaaattgtacaatatcctaggtatgtttggtgtaggggcattcagctcaaaacccctgtgagaatatattatggaataatatatgatctgatggtgagaacagtaactcagagttgccgagataaacttatctcttatgtaccttgcttataaagcagggagctgtgtaataaatatacttagaaaaatctttactcaatattgttaaaaataaaaatgttttacattaaataagaagtctgccattacctgtgaaattcatgtttgtgaaccacctcatttcccgaccataacagacagaagagatgttatagtacaaataataaaatttagtgattcataaacagtctttgggtagaaaatatttaaggtcacagattgtgagaaaattaaaaagttatagcttctgattttagtatattcattaaatcttcatttctacaagatttctatttcaaaagcttattcatctgacatcttcatacatagaaagtctcaataaattaattaaaagataaatgaatttgttaaatgactttatatgctgaaggaatgatatacagtattgcattgtacaataaactgttatgaatcaatgtgacccccaaattgggcagaaaataaaggtattccatgaagtattctactttcttacattgccaagagaggtatacactatagaccaaatctctaatctagactgagatcaaaaccacaagatgatataaaaattttttaaatatcaaaaacatgggccagattagtctattttgggtagctataatgaaccagatattttaccacatcaaatactctatacgcaaggacctgacattaaaatagccaaattcatataattaacctctttttaaaatttaaatgttaaagttttttcattaagcataatctatactatctatctccatggacctatagatttaatctaatcatgtaaacacaactttaaaaagttattgatctacattctctttccatttatagtctacacactctaaattaaattctacacaagttttcattcttttcttcttaagggagtcttcaggcttattaaacatctgtgttagtacaccaataacctaagatatgctatttagtttctttattgcacattaaataaatgaatttggaagtattaacatttatagagaaatactccagtttctatggatttacatgattctgtacattatccttgatacgtggtatggttacggctaggaaaaatagtgttggagtactgatttataatttcataaaaacaaattaatcatttgtaataattaaagcatatgagcttttcaaaaattatttttcccatagtatacaacagcccaactttttttccttgttattggccaataaaacctttgttaaaaattacacttcaataaaccattatttaaatgttaaaaatgcaaaatttttaaagttttcaagccctaattaaaaaaattaaaagcataaagtttttgatattttaacaactttatatactctagaaataaagctgccaaagatcagttcattgttaattagagattcttccattattatgaagaaaatacccacgatcttcatatttatcaaagtaacattttagttaggtgtcaatatctcatttttaatagaatgaaattctgaatttcttaatcccaccatccccccccgagttgagatgcatttgccattttcaaggttttagaaacacttgttgaaaagaccattgaagagtttacagtagcagtgtgaaattttaggtatcccaaggaagtacagaatgaaaaatgtttgagaagcaaggatagtgttacgactttcaaaattaattcatatgaaactcctaatgtgaacctgattttttgcgctgggtaaagaagactcattagaagatcgagttccaagggaactgcaaatgccaaccgctttaaaatgtacctttcccatatgacaccatttacccttggaagaaaacaagttactcagattagtctaattccaataaacactgaggccatgaaggaaaaaatatccaaaagggttgattattccaccccagatttgcagccatttcagggacaccccttaagtgctcttcctctgcagatgtagggtagaccccccatgtctgacaactctttagaaataaaattgcgaagaagttatcactttccaaagggcgggggaaggacaagtgagagacgttaagagaaccgacgcgctttgtcctctgaaatacctcatatttacttttgacaaaagaagtaaatagaagcaaaactgagattcagaagaaactctttctactgcttgcacaggttaagtttctcaaagaccccggagaaaagaagcgggctggaggctcaccttccatgtcgctgccgggccgggctggagctgccgctgtggctactcggcctctccacgtgctcctgccgtcgcctggactcagcgcgcagctggcgggagattcccggcgcggggagtccccgggatccggcagccgcgtcggcgcagactgaaaagggcaggagccggcgacctgccggtgcgcggggttacagcggcgctggctggcggcggctttaaaggacgctggccgcggagtgccgcgggttccgcgcctccagccccctttcgaatgtcaaacccaaggaaccccgacaggatggaaatgtcgcatcactaaattgtctcaaaatgtctattttagaaggataatggatgagaaaagtgacatcacacggagggtcgggggtcagccttgctttcttggcaagctgaagttcaaagacgtttatcttaaattgaggaagatctggaactttttgtctagattcagtgataacagccgtggaaagtatcaatgagaacccccttctttcaaagtatttttttttccttcctcactttttcatttcacatggtaaaagtttttggtccaagttttcagacagttggaaaggattttggcacttctatcaattcaactttttaatttttggaagcatttatctcacttttgttttccctctgggaactgcttgatttatttgccaccactcacgcaatactacccactctatataaatagagggagtgttttatagagtgtgtttattttctcccagcctgccttcttctaaatacacaccttacaaaaatacatatatgatgtaccagaaaattaagcaaagaaagtagagctaagggtggaaggtgggggcagtaagattgtaaaattaacttaaagatgttagtatacagatatgtatcagtcaacatcttctcccaacaccctccctactgtccagaggtaaagcacacatttgactgcagagagaggaaaggggaagtgaccacaaaactgtttttcaaagcagaacttttcttcacattgaggtctaagggacattgttcaggtgagcccttctaaagatatccagcgtgtgggacaatatacgaatgagtctcaaaaggccactgtcaccgctattagaaaattatattagtgcatacaaatatatttgagacttaaggctgagggtttgtgcatcagctgtccatatcagaagaaacccacacttacaagttaaagtatacatgctgtaattttatgaattgtagctttaaacaatagtatgtcgttggtataggcagtctatgtgatgtgtgtatatatattcaagtgggtgaaaaactacactggctttaagcaccacagtagcatctctataactgtatgagttgggagttctgcaggatgtcaattttggagaaatactctaaacactaggtctaattttagtactgaaaggggaaatttgttgtttgttagtttctaaaagcaaaaatagcacatcaaaagtagcagaagaggaactgtaaaatttcacagggatggtatgaggatgaaaagttatttggttatgaaaaagttgtaggccaggcgcagtggctcacgcctgtaatcccagcactttgggaggccaaggcaggtggatcacgaggtcaggagttcgagaccagcctggccaacatggcaaaatactgtctctactaaaaatacaaaaattagctgggcgtggtggcgcatgcctctaatcctagctactcaggaggctgaggcaggagaatcgcttgaacccagcaggcagaggttgcagtgagccgagatcttgccactgaactccagcctgggcaacagagtgagacttcgtctcaaaaaaaaaaaaaaaaagttgtaaggaaactttatgattttccattacaatgttcttctgtatatttgacagtggaacgtgttagtactctgtaaatagttcaatactgagtatttcggactcccgagagtgatacctaaggggattaaaagtgaattggtaaaataacttatgtagctactccaccttcaaggagatgcagcataaatccccactctttaagtgtgggtgcacaaagtgacttccttccgaagagtatagtatgaaagcaggggaataagttgacagtggagaaacctgacaaacagtacctcagccagcagaccaaggttaacatcaagtgataaggcatgttgatagtatgtccccttgatatgatgtgatgagaatgtcattttatctctgtaatcttcctcctaagaatccataattctagtctaatatggagaaagacaccaaattccagtagagaggcattctacaaaatacctcaccaattaaagccaggtcaagaccttcaaacacaagaaaagtctgacacagccaaggggaatctaaggagatacgatgactataggtaatgtgggatcccgcatgagatcctggagcaaaaaaacaaacgaggtagggaggacattgagtaaaaaactaaggaaatctgaataaagtttggacttcagttaatagtaatatatcaatatccgttcattaattgtaagaaatgtaccataccaatgtaagatgtcaataatagggaaaatcgggagggagtatgtaaaaactctctgtactgtttttgcaaattttctgcaaatctaaaactcttctaaaataaaaagtttatataaaaagagtggatgggtacttttgacaactattactcatttggttaagtctcctctcataggatttagtttatcacacaggatttacaactatcaattacttacagtaaccaaaaagtcaataaaacacactgtggatatataatgtactttgactaaaactggaatgaagaacttgtagggaatcaaagataatgcctaaatctgtcttcattatcatcaccttaagaagagaacagttgagaccagaccatgtatccagacatggtaactgaaaatgggtggatctgactcactgagtcacatttcatggcttatgctatataggtaaaattaacagtgactaaaaatgaaattactgacaaagtttgctcctggaccatatgagagagtccaagtactgactcggctcaaaggaaataaaaccgaaaactcttgatctcacccaaaataaccattctgcaccctgtctgaaccttgggctctctctactaaccagcctactcaaaaccactactgagagtggtgtcccgctgctaagaaacagacaacacacagggcctttcgggccaccaaactagtagccaagaaggaaccatcaaagacgcgggcatgatcccctttggagctccccgatcttgactagtcatccatccctacagaaaaggccaatcgggctccatccctacagaaaaggccaatgggccttacaattgggcccatttttaaagcaaggtcacttcatcaacctagatacgtttgcactgggggaggtctctcacatcgcctcatacttgaagtgaaaatgaagattcaacgttcctctagagtgggaaggcccggaagcgccttcttggctcagtagtggctcttctgggtcttggtcttgctggtaaagaatgcaattaggtaaaaatcgcgtgtcagtttgaaagagattcgacacccagtttcagcgttcatgagaagagaggcgtaggaaatccccacgcgggcctttctgcttcacgtgaggaggaaattgtcacaagtctctgccttcctcaggtccccttcctaggggattcctcatcgcatcccctagccgccctaccccaccacggtccttgggacctcgcggtgttctctccttgatcccttcggcccctagactggggaatccccggaacgcgacaccgtggcttcttttcctttattctcttcctgccttccgctccgctcagagagcaaggggccaggagcgcgggaaaatggcgccggacgcgaggcgcgaaaagttcgcatgcctgctgccgcgtgggcgccagaggatctggcgatcgcctgcagcgccgtcgccccgcccccgcgcgcgagaatcgaagcacgcacgcgttctcctgcgcgtccgctcccgccgttgcgacggacgggtaggggaggcgaccccggcgttctgctccgcactgtggaggaggtggggaggtgttgggccagggctgaggtaggagggagtctgtccctcgacgcctcctgcgacgccagcccctgagcgatgatgcgaacgtgcgtcctactctccgcggtgctctggtgcctcacaggaggtggggctccctccacccggtccccaggcctctccctctgcccgagcttcccggtcctgcctccttcgcctcgccctgccctgcccgactctgaaccctgctcctcttctaactaaaagtcagtgttttatttcctccgcagtccaatgcccgcgttttaccttattcaataagaagggcttcatttatggcaagacaggacagccaggtaataagggcctctgcacacgcgggcccattggaggggccggaactgcgaagctcttcccggaagagcttcctggagagaaggggaacgagccagcgtttattgagcatctattatactaagcatctgcttggcagttcacgacggtcgcattttttcatccttacagcgatccctattgtgtcgccttgctttaaagccttacagctcacaaagggctgggatttattccagatctctctctcagatgccatctcacttccaggtgtctctgctgctttgcaacgcgggaaacccacgcaaaggagtgatttccaaggccttctgtttggaatatctttaatcctccccttattaactggaaaaactcccacgcatccttcagggctcagctcaaatgtcctttatctctgcagtgaaactttcccaaggaaaattagttacacagctaattttagataaattgagccagttgatagaatttgtcatgtttagactccttctgtgtttgagttctctccccgacccccaaccaaattgtaggacgttgtctttatgagcctggcattcagtaggctttaaaattaatatctttctgggttgcagtgattccaagcataccatcgttctgtccaccaaaccagaaacaagaagtaatcacacatcttcctaatatgcccagataggcttaattattgttcccaatggagaaaatttacagttaaacatcaggtttcccttagggtgatcatgatcatctatctttctttctttctttccttccttccttctttttttttttttttttttttgacagtctcactctgtcacccaggctggagtgcaatggcacaatcttggctcactggaacctccgcctcctgggttcaagagattctcctgcctcagcctccctagtggctgggattacaggcgtgcgccaccacgcctggctaatttctgtatttttagtagagacagggtttcaccatgttggccaggctggtctcgaacttctgacctcaggtgatccgcacgtcttagcctcccaaagtgctgggattacaggcatgagccacagcaccagccaatcttttttttttttttttttttttaaagacagcatctcgctccattgcccaggctggagtgcagtggtgtgatctcgggtcgctgcaacctccgcctcctggattcaagcaattcttctgcctcagcctcccaagtggctgggattacaggggcccaccaccatgcctggcaaatttttttgtatttttagtagagatggggtttcaccacgttggtcaggctggtattgaactcctgagctaggtgacccacccaccttggcctcccaaagtgctgggattacaggcatgagccaccgctcccagctgatcatctttagaatagttatgctgaagtctttttctgaactttctttgagagggagtcttgctctgttgcccaggtgggagtgcagtggtgcactctcggctcactgcagcctctgcctcccgggttcaagcaagtctcctccctcagcctcccgggtagctgggattataggcccacattaccacgccaagctaagttttgtatttttagtagagagggggttttgccgttttcttcaggctggtctcaaactcctggactcaagcgatccgctccctcggccttccaaaatgctgggattacaggcgtgagccaccgtgcccaggccttttctgaacttttaattgcttccaccaaccctccaaaaaattatgatttgagtgagttctgaatctgtacattaaaatgaactttaaatatatcatgtgtatttttataaacaaaagtgtaatatggaaaaatatcatgactcgtgactaacagtgtagagttttaaaaaacttactatgagaagcaaaaaggacttcagacgagcgttctaaatgttatatattgatttttaaaatagtgaaatccaacaagaactaattcgtgtcttcagcacaaaatggtaggagtatatttcttaatttaattttgctatataatgtagttatacattattttatttcatcacagacaaaatatatgtagagttacatcaaaatagtccagtccttatctgtatggattttaagctttctaaaaaagaaatagtggaccccacctacttatggattgggcctaatgaaaagacgttaacaggtaaatttgattttaatatgtacttttttaatgatgtgaacatatttttagaaaatcactgttacttattggaaagaacaaattgaaatttaattttaatggcagtttctcttgctccctacttagaaaaatcatgttatattttggccacttccttattttctccttatgcaaaaactgaagcagtaatttttgtgccctgcttctcagagctgtattaattcaaaggtctttataaaacctaaaatttatcattgtagtaccagtaataggagatgaaataactaatatataatttttcatcatgttagagtgccttggaacataagtattattaattagtttcttgtctgaagaaattgtatagtagtacagagcagtgcaatctctttttctgaattactgggatgaaccaattgaaactagatgccaagaaacaaagaaaaccaaaatatatttcaaaagtgtacttatctcatgtagtcttccacagagtaatatgacagaattaagattttgtgggatccttaaagttgagatagttcattaatttttaaaatttttgtatctatttgtaactccaagtgtactaaataatgcttgatatgttatatgttaaataagtaatttactattctgtttaggaaataatagaataaatataactgaaactggacagctgatggtgaaagattttttggagcctttgtctggactttacacatgtactctttcttataagactgttaaagcagaaactcaagaagaaaaaacagtcaaaaagagatatgactttatggtctttggtaagaatttaggcacattttaacttatacatttagtttggatcgtaattaagtgtatggtttcttcatttaatgaaaatgagtctgtaataggtgactgtcaccaattatgacttacaaaatattttgggatgtatttgactaagcaaactcttaagttgacatcaagatagtttatcctaaataatcttctttcagctccctacttgcctctatctagatatgtaagcgcatctactttatcacaatttagcaggtaatttaaaaactgatctttaattctataaaagcaagttaatgatcctttcactgggttgtgctgacagcaatgacaatttctgtgaattaaggccctccccaaaaagtctttctttttcttgatactgttatctgtatagccaacccacagaagccatttctcttgttgtaccaagtagataatgtatcagatgaaaataacatttttcattaaagttaatagttttatgtatttttgtgaggactaactgataaaacgttatgtttctatgctgactgcaagattgatgggatttagtattacatagtatttgaaaattgtttggtagaggaaattaatgctaggtacgattgttttcactctcatctttcttttttttttaaagcctatcgggaacctgattattcatatcagatggctgtacgttttaccacaaggtcttgtatagggagatacaatgatgtattctttagagtgctgaagaaaatcttggatagtctaatttctgatttgtcatgccatgtcatagagccatcatataaatgccattctgttgaaattccagaacatggcctcatacatgagctatttatagcatttcaaggtaaaatttttaaaatttctttaattttgaatttagtcctgaaccataatagattacaaaattaccatattaatataagatattttaaaagtaataggtcttacatgtttgttaagcactaaagtatgtagttgaccttagcctgtttatggttttaaaacttaacacactaattaattactttcaaatatgacatattgttgcttcttaaaaatcaatattttattaatacagcctttatgcagctaatatttcacttataacttcttacagaattttaaattgtatttttgaaaacttagtaaaagtgaataatcaaaccaaatttatttctattcattttaaagccttgtagttacttacattagcccccagatgcagtgaaaccatcaagtataaattattcaaattgtgcaccttgttttattactaggattagatagctggactaaacatgtgcctgcatgcacatggaattcagcacttggacctttattgaaatgtttggaacttttcagaatccctttgtgagtctatcattttttttctcttcagttaatccttttgcgccggggtggaaaggtgcttgcaatggatctgttgactgtgaagataccactaatcataatatcctccaggtgagaatttcatggtaaggaagaagtatttgtctttttctttttttagagacagggtgtcacccaggctggagtgcagtggtgcgaccatagctcactgcagcctcaaactcctgggctcaagtgatcttcctccctcagccaaggaggaagtatttgaaaatcaataaagctatttaaaacatttttgtaaatacttcgttatattgaaacgtttctttaaaaacctatttctccatcttgtgaatatttatcaataataaaatcatttctaaggaggaaaaattattttttaaaaaacgaatataaagtattaataatattgattttttaagtattattgatttttggtttcagttttttaaactgagattatgagattcttagttatttcaagatgtgatttttttttctttctcaaaagagagctggagtatcaagatgtgttattttggagtagcacatctgtaatattagatagttcccaaggttagtattatgtattttatctatgacagaaggatagatccctggtctttgttccccaaatgatgattaaatagtggcttaaagaacaacttcacaaacatgtcaccctacgttaagccaatggtgcttccaaaattatatctatattggtcatactagttgctctcccctctaccatcctcagaggcaaaggacatagtcttaaaaatcccttcactctctggtctagttcctgagctcatgtccttaattgttattgtgcatggcttatgagaagcacttagttaaaattagttattattaaattctgtgctcaaaaacccaaaatttacatcatcggtttataatgctgattaaagaaaagtctttttttttttttttttttttgagacggagtcttgctctgttgcccaggctggagtgcagtggtggccatctcagctcactgcaacctccacctcccaggttcaagcaattctcctgcctcagcctcccaagtaactgggactaaaggtgcacaccaccacacccacacccggctaattttttgtgtttttatcagagacggggtttcaccatgttggctaggttggtctcaaactcctgacctcaagtcatctgcacatatctgcctcccaaagtgctgggatcacaggtgtgagccaccacgcccagccaagaaaagtcttgctttccattttgcttggctctttttctttgatgatcatggaaattagatataatgaacgcccaattatctacatatgggatagacattgcaaataattcaaaacaagttttttaatcttattttttcttttcattttattttgttttgtttttgagatggagtctcattctgtcacccaggctgctgtgcaatctcagctcactgcaacctctgcctctggattcaagtgattcttgtgcctcagcttcccgagtagctgggattacaggtgcctgccactacccctggctaagttttgtattttttattagagacgaggtttcaccatgttggccaggctagtctcgaactcgtggcctcaagtgatccgcccacctctgcctcccaaagtgctgggatcacaggcgtgagccaccacgcccagcctaatcttaattttaatttttatttatttattttttctgagacggggtctcgctctgtcgccaggctggagtgcagtggcacgatctcggctcactgcaacctccgcctccgaggttcaagcaattctcctgcctcagcctcctgagtagctgagactacaggcacatgccaccacacctagctaatttttgtatttttaatagagatggagttttaccatgttggccaggatggtctcgaactcttgacctcgcgatctgcccgccttggcctcccaaagtgctgggtttacaggcatgagccaccgctcccagccaatttttcttaaccattgcacatattaattgacaacagttgataaggtcaaagctaactaattttggtgttaacacacaccttttcaggaatttatctacgttaagtatggcatgcttacagtacattattgcctgtgatactggaggataaatttggttcatggtttagtaattgtacctttctctggtatttttcaaccttaggcaagagatcgaatagaagacttttttcggagccaagcatatattttctaccataactttaataaaactctaccagcaatgcattttgtggaccacagtttgcaagtagtacgtctggatagctgtcgaccaggctttggaaaaaatgaacgtctacacagtaattgcgctagctgttgtggtaactataaaatataaatatctaaacatttaggttatagagtcagaagaatatataagtaattcacttggcataactgaatagaatctttacagtgattctcttaccaaaaaatatatatatatttagctaaaaggaagtaaaaattcaaagccccaattttttttttttttgttttttttgagatagagtctcactctttcacccatgctggagtgcagtggcgtcatctgagctcaccacaaccttcgtctccagggttcaagtgattcttctgcctcagcctccccagtagctaccacagctggctaatttttgtaaaaagtagagacagagtttcaccatgttggccaggctggtctcgactgaactcctgacctcaaaggatccgtctgccttggcttccgaaagtgctgggattataggtgtgggctaccatgcttggcccctttttttttttttttttttttttttttttttgagatggagtctggctctgttacccaggctgcagtgcagtgtgcagtgtggcgcagtctcagcttatggcaactctgcctcccaagctcaaaccatccttcaacctcagcctcctgagtagccaggattacaggtgtgcaatctgtaatttttgtatttttactgactaatttttgtatttttagtagagacagagtttcgccctgttgcccagactggtcttggaattcctgggctcaagcaatctgcccgccttggcctcccaaagtgctgggattacaggcatgagccactgcgcccagccaaagcccaaatttctaaatatagttattttaatgtatattaactcttcctgatgtactctcttgtattataaacatttctataatgttctgtcttaagctactgtacaatgaaggaaaacagaatggtcctacctggaaagcagagaactaggaaataggaactagaaaactagaaataggaactcataaatggggcactgcagaagatactgtaaaatgctgatagtaaaagaaaaaataggattctcactttctcctatctttaagatcatcaaattataaagtttgaaactcacataatcttccacaacttaaatgggctgaacattacctggtataatataggtactgaaatggtatgatattaaaggcagatttatattgttggtatagaatacctccaagtagtagaggcataaaatatctctaaattataattactccctgtgttttcctctgcagtggtttgtagtcctgcgacttttagtcctgatgttaatgtaacttgtcagacctgcgtttccgtccttacctatggagctaaatcttgcccacaaacttcaaacaaaaatcagcaatatgaagattagaggtgaaagcattgttacttacttgtggaagtcggggacataagatgattttcacatcccagagcatcatagatagttccattaagtaaaatcagtaagaccaaaccactggaaaacatgcattttggaaactttaaaataaatggttaacatggcatttctaagaaggcatttaatccagtatctctagtgtacaaaggaaacttgaagttttaatggattatttttaatgaaatgttttattgtttacaaacggtatgttgctgtgtacctaagagtatagtaaggtcaagaagagtatcaaagtataataaaataaaaattgtatactctccatatatttatttgtttggaatcactcttgtgtgatataaaggcgtgtatattatctttgtattagaaccaaaaaagttatttattttggtccctatgattttattttttaagataaattaatatactgtattttttaaagtataggtttaggtttacagaataatagagcagataatatatagagttccatacacccactgcaccccataccctcattcctccttacacaatttctcctattattaagatggtgcattagtgtggcacatttgttacaaatgatgaaccaatattaatttattattaattatagcccatagttcacattaagattcattgtgttgtaaggttatgtgggttttgacaaattcataatggcatgtgtgcaccattgcagtctcatacagaatagtttcaccaccctcaaaatcctgtgcttcacttatttatccctcccgccgtgccctggcaaccactgatctttttactgtctctacagttttgccttttccaaaatgtcatgtagttggttggagttatgcagtatgtagactttttagactggcttctttcacttagcaatatgcatttaaggttcctccatgtctttttgtgacttgatagctcattttttattgctgaataatgttcattgtatggatatagcatagtatgtttatccattcgcccattaaaggaaatcttgattgcttccagttttcagtgattaaaaataaagccgctataaacatttgtgtgcaggtttttgtatgaacataagttttcaacccaattgtgtaaataacctaggaatatgactgccggagtgtgactatgtgtagttttatgagaaactgccatactgtctcccaaagtggcttaccgttttgcattcaccagaaatgaaaaagtattcctgttatccttatctttcccagcatttggtattgttagtttttttttattttgaccattctaataggtgtatggtggtattttattgttttaatttgcaattccctaatggcatctgatgttgaacatcttttcatatggttatttgccatctgtgtatctttttggtgaggtgtctgttcatatcctttgcccattatttaattgggttcttaattctcttattgttgaattctaagagttctttgcatatatatatatatagttgttgttgttgttgttcttgttgttgttgttgttgtttttgaaacagagtcttgctccatcgcccaggctggacttcgtatattttggatacaaatttttttttagttaatcttccgatttattttcttagtaattttaaaagacattaagttcattaacacaataaattaaagactatattaatagattgcaacatatatgcgtgtaatatatatgataataaaattacaaaagacaagaaagaaagtgaagcaatgttgaaggcaaggttctgtattttcctagaactaagttttacgtattattctgaagtagactgtgataggataatacgcatattgcaatcactggcactaccacttagaaaacaactgaaataatacaactcaaaaacagaaaaactgaaaatctacactggaaaacattatttaacaaaaaagccagttaaagataaaataaagaacaacaacaacaacaaaaagacagaagaaatacagaaaacaattagcaaaatggtaaatttaagtacaaccatgtcaacaattgtattaaatgttatagttctaatgcaatcaaaaggcagaaattgtcagacagactgagtaaaaagaaaaattcaaccatcactacctgcaaaagaaatgcatcagattcaaagacactaatagtcccaaagtaaaaataaaaaatatagacactatataagcagtaaccataatataggtcaaatgaatatatctatatcaggcaaaatagatgttaaagcaagtactactcagcatgaaaggggtatttcataatgaacacaggttaaatacatcaagaagaaataatgtatctgcacctaacagagcttcaaaatattcaagtcaaaatgtaaagaattaaaaaaaggaaaatagataacttgataacaataattgaatatttcaataatgtactctcaataattgatagaacagctggtacaaaaaccaaaaggatgtagaagacatagacaacattatcaaccagcttgagctgactgacatctgacaaggtgacatctttttttttctttttttccaaatttttaattaaatacaagtttgcaaagattttttcacattctttgtgaaaatttgcgaaaaaaattctttcgctttattccttcagcttttcattccttcaacaatgcctttcacagagaagaagtttttaattttaataaaatccaacttgataatttttctttcatggcatgcctttgttgtcatatctgaaaactcattgccaaacctaaggtaactagatattcctgttatcttctagaagttatatagttttatgttttatatgtaagtctaagatccatttggagttaatttttatgaaaagtataaattgtatgtctagattcatttttttgcatattgatatccaattgttccagcaccatttgttgaacagactgttctttctccattgaataacatttgctcctttgctcctttgtcaaagattagttgactacatttgtaagggtctatgtgtgggctctttattctgctccattatcattttgtctattattttgtcaataccacactgtcttgattactgtatagtaagtctcacatttgagtagcgtcagtcctctgactttgctctttagtttggtgttattctgagtcttttgctgctccatgtaaaccttagaatcattttgttgataaccacaaaataacttgcttggagcttgtttaggattacagtgaatctatacgtcaagttggggagaattaacatgataacaatactaggtcttcccatctatgaatggaatatctctccatttgtttagatattctttgatttattggagttttgtggttttcctcatatacatcctgtacatttattattatatttatgccttaatatttaattttttcatgctaatataaatgatactgtgcttttaatttcaaagtccaaatgttcattgctgttatatagaaaggcaatagacttttgtatattaaccttatatcctgtgactttactataattacttagttccaggaattttttgcctattctttgggattttctacattgacaatcatatcatctgtgaacaaagacagttttatttcttcttttccaatctgtataccttttattttccttcttatcttatcgcatcagctaggactttgagtataatgtcgaataagagtggtgagaggggatatccttgcctcatgcccagtctaaaagaaagggaaaacatctagtttctcaccattaagtgtgatgttagttatagactttttgtagactttctttgttaagttaaaaaatcccctctattcctagtttgctgagaatttttatcacaaatgggtagtagattttgtcaaatgcattttctgcatttattgatatggtcatatgatttttctttagcctgttaatgttatggattacattaattaatttttaaatgttggaccagcattgcatatttggaataaatccttctcggctatgtgaataaatatttttatacattgttggatttaatttgctaatattctgttagggatttttgcatttatgttcatgagatatattagtctggagttttactttttgtaatatctttatctggttttagtattagagtaatgctggcctcataggatatgagttaggaagtattccctttgcttcagtttttatggaagagattatagagaatacgtatcatttatttcttaaatgtttggtggaattcaccagtaaagctgtctgggcctctaacaaatactagaatgtacttaaaaatcatagtgaaggggctggaatagtgtagcaggcagaataagggcctctcaaggatgtccacatcttcatccacaaaacctgtgaatatgttaaattacatgtaaaggtgaattaaataaagttacgcagaattaaggtggctaaacattaaaatagggagattatatttgattatcttggtgggtacaatgtaaacacaagggtctttatgaaacaggaagaaggaaacaaatgagaaagagaaagaggtggggatggcagaagcagagtcagagagatgttatgttgttggctttgaacacagaggaagacagccatgagccaaggagtgcaggtggcctctagaagctggaaaaggcaaggaaatggtttctgtagaacctccaaacaggaacaaagtcctgcaaacaccttgtgtttagcccagtgcgactcatattgtatttctggcctacacaattgtaagatggcaaatttttgtgattttgttttgttttgttttttagagacagggtctcactatattgcccaggctgatcttgaactcctggggaatttgtgttgttttaagccactaaaaaccaaaacaacaacaacaacaacaacaaaactatctgggcctgatgctttctgtcttggaaggttattaattattgattcaatttctggctggacatggtggtgcacacctgtaatcccagtactttgggaggccgaggctggcagatcacttgagctcagttgttggagaccagcctggccaacacggtgaaaccccgtctctactaaaaatacaaaaattagccatgcgtggtggagggcacctgtaatcccagccactcaggaggctgaggcacgagaattgcttgaacccaggaggcagaggttgcagtgagccgagatcacgccactgcactccagcctgggcaacagagcaagactctgtctcaaaaaaaataaataaaaataaaaaattaaaaaaaaaattcaatttctttaatagatctagacctattcagagtatctgtttcttcttgtatacattttggtaggttttgtcctttaagtaatttgttcatttcatctcaattatcaaattatagaattatttataatattcctttattatctttttaatgtcattaatgacattaatgtttagtagtgataatccctcttttatttctgatattagtaatttgtgtcttccccttttttttcttggttagcctggccagagttttatcaattttactgatgttttctaagaaccagcttttggtttccttgattttctctgttgattccctgctttcaatttaattgattgttgctctaattcttattagttctttttttctgcctgctttaggtttatgttgctcttcttcctgtagtttccagaaacttgtacctctaatctaaggcacatgcttagattattgattttatatttttcctattttctgatatgtgcattcaatgctatcaatttccctctaaacatttgctgaatcctacaagtttttataagttgtattttcatttttgtttagtttaaaatattttaaaatttcttttgagatttctttgacccatgtgttatttagatgcctattgtttaatctccaaatatcttttaattttccagctatctttccattattgatttttagtctaattccattgtggtcttcaggcttactgtgtatggatttttttttttttttttttttgagacggagtctcactctgtcgcccacagggagtgcagtggtgcaatctcagctcactgcaacctctgcctcccgggttcaagcgagtctcctgcctcagcctcccaagtagctaggactacaggcgcccgccatcatgcctggctaatatttttatgtatttttagtagagacagggtttcaccatactggccaggctggtcttgaactcctgaccttgcaatccgcccgcctcggcctcccaaaatgctgggattacaggcatgagccaccaggcccggcttgcttttattgttttaaatgtgatcagtactcgggaggctgaggtaggaggatcgcttaaggccaggagtttgagaccagcctgggcaacataagcatctcttaaaaattttttgctcaggtactctgttaacaatgtccagaatgttgtttatcttggtgaatgtttcatgtgagctttaggagaatatgtattctgctattggtggatggagattctgtaaatgtcaattagatccagttgattgatgatgccataattcaactatatctttaccgattttctgcctgctgcatttgtccgtcactgatagaagagtgttgatgtttccaaggataataatgggtttgtctatttctctttgcagttctgttagtttttaacccacctattttgatgctctgttgttaggcacctataaacgactgttatgtcttcctggagaattgacccctttatcattatgtaataccattcttcatccctgataattttccttgttcagaaatctactttgtccaaaattaatatagctactcgagctttcctttgatcagtgttagcatggtatacttttttttcttcctttaacctaatgataaccagttgctgataggtagctattctgaaatgaggactttctgtcaagatagtgatgttttattttcactgtgagctggctttgtttcctgcataactataacagattgctaattaacattgataaatatatctcattactttttccaatcaccatacaggttgagtatcccttattcaaaatacttggggccaagcatggtggctaacatctgtagtcccagcacttcaggaggctgaagcaggaggatcacttgaggccaggagtttgagacctgcctgagcaacatagtgagaccccgtctctacaaaaaaaaaaaaattaaatagctaggtatggtggcatgtacctgtagtctcagctactcacaggctgagctatgattatgccacttcacttcatcctcagtgacagagcaagaccctctttaaaaaaaaaagacaaaaaaccttggggccagcagtgtttcagatttcagattttggaatatttgcattatatctactggttgagcatccctaatgcaaaaatcaaaaatgcatccctaatccgaaatcaaaagtgctccaatgagtatttcctttgaacatcatgttgacacttagaaaagtttcaaatcttagattttcaaattagggatactcaaactgtatctttccaaaataaagcagttctaattccaccgcatattgggggctaaattttaccagtactgcttatgtatcctgccgtggttttctaagtgtgttatatatttacagttttgtctcttgaaatagacaattttactctggcatagagctatttattacttctaatgacatgttgatgctacttttaggcattttattttaattttattgcaataggtttaggggtacaagtggttttggtttcatggttgaattgtatagtggtgaagtctgaaattttagggcacccctcacccaagtagtgtacattgtacccaatatgtagttttttatccctcatcccccttccactttcccctcttctgagtctccaatactcatacgcattataccactctgtatgcctttgcatactcattatttagctcatacttatgagaacatatggtattttgttttgttttgttttgttttttttgtttcgagacagggtcttgctctgttacccaggccagagtgcagtggtacgatctcggctcactgcagccttcacctcctgggctcaagcaatcgtcttacctcagcctcctgagtagctgagaccacaggcatgcaccatcacacccagctaattttttttttctttggtagagccaggttttgccatgttgcccaggctggtctcgaacttctgagctctagtgatccacctacattgggctcccagatttctgggattacaggtgtgagccaccacactcagccagtatttgggtttttttttttttttttggttttggttttttaagacagagtctcacttgcccaggctggagtgcagtagtgcaatatcggctcactgcaacctctgcctctctggttcaagtgattctcgtgcctcagcctcccaagtagctgggattacaggcatgcgccaccatgcccagttaatttttgtagttttagtagagacagtgttctgccatgttggccaggctggtctcaaactcctgacctcaagtgatctgcctgccttcgcctcccaaagtgctgggattacaaccatgatccactgtgtccagcctggttttttacttctgagttacttcacttagaatagtgacctccaattccatccaagttactgcaaaatacattattttgttctttcctatagctgagtagtattctatggtgtatacatgccacattttatttatctacttgtcagttgaggggcacttaggttggttccatatctttgcaactgtgaattgtgctgcaataaacatatgcatgctggctggatgcagtggctcaccctgtaatcccagcactttgggagaccaaggctggtggattgcttgagctcaggagttcaagaccagcctgggcaatgtggcaaacccccgtctctaccaaaaatacaaaaaattatccaggcttggtggcttacacctgtagtcccagctccttctagggggctgaggtgggaggatcacttgagtctgggaggcagaggctgaagtgagccatgatcatgccactgcactccagtctggatgacagagtgagaccccatctccaaacaaacaaacaaacaacatatgcgtgcaggtgtctttttcatataatgacttcttttcctttgggtagatacccagtagtgggattgctggattgaatggttggtctacttttagttctttgagaaatctgctattgttttccatagaggttgtactaatttacattcccaccagcggtgtataagtgttcccttttcaacacatccacactgacatctattgtcttttgactttctaataatgaccattctggctggggtaaggtgttatctcattgtggttttaatttgcatttccctgatgattagtgacgttgagcattttttcatatgtttgtggctcttcaaagggtcacacgagtctggacacaatggctcatgcctgtaatcagagcactttgggaggccaaggcgggcagatcacctgagatcaggagtttgagactagcctggccaacgtggtgaaaccctgtctctactaaaaatacaaaaactagctgggcttggtggcgcacacctgtaatcccagctacttgggaggctgaggcaagagagtcacttgaactcggcaggtggaggttgcagtgagccaagattgtgccactgcactccagcctggtcaacagggagactctgtcacacacacaaaaaaaggatcacacgttacacaagcagatacacagtttatctgtggtattaaaatttcatgggaaggcaattgtggggggaagtcttaaaaaaaaagcttcctaaaggaggggaaaagaggctggcaacccctggcataaaagattaaacccaaaattggcatccaaagccttctacggtctggtttccattgacctttccaccttgattcctatcattctacactgggggacagattggactaaatctcttaagttctcttccagctctaagaatgtaaaggtcttttcagtttgaacccttttctgtaacaagactcatcttgctttctcctagacagactacacttattcctcatatgtagaatgcccttccatctttgtttccacgttattcacaacacttctacccacactgatcagtttcttccataaatgtattgtctgctactgctaattttagcatggaaccacatttttgttacaatttactttttttcttttttctttttctttttctttttttttttttttttgagacaggatcttgctgccttgcccaggctggagtgcagtggtgtgatcacagcccactgcagccttgacctcctgggctcaagcaatccacctgcctcagcttctggagtagctgggactataggcatgtgccactacacctggctgattaaaaaaattttttttgtagagatgaggcctcactatgttgcccagactggtcatttaacatttttaagcctctttcattatttgtaaaatgaaaggattatattaaatccataatatctcttccagcactgaatctaggtttaatgtcttttctatcttctgtatcctttccccaccatcccctactagaataaactcctgtgagcaggaacttcctcatactaacctttgaatgccccccacatttctatgcattatagctgtaataagtaattgaactgattaaattgaatctgcattcagaggtaaacttgtggttatatcctacttgctacttattttgaatcttgagaatatttgcagccaggcatggtggctcatgcttgtactcccagcacttttggaggctgaggcaggcagattgtttgaacccaggagttcagaaccagcctgggcaacatgatgaaaccctgtctctacaaaaaaattcaaaaattagctgggtgtgatagcacacacctgtagtcccagctacttgggaggctaaggtaggaggatcgcttgagcccaggaggcagaggttgcgatgagccaagccaagatcacaccactgcactccagcctgggcgacagagtgagaccctgtctcaaaaaaaaaaaaaaaaaagccagacatggtgcctcacgcttgtaatcttagcactttgggaggccaaggtgggcggatcacatgaggccaggagtttgagactagcctggccaacatggcgaagccccatctctactaaaaaaaaaaaaaaaaaaaaaaaaaaattagctagatgtggtggcacacacctgtaatcccagctacttgggaggctaagtcatgagaattgcttgaacctgggaggctgaggttgcagtgaactgacatcctcgcaccgctgcactccagcctgggtgacaaaatgaaactctgtctcaaaaaagagagagagagagagataatatttgccccttgatacattgattcacactttttccatcccctaaccccgatccatagtaaactatttaaatattataacacagtagaattaaaagcttgtgttgaattaatattttgcaaatgttaacccattaacaacaaaattaaatgaatgtaatattctttatctcattagcagagacacaaagccctaaaatggcaacaaagttattatatcttctgacttattcaatggaaacagaagttgtaacagcattcctacaatttgctgctgaaaaaaatcccaccctttcccttttttttttttttttttgagatggagtctccctctgttgcccaggctgaagtgcagtggcacaatctcggctcactgcaacctccacctcccgggttcaagcgattctcctgtctcagcctcccgagtagctgggattacaggcgcacgccgccatgcctggctaattttttgtattttagtagagttggggtttcaccgtgttgcccaggctggtctcaaactcctgagctcaggcaatccacccacgttggcctcccaaattgctgggattacaggcatgagccaccgcacctggcctccctctttttcatcttgattctgtatgtgtacatttgtagtacttagaagtcacatttcacaggattgtacctaccaaaagagtcagtattgagaattttgtattttgtacttctgcaagagtattttccaacactagtgtattattaataaactaatgaacatttggttttcatttgcttgtttcaacaaccattttggcatgtatgtggtgttaatagcttaatgctttgaactgcaggtgccatatcttcatgtattgtaaatgtttctgtctgaagcagttagaaaaactaatggatctacttagttcagatttagtaaaattttctggtcgtatgtgaaagcattagtttattgaagtataagaaaatcactgattacaaactttcaagagcacaaacatttagcctctatggacatattagctagcctatcagaggtattattggggaataaaaggctaacagtttatgtacctttctaatcaatgattaataaaatctcttgtaagagcctgtgtgttgtcaccggacatttttatcttaccttaggctttcttatcagctgcaaagcagactatcctgaaattcttaccaagatatgtgttcttaggttacctgtgtattaacctgctcagaatatccagaagagaagatgtccaaatgtaatctaggctgacctttttctgccaaattgtttcagttgcagattatggactcttgcctttcattttcattatattcttacagttttttgtttacttcacatctttaaaaacaaaacattacaggttcatttaaagcctctttatacttttcttctaccactattctcttatcccccccaagaattaatcaccactctgaaattggtaggtatccctcccatgtaagttttttgttgttgttgggtgggggttgtctttgtttttgtttttgttttttctgagactgagttttgctcttgttgcccaggttggagtgcagtggtatgatttcagttcactgcagcctccgcctcccaagttcaagcgattctcctgcctcagcctcctgagtagctgggattacagggggcgcaccaccatgcccagccaatttttgtattgcccaggctggtctcgaactcctgacctcaggtgatctgccacctcggcctctcaaagtgctggggattatagacatgagccaccacgcccggccttaagttttgtaatcatttaatttttacatcaaaggtgtaatgcgtatgctttgcaactttctttacccatattttaaaaaattctgttaacacatgaagatttgattccattcctcctctattccactacattaatatggcaatatgtattattttccatctattaactgtatgtgcatcagtcagggtccaatctcgagacagaaaatacacagtaatttgattagaggaagtttaatatgaggaattattaaatgtaacaagggattggaataataaggaattgcctagtaagatgtaaggagaactctaaagaatagaggaataacagatatacatatatttttaaggcaataccactaggactgagagtgtctaagaaaatccaccatcccctagggctgaggtccagcttgttaaaatgagcataaccatgggtcaccagatggaagaaaagtcattgtcgtgctaaaaatacactctctagaacttgtcagagacccaccctctgcggtgccaggaaaagctgtacatagggaagtttctcactagagacactctgctataaaaccacagaaggaggccaggcgtggtggctcatgcctgtaatcctagcactttgggaggccaaagtgggcagatcacttgaggtcaggagttcgagaccagcctggccaacatagtgaaaccctgtctctactaaaaatacaaaaattagctgggtgtggtggtgggtgcctgtaatcccagctacttgggaggctgaggcaggagaatcgcttgaacccaggagacagagatggcagtgagccagattgtgcctctgcactccagggcaacagtgacacatcatctctaaataaataaataaatccacagaaggaggaggagttgtcagtggtgctgctagccaccaggcactgcagggtatggacaatggagaagttgaacatgctaccagagcctgccaaagcaagaactcagaacctacagtgtctctccagcacccctttctgacagttcattgttgtgccagctggcaaaggaaaaatattatcagagcccagattcattttcatagagcaggcaaaaaggatgaatttggagctgagagacaataagttgctaactgtcacagtctaaccttttggctatttgacgtccacatgcacctttctatacacatttgaactcttgttcatggacaaaacaatttttattttttgagacaaggtctctgttgctcccgctaaagtgcggtggcacaatcatagcttactgcaggctttgaactcctgggctcaagcgatcctcctgcctcagcctcacaagtatctgggactacaggcacgtgccaccacacccagttaatttttaaaatttttttgtggagacaagttctctctctagaactcaggctgatctcaaactcctgggctcaagtgatcctcccgcctcagcctctgaaagtgctgggattacaggcgtgagccacctcacctggccacaattttatattctaagaagatacatctatccatcttaaaagtacttgctgtttccccaaaatgtaaagatatgtagtcccaacagtcattgtttctattgctattttaaatacttctcaaattcagtcacagttccactgaatattcttacctaaagactaaactgtaaaattatctaccaacaatctgtatattaaaaactggaaaggagagagaagaaggatagcatattaaaataaaggtattggctgggcacagtggctcacacctgtaatcccagcacttcaggaggctaaggcgggtggatcacctgaggtcaggagttagagaccagcctggccaacatggtgaaatcccgtctctactaataatacaaaaattagccaggtgtggtggcacacacctgtaatcccagctactcaggaggctgaggcagaagaatcgcttgagcccaggaggcagaggttgcagtgtgctgagattgtgccactgtgctccagcctgggcgacagagcaagactttgtctcaaaataaataaataaataaataaaggtgtgaatacaagaagcaaagagaaaatatgcaaagctactttgtttctgtgattggtcattaaggttgtagtttatacctatggcttccttctgcgggaagccaattccgtgttattcttgccctcagtcagaacttcagttgctgtgggttctttatgtggtggaatgactgaaattttattgccaaagtgtctgaatctttattgttcttaccccttctcctccccacacctgttttttggttgctacgtagttttccatcaacctttactattgaagatggaagaactagaggtacctcagagaatctgggttccagacatagtcctcctttctacccttgtgtagcaactcagtttcccattggtcatcaggatcattctctccagccagattaactctcctttctcacctcatccccttttttccctgcttagttcaacaacatatggagcccaaaatgtccaggtgacagtctcatcttccaaaccagggaagaaccattgtggtgtctccttgtggaagcatccccctcttgggaacaaagatctccaaaccatcaaagctcaaagttaccaggatagagagcgaacattcttctagtgggttattgggtggaatagtgagaggagccactcctacacccactctttgattcctggactatcctggctatgagggagacagcactagatagtggcctctgattcaaaacctaaactgcatcctgtaaagcagaacccatttctttcagggtgttgtctcccagttgacactgtaacagattttagtgagccatttcacctttccgttaagctaattgcttctaggtgatggggagtggagtaagaccagcgaattctacggccatgagcccactgcttcacttcctttgcagtgaagtgagttccctgatcagacacaatgcagtgtggaatgccatgatggtcgataaggcattctgtgagttcacaggtggcagcgctggctgaagcattatgagcagggaaggcaaacccacatccagaatatgtgtctattccagtgaggatgaatctctgttgtttggatagttttattctgtcggcataaaaaaaactgggcacacaggttaatgactaggttaccctgaaataggctaatgcattattcttttccataatagcacatctcattttgaaacagtagaacttcataaaagtgagaaagagagtatgaacattttagtggtaggattctaaagtgattatgtccccctaagaaggaaatgtttccctcttgaaggtagaactaccaccccaaccatcctaaagagacagatgcctggccggacacagtggctcacgcctgtaatcccagcactttgggaggctgaggcaggtggatcatctgaggtcaggagtttaagaccagcctggctaacatggtgaaaccctgtttctactaaaaatacaaaaaaaaattagctgggcctggtggcaggcacctgtaatcccagctactcaggaggcttaggcaagagaatcacttgaacccgggaggtggagattgcagtgagctgagatcactcattgcactcagcttgggcaacaagagcgaaactccgtctcaaaaaaaaaaaaaaaaaaaaagagagacatgcctatggagttcaaaaagaaacgctgcatgtactcccacgttataatgaacacgtgtacatatagaactacacgccaggaactgcacagagtgtttccgatgtattcagtagttctcatattcatcataggaggcagatactcttattattcacatttgatacacatcaaaacggaggcataatagggaagtaatttgcccaaaaagtcacatagctggtatgtggcagacttgacattgaatattccagtatctacgctctcttcattaccaactattctgtctttcatagtaagttttatcttaaacaccagtaattatttctaacatttcacatgagctcctcaaacaaagcagtttaatgggaagtggctgttaggcaaataagatacaaccaaatacaaaatttaaccaccccttgagggaaaacttacagtgtaggtcaaagggtaaactactgatggtgttgcattccgaaagattgccacctgctcctgtctgatgctattcttttttcttttcttttttttttttttagatggagtctcgctctgtcatccaggctggagtgcagtggcacaatcttggctcactgcaacctccgcctcccgagttcaagtgattctcctgcctcagcctcctgagtagctgggattacaggtgcctgccaccacatggctaatttttgtatttttaatagacatggagtttcaccatgttggccaggctggtctcaaactcctgaccttaggtgatctgcccaccttgggctcccaaagtgctgggattacaggcaggagccgccgcgcctggcctctgtctgatgttattctgctttgacttttcttcccctctccttagaaaatcccacagaatgtaggcactgctgttgagtttgtgaaattctctttttcctaagccaggaagctgttttctccttctatcttttgtttttcatcctccagtttccttttactctttaaattgctgctttatttgcacctgagctgtgttcccctttggca

SEQ ID NO: 48 - DNA, 161726 bp, Homo sapiens
cttactaattgttttcagatgtcatgaaacatttcagaatcctgcactgaacaattagtagagtccacatgatgtttcccttggcagacatttaattaaaattgtattgattttcagtcttgtagttttacttttgtatttgggagcatatatttttagttcgctgacagactgtgtctgtgttgcccagtggttacaaggactcagtagggtcgtgctgagcagggggtttggagccagagagtggcaaagcaggggctgagacttggctctcccgagtcctgatcggtcagcaccggtgggtgcccaggctggaaagaggaaggaggacagagctctgaggcctagtgactgagggtggaaggggctgcagagcccagggcagagtctgaggagcaagaggagtgctgggtggtgtgggttgggtgggatggggtgggtgggtggcaggcctgggggcctcaccggcagccagaggagaggtggcatcagatttcatggagctggggtgggcttgaggaagaggcacatggtggggctgtgtgctcagtgggggagcatctgtatctttaacaagcccccccagatttggctgccctgctggagagcggaagccccagtctaggcggttgtgaggggtcttcctctccagggctcctgggctccatcgcccagagtccctgtgtcctcccttctccagggtggctggtgccccacctgaaggagcctaggcccgtcacccccgtcattccaaggagtcaggtcgcagtctggcctggtgtccatccagttccctcaaacctctggacattggagtcagggccaaggcctcaggggtcctggtgaaaatgtctggtgggctggggtagggacaggggcaaggacacatccactccgtctccacttcaccctctcaagcagcgtgatggattttgcccattaagcataaacctaatcaattgatttgccacctgaggctccgtctgacaccactgcccacccccaccccccatcagcccagatggattatggctgggaagatggagcaccgcagtgctgggagggagatgggattctgtcagaggtgggctttcggcgcccttctgctggccctgtatagggcgcattgcctcccctgcacagccccgaagcctccaagcctgccccttcctgggcagggtgctggaagctagccctgcccatcggggcggcctggatccttagaggactggtattggtgcctgaggtctctggccgtgggctgagatcccttggtgcttccagggccccctgggtggtggcttagcatcaacagcctcccctccaggttcctccatcccctacctcttgccccttccgggaggtgaggggcagccccaggcccttgcttctacctgcagagctcttcctgtctccctctcacagaccaacacaggcatccgtaagaacttggagcaggagatcatccagtacaactttaaaacttccttcttcgacatctttgtgagtggccttggctgatcctggggaccccggaggcagagagggagcagggaaatgacttctgctgggttctcttttggcagcatatatccagtctgatcagagactcggctcccatccttcgggagccatcagtcattaaaacctttgctccacaaggctgggcgcagtggctcacgcctgtaatcctagcaccttgggaggctgaggtgggtggatcacttgaggttaggagttcgaaaccagcttggccatcatggtgaaaccccgcctctactaaaaatacaaaaaattagctgagcatggtggttcgcacccataatcccagctacttgggaggctgaggcaggagaatcacttgaacctgggaggcggaggttgcagtgagctgagaccgtgccaccgcactccagcctgggcgacagagcgagactctgtctcaaaaaaaaaaaaaaacctttcctccacaaagcccccttcagagagccccaggtgggagagggaagataagacccctgtgcaaggttacatccaaattgtcccagagacatgctgactcagtcgttgtcccctgaggtgtgcatgcccataggaagggaacgtgggggcaggaccagaggggaggtcagcctgcagcagggtggggggcagtagcttcctgtgactgccttgctcccgtcccccaccaggtcctggccttcttccgcttctctggactgctcctaggctatgccgtgctgcggctccggcactggtgggtgattgcggtaagatgccactttcctggcagcttctgggccctggcagggctggtggaagggatgggatggaggaggactcacttcccagcctctgccttccccttcctccctccctcccctgggcaggtcacgacgctggtgtccagtgcattcctcattgtcaaggtcatcctctctgaggtcagtggctcagggtctggccagtctggtgggcatcagacctgagtggtatgcttctagagaggagcatttctctaatttggggtgtctgtccctgttgtccgggttagggggagagggaatcctgtcctttggtatctataaggaatcatccttcacccgcttccctgacttagccccttgcagctctaggaatcagaaggttctttctccagcctaaccccagtttatcctgctgcagacttgagagggttcccaagcagctgctaccaggaatggggtgtatgccagtttggctggctagagttggtagccacagaagggggctctgggtttggggtgacccctgccatggagctcagccccctcccttcacagctgctcagcaaaggggcatttggctacctgctccccatcgtctcttttgtcctcgcctggttggagacctggttccttgacttcaaagtcctaccccaggaagctgaagaggagcgatgtgagtgcttgcgggtaggggggtgcagcgagggttacccacagccccaagagaggggagttgcgggcatgagagtcagtctgaagcatctcgccacctctgagcagcctccagtagcctgagggggagcttgggtgggggtaccccaggctgctagggtgtaactgtcctcggtccgggaccgagtctgctcctccagggtatcttgccgcccaggttgctgttgcccgtggacccctgctgttctccggtgctctgtccgagggacagttctattcacccccagaatcctttgcaggtgagggctggtgtgtgggggaactgctttcagggaggggccttgtgaggaatggggtaggctgggtctgttctttctattccttctatcaggctccctggggaaagccagcaaccctctcccacacacttttatcccccacatccttgcactcacatacccgaaccccactacctccccacactctctccccaccccttgccattgtcatctgtgcctgttttctgcagggtctgacaatgaatcagatgaagaagttgctgggaagaaaagtttctctgctcaggtatttgcctgcctacccctaacccctgcccttggaatgggtgcctggaggagggcgggtgcaggggtcagccggggtgggcaggggtttcccagtagaggctgaacctcgggcaatgcccatccgagtgtctcccccaccaccagtccggcccccctggtctgcctcatgcctgggcacacaggtggagcagccacaagcctgcagggcccagggagaccagcccagatcccacatgtggctgggccaggcccctctgggaagcatgtggtatgtctagagagagaacaggccacgaacatggtggactgcaggccccaggctgacccctccctgcctcctgcttccgtccaggagcgggagtacatccgccaggggaaggaggccacggcagtggtggaccagatcttggcccaggaagagaactggaagtttgagaagaataatgtaagaagccctctcccacctgaccttcccatgcgtgttaggagtttctgttctcttttctgaggcctgaggaagaaacccaaagattacatgggttggagccatattcctgccccaagagagggagctgggccctcgggtcggcaggaggctgggctggattggacgtttcccccgtgccccttggccccccttccccgcaccccccatgtttacttccctgctgttctgcccccttggctccaggctttgaaggggaagccaggcttctgctctgcatccgttgtttcgtttcatgatcaaaacaacattatctacaaagatcgtagagagcttggaaaacagagagcaacatgccccagtccctctctctggccagttcttgtggcagccccattggcctggagacatggttttttgtggttgcagctgcagctgtccccccgtcttttaactcgacatcaaaagcctctctcctgccagtgccataggtttgttagagctactgttttgtaacagctgctcaggtgtccccaaactcctggagttttccaccctgagctgttaaaaacctgccctgcctgtcacccatttctgtgccaccagcccaccccctgcctccactctcctccctgccaccttctgtccctgccataggaatatggggacaccgtgtacaccattgaagttccctttcacggcaagacgtttatcctgaaggtgagtgaggggagcgggtgtcctggagccccagacagcacaggaggctccaggaaggtgccgaggggccctctggtgggtgccccccaccaagagggaagggttggtctgcccgagcccatctggcaccacccagccctctgccgccctgtcccagaccttcctgccctgtcctgcggagctcgtgtaccaggaggtgatcctgcagcccgagaggatggtgctgtggaacaagacagtgactgcctgccaggtgagcccagtctggctgcctcttaaggcacagatgggggcacagccacgcctcagtgggatcactgaagcactcagcgcctcagctgccccatctgtacagtgggtgtgatggtaacagtgcctgctcgggagggtcgggaggagggcaggaggagtgctcatcaggcgctgcccagggcctgcctgtggcaatagcagttagtaaaggggcctggggtgttcccatccctggggttttcctggggcgacctgttccaaaagtctccgttgacggccctcagatcctgcagcgagtggaagacaacaccctcatctcctatgacgtgtctgcaggggctgcgggcggcgtggtctccccaaggtgagtccatgccgggccccctcctttcagccaggtcttctgcactttggccttgggtcattgtcccctgaactaaccctccctcccgcagggacttcgtgaatgtccggcgcattgagcggcgcagggaccgatacttgtcatcagggatcgccacctcacacagtgccaagcccccgacgcacaaatatgtccggtgagcctcactttgcctggggtcacccctgccagcccctcccctgggagcattgagcagtgcagggtacagcatgtacagctgggcacttcccctgctgaggctgcgttcctgttccctgtcccgctgggctctgctcctcctggctactaatcctgctaatcttgctgctctgtctgtggagatggggggtggtggacagctggaaccaagccaccaaggctggacgggatgtgcggcggtggctggctggggtagaccatggatggggacccgtgcagggaaggggcctgagagccatgtgctcactctgggctgattgacctgagcaggaggctctatgctctgggtttcatcttcctgcctaaggagactcgggtcccctttcgtcctcctcaccctgtcctcactccgtcatctttctctggagtggctcaggagttcccccaaagataaagggattatggccttcccgcatctgtgcctgggcttctggagtcttcccttttgtccagtcaggctgtggtgctgcgggtggccccctcccatagaccccactcttccccatcccctcctgggttccagcaggagcactgttctttgaataggatgccaggctctgctttgggcactggacagacttgctgggtgcagggaagctcacttcctctctggatgccaacttccttatctgcagaatgggcttaggtgtgctcagtggagctgagggagaatgaaatggtgatgggatgtgaaccgtgcctcccaggcttagccttctcctgagcaggtgtcccctcctgaaggggaaggggtaagaagcgccagcccagcctactctgccatagcagggctgacctagaatctctggacagagtgtatgagggctgggaaggtggtgagctctctgtccctgggggtgtgcaagcaccaacaggccgttgtaggaggattcaagcatcacagagtgggtgggggtggagggccgattctgcagcccatgggacacctgtgctaagccttgttcagatagggtagctctgcctttctgcttccagcccagtcccagctgggccaagaatggagtgtgagtggtaggggctgcgggggggtgtcagggcctcactctgttccaaagtccccccaatgatgcctctttccataggggagagaatggccctgggggcttcatcgtgctcaagtcggccagtaacccccgtgtttgcacctttgtctggattcttaatacagatctcaaggtggggtgctggggggctgccaggtgggttctgtggagtggaggggaccctgctgctgacttggttgctgcatgactttgggggctctctgccatgcctgggcctcccctttgtcagccacctttcttacttgaaaatttgggtcagggtccagatggtctcttagccctgggttgctgtagggcatgtgcccccccttcttacctctgagtcctgaggccctgaggaagggtggctggtggccagcccggccccaccctggtctgtttgtgttgctggtgccaagagccaggcccagcatgttcttcctgccaggggtgagtgggagagggcgacccaggctggattccagagctgcacctgcattctggcccagagcccccctgctggtgccagctgcaaggggagaccctgctgagggcaggccatcaagtgtgacttctgcctgccttcccccagggccgcctgccccggtacctcatccaccagagcctcgcggccaccatgtttgaatttgcctttcacctgcgacagcgcatcagcgagctgggggcccgggcgtgactgtgccccctcccaccctgcgggccagggtcctgtcgccaccacttccagagccagaaagggtgccagttgggctcgcactgcccacatgggacctggccccaggctgtcaccctccaccgagccacgcagtgcctggagttgactgactgagcaggctgtggggtggagcactggactccggggccccactggctggaggaagtggggtctggcctgttgatgtttacatggcgccctgcctcctggaggaccagattgctctgccccaccttgccagggcagggtctgggctgggcacctgacttggctggggaggaccagggccctgggcagggcagggcagcctgtcacccgtgtgaagatgaaggggctcttcatctgcctgcgctctcgtcggtttttttaggattattgaaagagtctgggacccttgttggggagtgggtggcaggtgggggtgggctgctggccatgaatctctgcctctcccaggctgtccccctcctcccagggcctcctgggggacctttgtattaagccaattaaaaacatgaatttaaaaaaaaaaaaaaattccagcccctcccactgccttgcctcttgagggaagagaaaggcaggcagcagcttggatgaagagggaagacccctcacacagcctctcctgggctcacaggagggcggagcccggggagccagttcctgaaacatgccccccattccccccccgcccaccccccactccccgctttcctgaccagttcaactgagcagatgactggtcagaaaaaaatgccccgccccctgccaggcttcagcggggcaagtttaaagtctctagtccaggaatggaggtgggggtatgggcacctggcagtgcccacagcaagccttgactgtgtggcctggagatggggcctgagcttcagggtcactgaggcacctctgggatccaggccacctggagccccggacctcccagactccactcacccattccctctccccgcacggcactcacaccaggggcggcctggagcccggatcgcagggcggggccaggccactgcctgccttcctcctccctcccggctggcctgcccccttgcctgcctgcatgcaggcttccagcagagccagcttcttcagagccaggtggatcctgtttcggtcctgcctaggtgtgtgaccctgggcgaatctacctctctcagcttctgcttcccactttatgaaaatgggactgatgtcacagggttgttatgagattaaaagatatgaagaaccggggacagtgctcagtaatcaatagtctgcagttctgcacccacgtgctcctgggtactctgccgtccccacagggtcctcagctcagcccctgtcactgcctctcctgccaccctttgtccactcggcagtgttctcactcctcatccccccacacccaccacctgtctgccagcctcttgcaccatgagttgctactcctggggtgctggactgtccccacagccatctgtctcccctgctccccatgaagaagagccagtcccctcccaggtagcacatcagagcgggcaggctccagagctcttctggtcctcttgcagtggccagaaagtggggaaaggggcccagagaggggcagggactgacccatggtcacacagcctatttatggctgatctggagccaggccttctgactatcacccatcagagcccctggattcccatttcacccaacacaggtgttggggtagaactgggggccctccacccctactagcctgactgtctcctgagacctgtctcctaagaccacttacctgaccactggccatggggaaggaaaacacctggccaaggctcatgccccaggttcccaggcatgaagttgactgtctccgcccctgctggtgtggtgagggtgactggggactaggcactaggcctttggtgcaggcgcctgaggacgtggttgcactctcccttctggggatatgcccttgagcccaggcagaggagagcacagccagggcaggacctggcagccctggtacagagcccagagggggcatcagttcctgctggtcctgctctgtttacagacaagctgctgtcctccctgcaaaggggagtgggtggggcagagggcaagtgccaggggggcacaaggctgggcatgtggctggcatgagacggtgtctgagtaatgtcaggcacctggaggcattgaccccaggaccttggaccccagacctctgaccggggggcagccagcgtccaggtaccccaacccctgccctgggtccggcgtccccccattagtgagtcttggctctacttatagcatctgacaccagaggggccgaaaatagcccctggagaagggggaggagggggctatttaaagggcctgggaggggagagagaatgaggagtgatcatggctacctcagagctgagctgcgaggtgtcggaggagaactgtgagcgccgggaggccttctgggcagaatggaaggatctgacactgtccacacggcccgaggaggggtgagtgtgggtctgctagagccctgcctctgctcccccagagcaccctcactgagccatgaggccagagcatgaagccctggagaaatttctgggggtgggggcaggaagaatgccccatggggagagcaaaggggaaccacccttcctgcccccaggtcccagcagcccaggggagccccccacccagcctgtgcccagagagcaacagctcccaggagctcactgcccctcccctctccccagctgctccctgcatgaggaggacacccagagacatgagacctaccaccagcaggggcagtgccaggtgctggtgcagcgctcgccctggctgatgatgcggatgggcatcctcggccgtgggctgcaggagtaccagctgccctaccagcgggtactgccgctgcccatcttcacccctgccaagatgggcgccaccaaggaggagcgtgaggacacccccatccagcttcaggagctgctggcgctggagacagccctgggtggccagtgtgtggaccgccaggaggtggctgagatcacaaagcagctgccccctgtggtgcctgtcagcaagcccggtgcacttcgtcgctccctgtcccgctccatgtcccaggaagcacagagaggctgagagggactgtgacttgggctccgctgtgcccgccctgggctgggcccttcctggctaggactgtggaggggagctgctggccatggctgctttgtagtttgcccagagttgggggctaggggaggggggagccagaggccaggatgcctgagccccctgagttcccaaagggagggtggcagagacagtgggcactaagggtggagagttgggggccagcacagctgaggaccctcagccccaggagaagggacaaaaggtactggtgagggcaagaggtgcctgggaggagtggccctgatccaggaaaatgtgaggggaatctggaacgctctaggcagaagaagctgggagggagggggaggtgaaaagggcagaggcaaggatggtggggcccccagcaccctctgttagtgccgcaataaatgctcaatcatgtgccagagttgcatctctttccttgtggttgggggggctggcccatgggtgtcccctcaatgcccacttctgggaccaggctccgcatctgagctaaatatggcagagctaatgggtacaccccatacttggggtgggggtgggggcaggacagagctgtaaacagggtgctgtctccagtctccttcccgtaccctgaccgctgcccagtcctggcttctgtgtccagccccctggcactgggtggtaaccagcaagccagctggcatccgcatccagggtttgtttcaatgatgtctcgtggagaatatggaggggctggtgccaggactgtccttggctttgcctcggggtgtgaacggggtcagtgacctctaaaactaacctgcctctcagttctgaatccagacagaatcaatcctcagctgtgtctcgctccacaccccctgccctggaagccagggaaggttggaggtgctagggggtcaggctcccctctgtgacccctgcagctgttgtggtgactcatgtcccaacctagctgcctctcccaaggagactttcccctggggacaagggggagggaatggcatggaggaggcccacatcaagcggggccaggaacccacggtggcaggagctgggctggtgacctacccagggcagaagggcccgggactcatccagaggggaaggaaggggtcttcaggaagaccacggagatgccacaggcagaattggcttcccatctgggagataggtggggagaccctggcattttgacagccagaacctggggtgctgagcagaatcttcatgcctggcctggccgctccttcggagggaagctggagggtgggctgcgagaggagtggggtcagagcccctacatccgcaggaccccaaatcggctgggccccaaggcccggactgcgctccccggtggccccggcggccctccgcgaatgcgtcctgcccctcccctgcccaagccctctgccctcacccgggtccggcgccgcccccgaagtggcgggaacaacccgaacccgaaccttctgtcctcgggagcccccagataagcggctgggaacccgcggggcccgcaggggaggcccggctgttccgcccgctaagtgcattagcacagctcacctcccctatcgcgcctgccatcggacgggcagtgccgcgccctgctctggggcccccggagcgaccacagcggaggccggaacggactgtcctttctggggcggggtggggagggggtgtcgctggagggcccggtggcatagcaacggacgagagaggcctggaggaggggcggggagggggagttgtgtggcagttctaagggaagggtgggtgctgggacgggtgtccgggagggaggggagcctggcggggtctggggcctcgtcgcggagggcgctgcgagggggaaactggggaaagggcctaattccccagtctccacctcgaatcaggaaagagaaggggcgggctgctgggcaaaagaggtgaatggctgcggggggctggagaagagagatgggaggggccggccggcgggggtgagggggtctaaagattgtgggggtgaggaactgagggtggggggcgcccagaggcgggactcggggcggggcaggcgaggcggagggcgagggctgcgggagcaagtacggagccgggggtgtgggggacgattgccgctgcagccgccgccccactcacctccggtgtgtctgcagcccggacactaagggagatggatgaatgggtggggaggatgcggcgcacatggccccgggcggctcggcggtcagctgccgcccccacagcggaccggtcggggcgggggtcgggcggtagaaaaaagggccgcgaggcgagcggggcactgggcggaccgcggcggcagcatgagcggcgcagaccgtagccccaatgcgggcgcagcccctgactcggccccgggccaggcggcggtggcttcggcctaccagcgcttcgagccgcgcgcctacctccgcaacaactacgcgccccctcgcggggacctgtgcaacccgaacggcgtcgggccgtggaagctgcgctgcttggcgcagaccttcgccaccggtgagcgggggaaactgaggcacgagggacaagaggtcgtcggggagtgaaagcaggcgcagggaaataaaaagaaggaaagggagacagaccaggcgcctaacagatggggaccaagaaacaagagatagctgagaggtgcaaacagaagagaaaaaagagcaacatcccttaggagaggggcagaggagagagaggtggagagagggggcggagagtgctcagaattgagagctaaggtgggggatgcaggacagactgaggtggagatgcataggaggaaatggaggcagatgtgggacaggggtgagaaactgccaggatttcctcgctgagcctggctggtaggtatagttgttttctttctttttctttattttattttcatttatttacttatttttattttttatttgttttgagacggagtttcgctcttgttgcccaggctggagtacaatggcgccatctcggctcactgcaacctccgcctccccggttcaagcgattctcttgcctcagcttccctagtagctgggattacaggcatgcgcccccatgcctggctaatttatttgtatttttagtagagacgggacttctccatgttggtcaggctggtctcgaactcccaaccttaggatccacccaccccggcctcccaaagtgctgggattacaggtgtgagccactgcgcccggccagtaggtatagtcttctagatgtgaaacctgagtctcagagcggtgaagttcccttccgaagggcagcccatgttggagctgggttcagtctaactctggggccaatgctttttccagatggagacacatttgcagaggagaaggaagaactagagagaggcagggagatgcaggggagggaagggtaaggaggcaggggctgcctgggctggctggcaccaggaccctcttcctctgccctgcccaggtgaagtgtccggacgcaccctcatcgacattggttcaggccccaccgtgtaccagctgctcagtgcctgcagccactttgaggacatcaccatgacagatttcctggaggtcaaccgccaggagctggggcgctggctgcaggaggagccgggggccttcaactggagcatgtacagccaacatgcctgcctcattgagggcaaggggtaaggactggggggtgagggttggggaggaggcttcccatagagtggctggttggggcaacagaggcctgagcgtagaacagccttgagccctgccttgtgcctcctgcacagggaatgctggcaggataaggagcgccagctgcgagccagggtgaaacgggtcctgcccatcgacgtgcaccagccccagcccctgggtgctgggagcccagctcccctgcctgctgacgccctggtctctgccttctgcttggaggctgtgagcccagatcttgccagctttcagcgggccctggaccacatcaccacgctgctgaggcctggggggcacctcctcctcatcggggccctggaggagtcgtggtacctggctggggaggccaggctgacggtggtgccagtgtctgaggaggaggtgagggaggccctggtgcgtagtggctacaaggtccgggacctccgcacctatatcatgcctgcccaccttcagacaggcgtagatgatgtcaagggcgtcttcttcgcctgggctcagaaggttgggctgtgagggctgtacctggtgccctgtggcccccacccacctggattccctgttctttgaagtggcacctaataaagaaataataccctgccgctgcggtcagtgctgtgtgtggctctcctgggaagcagcaagggcccagagatctgagtgtccgggtaggggagacattcaccctaggctttttttccagaagcttccttgaggctagcattctgtaccactcattcttcccaaactaaggaaggccaaggtcaggggagctcaccgggcacctgcagtgcaccaggcacttgtgatatgccattgtgtccatcgcatcattcattcctgcattcagcagcaggtcctgctagtctgtttccaggtgaagctcagagaggtgaagtcacaaacagtgcagactgcttcagaccagaacgagggagagtggggatcatgaggagatggaagtagaatctgcaaggtggtggggaggtgggggtgttatgattgaagcacaatggccgagggaagtgaaagggaaagaactggctccagctccctctcacaactggacttgagttctgcccagctctgcctctggggcctgccattccccatgccacgtgcccaggcagagacctcacctctgtttactgcctccagccagctctgggacctgcccctgccgccacaactgtcttctcctgccctccagcccaccctattcacacaaatgagctgaacaagggcaggtgaggcttggaattgatttattaagcacatcccttgccaccctcccaccttaaaagttttcagtatcaaaagaagctagcgcaggccacccgagtccctgaggttggagtcctagcatagctcccctccctcaaagagggacaaggggtcaggggcagagcaaaaatccagtctgcttcaaccacggagactgcctttgggatggaaagtttctggagctccctccattctattcctgtggggcaggaacatgccagggctgctggtaaatggcaggggtcacctttaccagggcgcaggcatagtgtggcccctgcctgccctggggccaccctggaacagtaagaccctctgggaagggaagaaaccagacccagccataagctttctccccttctccctcaaatcgccccttcctcctccccaaaatcaggctatggcaaaggggctggcagcaggggaatggaggttttggaggggaaggccagccatgcgaaggcaaggagaaaaggaggatggagagagccccagccatccccattttccttcctctgcctccgaggggctgcttctggagggcactgttgtgtggggaccctgtgaggtttgcaggaggcgggcaaaggggcaccagacagggaacatgcacacaggcagcctggccatggagagctcctggctgtccgcccaggtggcgccttgggcagagctggcgctccacaagtgattattgatggtgacaggattccctcatcctgctccaacctctcaactgtggacacattcaccggcagtcactcatctcacatgcccaccagcacgcgcacacacgttcccctaacccacgctaacacacccaccccctgcacacacacactttgaagccacacctcttccccgacaacacccgtctccacactgcgcacctaggcctgagctcacacacacccaggcccatgctcacggccctgtcacctatgcactcagcctggcccacactcccgacacacggtggcaggctctcaaccagacagcagcacaggatccttgccctgggcttgctggagccctggccctgaaagggagtatggtgaggcctcctgggaacctggctagggcaatggtcagggtgaaactccttcccaatcccagcagcttggtccctcaagatcccatggggagaatcgccgtgaaccttggctggccaaagaacaagcatccagcaccacctagtggtgtcctggaggagggtggggggtggtaacagaaggggaccccctgtatccctaaggcctgtggtccctggtctcccaggtagacagagggcttcaggacccagccaggcagctggggatgtggggaggaggctgatggggaggaaacaggcagctgtcctcccggtagagctaagagcacactcagttccaccccagttcagctccaggaggtagaggggctgcccactctcgagtcccagatgctgggaggccttccctagaacagactccaaggctggtgagggccaacagggggtgggctggccacatgattctgggcccacatccttcatgtccaagttcaagaagttgaaaagagaaaatcatctcaagggttgaggggagaagggaggccagcagggcgggggcaggatccccactggggcagactcgctccaaggtcttcagtccagcttgaacttgtcctctgattccttcagcaggtacaggctgtcatcttccagaaagctgtgggccaaaggagtagcccattgaggcacacagctctgacagctcgcatggagacaagggtggggtgcatgcaggcaaggtgggagggggcggatgggcacacagagcccccaatctcccctaaggagtgggcaaggaagggtccaaagaaggtgagcaccaggcagggggcagcacccacctgaaaaagaggacgtggacagggatggtgctgatgtgccagatggcatgggcatccaggacccagaagagcggtgggaagtcaagcagctcgagcagggacagcccctgcagcagcaagaccaccaccacgcacttgcgcacgtgaggcagccgccgctggttccacaggcaccaggccagccaccacaccacgttgaccaggcctgggtgccagtgggggcaggagagactcattccttcggctccttctccccaaggccacccccaactccatgctctctgaccccaggatcatcctcggactctcctcccagcctcctctctctcccacctcaaattcttctccattcctctaccccaagagtctctctagaacctccttctccaggaatggcaccaacctcccactcgcaccccaagctagcacttctgcagatggcccaagccccccagggcctcaccaatagccacgttggccaccaggttgtagccatagtcgaagcggatgaggctcaggtaggagacgtgcacggtcagcatgagcagcaggagagcccggaaggcactgaccacagctgggtgctgcagccccacggtcctgccccaccgtccagggttgctcagagggcaggtggcccatccccagagcagcattccctgaagcatctcctccccccaacattggtgcatggcccctgaagtcactacccctctccccaccaaacaggccacagctgggcagcaagtgctacagctccttgtcaggagccagggcccccagtcctaccccagagtcctcacccaggacagctgatgtgttgggggttggggggcgtaggtgttgggagactagtgaagaaggcccccaggggaaggctgggtgacccctttctgcccccagggttcgattttgcccctgcagccacccaggcaggctcacctgacgcagcacaggtagattgagtgtaggatgacagtggaggcacagaagtagtccattttctgaggacagggaagggtggtgagggaccagcatgaggcttcacggagaggacccgcggggatgggggcatggaggagtggcagagaggggccggggtcctgggcctgcctatcactgtttcactctgactgagtcttgtgttcacatcaccatacaagtttttaaaaatgtgcccaggaacaaggctttagggacgctggtggagggttcctgctgaggctccaggacatgaccacgctgcacagaattcagagcacagtgtggagtctgacagccatggggtcacgtcctgtggcaacccttcactggctgggtgcccctaagcatgtggtccccctgtcgaaggctcagctgcctcatcaggcaagaagagcgaatactcatccccacctgatgaggctcactgaggatcaagggcaccaacaggtttaggatgcccaccccatactcctcccagtgctcctcagagggagttggcatgaccctctagagcccctctgcccacttctgggctcctctgggaccaccctgtgcaggagggggagctggaggaatgctcacctctgtgaggtcagtgtccctggtgtggaaaactgtggaccagaaccatgcattgagggacacctaaggagggaggggctggtgagcatgctgccccccaccctgacctcaaggcagggacccccatttgctcacatccatttcacctttgggaaggggctctgcaggacaagaaatgtgcttttcctgcccctggagccctctgaacaaacctatgtccctctacccccacccagccagggtccctggggtggacttcctgccaccccaaacccccaaggccacggggggctgcagcctccacaggttccggcctggcctgggaaccagttccggtatagccaagctccctagttactcaattgctaagacaacagcccccaggggccttgcctcctcctccaaccggcaggtgttgacagcaccaccccacccgggcccaggggagccagtgacctcagcctctgggggcgggaatgaggtgggtggggtggaggggctcgagccagcttggggtgtgttccaagcagcaggggagggagatcaagcagatcccactggggcacaggctcccaggaggagggtgaaccaagcccagcttcctcctggctgggcctgcccaacccgccagaccagtggctgctcccgagcctgggaggagtagagggcaggactggaggggctgtggtgggccagggcccaggggaatgtttgaggccttcttcctggaaattagctgcgtggagagagcacaaaagttatctagcgaatgagcctaagagcttgtgggcgttggtgctggcactttcttcagggactgctgtgtccacagcaaaggcccaaactgctgaaagcagggtgggctgaagggaagggctgggaaatcgtgacaaccaaaggaacagcaggccaggccgggaatggcctggaggtggggagggatgcgctagggtgggacaggcctggcggagatgaggaaaggccaggaactgctcagttggctccaatgtaccaggaaaactggccaggcaggggacagagggagggggcaagaagctacactctgtctggcactgtagcaggcaggtcagacagtaagatgcattccaaatgcaggtctggggagctcaggagagaatgggaggagaaggggtacaggcggggcagaactgctgcacagccagtcaggttctcggggtgccaagctctggaaggcgcaaggctgcctagtgcccctgtctggcctgggctctgggctgagccttgctgcttctgctcctcttgacctggtcaaagggccctgcccttctcagcccaagcttcccccgggacaaatcatggctcaagtgaaacttcagttcctttccagcctggcgttaggtggtgtggtctagggcaggctgcttcctcctttgaggatggccactctgtcccttccaccagactcaaggctctgccctgctgcagccccctccccagagacaggcatggaggctgcacaacaggactgaacctggtggcttctcagacactgctcccacagtctgaaaagcttagagtcagcatggggagaggagcaggcttgggctggagacgggacccaggcaatcacatggaccagttctccctggcaggccaggaacagggacatccttagggaggagagtggccctggagccaatgtgggaaggagaagaggaaggcggcagggactggcagccagccaggcctccttgtcacccacagcaggaagggggaggtgagaagaggactgcaggactgagctaagtggctcagaacaccgaaagcagggggtgtgtgtgcgggcaaacatatgcgtagggccacaggatgggtggggctgctgggtcccctctccaaccgcctccctgggtgccttccactcacagagacccacctgaagcctggcctctgcacccctgaaaagcccctcccccctggggagcatcccactctgggggtgctcctcttctcaccctttcctcagatttgggaggtagtggtatcattaagaatgcaagccctacagccagactgccagggttcagttcctggctctgcatttcctgtgtgtccttgggcaagttatttagccttgctgtgcctcagttttctcatctgcaaaatgggaataatcatagttgataagggtttaatgagcaatacaaatacagcgtacagcacagagcccaggacaggctgaaacatgagtgttctctccacttgcctgaccagcacagaaccccgtcagcttcccatagaactgaggcctaagaggatgtctgcctcccactctccctgcaggccaaggatgtttaggcagataaggggtggtctcctagctgcctaggcccacctccacagctccaggctgggggaagagtgtccagtcttcacaatgagacagagtctgcattcaagtcctgcctcagcccctacgcagctgtgtgaccttggacacataacccagtatgtgtgagcctccactgcctcacctacaaaacaggttcataatgatgctcactgcacaggaggccatgaggacgaggtctgcggaatgcctggcaccaaggaactcctctgaatggctgctggttttgctgcctggtccatagtaggtgcccatcaatgtcagtttccttcatcaggtccagtagactgactctcaccacgcccgttcacctgcccctcaacttccctttccgcaagggtcacaaagtttgaggtcaaactatggggcctcagggtctctccattccagaacggagacacctcagctataggaagagcccctcctccttcctctggagccatgttcccatcaatgtgaaccgaacagatccatttctcctcactcagagtttgtcatcaagagcaagcaaaggggaaagatgggctctggaaggaaggagagttccaagatgccaaggcacggctactctcggactccttgccacgctcaagtgaaggggggcagggaggggaactggccaggagggcgacaggctgcccagcaggcacccagagctttgcgtaaacactgaggagagggggtggccaggggcagggtgccagtgggggtggaataggagactgggtggagggagagcaagaggctgtttcagtctgttggaaataagaaaatcgagacaaaaatatcacagccgtgaaactggttggatgccaagtgagccagatctgtcaggaattcgacccggcgctaagccccagtgctcggggctgtcattgacaccatggcggtggggacaagtggggcttaaaatagctcagtgtctcagaagtgggggaggcagaatgttaaatatgatgcctgctgccatcctgggctcctctggaggccacagtgtctcaccccctgcctcaggcagggcaggccagccccagctcactcctgagagaagggagacagaggtggatgcggatgggagaaggagggctttttccaagatcccagaggatcccttgatttcctgccattgcctgttccactagctcttgtctgaccatgggaagtccttcctgaagtctaaccatcattctactacagctgcaacctacctcttcttgtagtttgcttaacagaggaagagaagaatcagtccccacctacacaaaccactctacagagatggtttgggcttcccaccacttcaccctcctctctacacctgaggacctttcctgactggatgaaggcctggggaattggtttggccttctggctttggcacacagcaggggcccctactccgtgaagtcaaagagacatggtatgcggagctttggtaggctccccacccgccgcctggctgctccccagcccaagcccaggcctaaatggcaaggcaagggctgccttcttgtgccagcgttatcatgagtcctgctggagggcggggtctcctcatttcccagaggcaaagctgaggtacccttcccccaagacttagcccggagcgggtgagggaccttgccttcctatcctcaccccaacagaaatcaggagcctcagtgccccagaaggcccaggtcaaagtccactgccgcaccctccatacagctcaggatccctccctcctgcagaaactcacagggcaactgggaagcccaagagcaactgggaaagccaaactaggccatccacaggagtgtgggttctgaggctttgtttcttgaaggcctagtgagagcatgagggggtcccatgtcccagaaccccacatcccataagacacacagggcccaactatctgccttctaccaccccaacatctaacatctcctgctttttctgtttttgtttttgttttttttgagatggagtctcgcccagtcacccaggctggagtgcagtggcgccaccttggctcactgcaacctctgcctcccaggttcaagcaattcagcctcccgagtagctgggattacaggcacccatcaccacgcctgactaatttttgtattcttagtagagacggggtttcaccatgttggccagcctggtcttaactcctgacctcagatgatccacctgcctcagcctcccaaagtgctgggattacagacgtgagccaccatgcccggccatctgctgctttttctctagggtccttagtcacactggactgcaggctaccctggggaagtgtgacccccctctccaagaaggaagctgagttgcagataccattgaggtgaaaaatccaagaatcagggatgacaagaccagatctgtgaagtgacccctggcctctggcacatgttataaagacaaggggtgggaccctccgatctaagaaggctctaagcttcttcagagttcaggcagggctgtcccatgctctctagtagaggtggggacaagtgggtggtacacgctgtgggcccagacaagcagtgtccgtggaagaaccccaaaggaaagcagacaggtgtaacgtcctcagcttccctgcccttcctgctttcttagccaggactaaatttgcttcgctccaagaggcctacacaggaagtggtggctttatctcacccagcctgtgacagtgtgtgccgatgccaggccctgcctacatcagagcccctagccctcagcctggcactcaggggcctctctgctccatctactcttctactcctattcacacagctacaatggggccaaggtttcctggaatgctggaattcaatcccctgtccccacacatgtatgtgtctaagccttgccccacacatgtatgtgtctaagtcccagattaaacctctcctcctccccgggcttccctggcctggcagacttccccagttagaggacgcggtctccccacctcacgactcccagggctctctaccggagcaccccttgactctgcctgccgtctgctgcccaggctgcccagaactgcacctcccactatgcttagctccctggggcaggggattcagcctccacaagtgctaaaccctgtctccacccccagcaaatgctcaatggacactcatcacaggacacggagtggcctagaagaagagctaagttctcaggccctggagccagacagccctggacaccaaccctgtctttattccttgctaacttgttagctgtgcattttgggcaagtttttttcccctctgaatctaactcagagctcataagggtactatgaggatgaaataaggaaatgtatgtaaagtgcttcagacaagcctgtcacatggctcctgttccttaatttatcacaactgttattaatagttgttgaataggaagtattaaggagggtccatatttcccagaggtttaacagcctccttccctgacctccttcccacgcccacctcccaagtctaaggctcggcctggacttcgcagcacgccccatctatcagcttttctaaggccctagagacctctgtgtctccagattccggggtctccttcagttctcacgtgtacaattcaggacagcagaagcctctctccttcctgtgctcatcccgggaagcacaatccaagcacactatctcccagttctccacctgcccctccggctactccttctgtctctgtgtctggctcatcttcctttagccagccattacattttggggttccccagggctttgccctagatcccttctcttttcactaggctctcctggggtgatctcatccacacccacagcttctatcactgtcttttttttttttaaagacaggtcaccctttgtcacccgggctagagcaacaagagtacagtgacaggatcacagctcactgcagcctcgacctcctgggctcaagtgatcctcccacctcagcctcctactagctgggactacgggcatgtgccaccaggcctggcttattttttttgtatttttggtagagacggggtttcaccatgttgcccagggtggtctggaacttgtgagctcaagcaatccgcccacttcagccttccaaagtgctggaaccgcaggtgtgagccactgcgcccggcctccatcactgtcttataagcagaaacacaaggggtcatcccttactgctctttcctcatctaatccactcttgaagtttatcagcatagccaagatgttgaaagtgtggactctggagccagatgcctgaattcaaaccctggctcggtgatctgtggctggacttaaccttttcagtccttggtttcctcatctataaactggggatgagaataataatacctataagctgcgttaaacaaaaattacgggaggccattgttctggattgagcccccgcactagacccaagagaccagacaaaaatgaagtcactcatgctaaatgccacataatcaaactgaaactttttttttttctgagacggagtttcactgttgttgcccaggcgggagtgcaatggcgtgatctcagctcaccgcaacctccgccttccgggttcaagtgattttcctgcctcagcctcccaagtatctggtactaaaggcatgcaacactatgcccagctaattttgtatttttagtagagacagggtttcttcatgttggtcaggctggtcttgaactcctgacctcaggtgatccacccgccttggcctcccaaagtgctgggattacacgcctgagccaccgcacttgatcttcaaactgaaactttaaggtaactgataggtcccaaaacagaccactttttcctgaaaacaggagagtccagtctacccaagtaaggaagtctcctctgctttaacccttataaaaaaaaacctgatgtgggccgggcgcagtggctcatgcctgtaatctcagcactttgggaggccgaggcaggcggatcacgagatcaggagatcgagactatcctggctaacatggtgaaaccccatctctactaaaaatacacacacaaaaaattagccaggtgtggtggtgggcgcctgtagtcccagctacttgggaggctgaggcaggagaatggcgtgaacccggaaggcagagcttgcagtgggccaagatggcgccactgcactccagcctgggtgacagagtgagactctgtctcaaaaaaaaaaaaaaaaaaaaaaaaaaaaaaaaaaaatctgatgttaaccaatcaggtttctttctattgttctgtttcctggttcccaccttacaaaacccactgttctgctattgcccaatggaaacttgcattctattttgtagaacggaggctgcaccaattcatgaatcacaaattaaagccaattggctctataagtaagtttgctgtaatttgtcttttgccacttgttatggatgaacaagcttaatacttataaaatgcttagagtgatgcctggcatacagtatgagctatgtatgtatttgttaaggaaataaatttttaaaaagctttaatgttacctccaaaacacagctcaagtgtacttctcttcaatgcccaagacccatgccacctctctagtctagctactgggccctgtgctaaaactaccaactggtctactgcatccactcccgcccccttcaatctgttctctacacagtagccagaatgagctttccaaagggcaaatctattcatgaaacaacttttctcctcaaccctcatttaaaatccctccgtaggccgagcacggtggctgatgcctgtaatcccagcactttgggagggtgaggtgggcggatcacgaggtcaggagttcaagaccagcctggccaacatagtgaaaccccatctctactaaaaatacaaaaattagccaggcatggtggcacatgcctgtagtcccagctgctcaggaggctgaggcaggagaatcgcttgaactgggaggcagaggttgcagcgagccaagatagcgccactgcactccagctggggcaacagagtgagactttgtctcaaataaaataaaataaaataaaataaaatccctccgtacttcctgatgctttgagagtcaagatctccaatgtgaggctctccatggctggccccatccaccacccatcagtccgcccagctcacacccactctctgatttcctgcatgtcaggctgcctggaatgaccctccctctctcccacctgggcactttctgagacttctctttagaagccttcccttactcttctcaaatttacctagttaacattcatgcatccttcccaccttacctttaatgccccttccccagggaagccttccctgatggccccatgctggtcttggtctgcctttacacacacccctgaagcacctctccccgactgcactttttcatagttgtactcttacattcaattgtatgattagcaccagagggcagacttctggatctccagcaaagtgcctggcatatagtaggtgctcaacacctgagtgaatggcttctgtgagagcaggaaggtgagtgaatggaaattttttccttaaggcttacaggggcagctccgacctagagacatccgttgcaacctttcattctcacacccttcccaaggccgtcacggtccatatctgcaccccagtctgtgcttatcacacaataccaggccctgaatacagctctttagaccagccgtactgtgaagctgacagccctttctgcacctgcagatgtaaccatacctgggcttctccagggatggtctaagcctaggctgagctcgccaggtgcagtgactcacaactgtaatccctgcactttgggaggccgaggtgggtggatcacctgaggttgggagttcgagaccagcctgaccaacatggagaaaccccgtctctactaaaaatacaaaattagccaggtgtggtggcacgcgcctatcatcccagctacttgggaggctgaggcaggagaattgcttgaacccaggaggtggaggttgcagtgagccaagattgcgccatttgcactccagcctgggtgacacagtgagactctgtctcaaaaaaaaaaaaaaaaaaaaaaaaaaaaagactaggctgagctctacacagagactatggctgtgactccccaccaggcctgggctggaattgagattgctccaagtcctccagaagggcccttggaaagacctgtggtcccagcatcctctttagccccccatctcccctctgtgtttgtaaactgtcctactgggtcttttagtggcttccttcttcaggacaagaaaaatgcccttctttcctctctccttcccaaacagcctgacctagggctctgctggaaaggtaaggcccgattcagcaccctccctgttttctccccaggctttaccaccctgcagctgcaactttagccctgggaaacagaggggaagctggtaagtagaagccctgttgggtgttaatagggatgtagagctccaccttcctagataagaggagacagcaggagtcctgctaggttacctacccaggcgaaggccacacaggtgtggtacatgggggaggaggctggcacgaaggtgcggtagcggcagagcatcaccaggctggccaggccattgagaaacgaggccacggccgatgccggctcttgaaagaacaggaaccgggagaagggccactgaaaaaggagcagatgaaggaggtttgaagggcaggcaaccctcaactggcccagtccacctattcttgacatgctgaagcaacaggtcctcagctgagtcctcagctctggagtttggccaaagcctcaggttcagtacctcttcagactaatgagccaccctccagtgcctagttaagagttatacccccatcctggccagcaggcacagcactgtaagccctgatctctgggaagaccagatgggtcagggtagatgactcagtatggcctggtggaaacagcacagagttgccatccagaagacacaggtcccaacccctcctctaccactgaccacggtcctttgagcctcagcttactctgtgaaaaactggggtgaatacttcctgccaacctcaacaggccagaatgagataatactggattgaaacgtaccagcaggccaggcgcggtggctcacgcctgtaatcccagcactttgggaagctgaggcgagagggtcacaaggtcaggagattgagaccatcctggctaacatggtgaaaccccatctctacttaaaaaaaaaaaaaaaaaaatacaaaaaattagctgggtgtggtggcacacacctgtagtcccagctacttgggaggctcaggcatgagaattgcttgaacctgggaggtagaggttgcagtgagccaagatcatgccactgcactccagcctgggcgacagagggagactccatctcaaaaaaaaaaacaaaaaacaaaaaacaaaagaaagaaaggtaccagcaaactgtgcctcgctagacaagctgaagcatattactgtgaatccagacccctactggagaagcaacaggaaacaagccacagtaggtaagggaatttgtccctgcagtaaggtgggcatctcaaccactctaagaggcccagcaccactctctggggagactccaaagccttccagatattgctactccaaatccagaggcaggacacatgggtcctatccaattctatggaaaccagcagattttggggagaacaggtagctgccccaaacacacacgcattaccccatgcctcagactgcttggacagtgtggtccaaccagggggtatattactcctaccacgctactaccatatgcctaccctgaccctccaactcaccttgccatggaactgaggcactttgtgaccttcctggaggtagagcccaacggtgacccacatacactcatacttacagtcgtcccgacaggtccagcctgaaacagacaaatgtggcctggtgaactccccagcacagagaggaaagagagagcatgaatggggtccaagcgcaaatgtaggccaagagggcctgtaagttggagagaaccaggagaaatctcaaaattctagcttcccctttgaatgaatgagagatgatgagatgtacacataggggaaggtgtatgtacgtatgtatgcatattttagtgagcaattagagatattcgtcttttttttgtttgtttttttgagacagttttgtttttgttgcccaggctggagtgcaatggtgcgatctcggttcactgcaacctccgcctcctgggttcaagcgattctcctgcctcaggctcccgagtagctgggattacaggcatgcaccaccacacccaactaattttgtatttttagtagagatggggtttctccatgttggtcagggtggtcttgaactcccaacctcaggttatctgcctgcctctgccacctaaagtgcggggattgcaggcacgagccaccgcacccggcattttttttttttttttttttttgagacagggtctcgctctttcatccaggctggagtgcagtggggagagcatggctcaccacagccttgacctcctgggctcaaacgatcctcccacctcagcctcccaagtagcgagaccacaatgtctggctaattcttttattttttgtagagaaggcatcttgtcatgttgcctaggctagtcttgaactccagggctcagatgatctttctaccttggcagacatttcctctccttttgctcaagtccatcaagatgttggcatctgatgaactcatctatggaaacctgggtttatatttgtccttcctgaatataggatttgctcttactctcctggaaggagttcttgctatcttactcccttcctatgaaaatgaagcccaaattcttcaacctgacttttgaggctccaaattgcctttccaaccgtattggtcactactcctgttcatgtaccctgctccctgagtaaataaagctcctggatgtgcccacatctgcccagggcatccattctctctgttccctctgtctggaatgcaaagtggtataatagtaaagaggacaagcttgtggtcaaacaggccagaactggaaactccactttactacatactggctgtgtgaccttgggcagggcatttaatctctctaatccccatctgtaaaactgggattagagaaactatctcaaagggtgtgataaaaattacttgacatattgtgacacctgtcacacagtgagtgctcaatacgttggttctttgcccactatggtccaaatcgaatgtaccagtccaaagtccctccttcaaacaaaacgttccaagatgatccctgcccccacgtcttcaaagccggaactgacaccttcctatcccaaatgcttcctaatcaaagagtctttcaggggctcaaatcattctctgccttgcacttgaaaaggctcatgtccccgtggggactgtgagtcccaatgggcgggaccctggtctgatttctgtgccattcctagacattgtggcccgaatgtatttaataaatacccttttgactgaacaaataagtaaatgaaagcttctgggaaagtaagagaggctggtaaggctctcatcaccttaggggcttcactcacattcataagagacctcgtggggaaactaaggttcagggattgcagaggcgtattgggggcgcagggggcgggagcaagacaaatgggcggggcttaccgtgggggtggggcttacctgctagactcatgtagattggctggcgggagcggaagtgattcagagcgcccccagagcagttctgctcttcgcactgcagtacgcagtcgcggtacaccggctcacggtcgccctgggagccgctcgccagcgccgctgccccagctagcaggaccaaccgcgccgccaggccggccatcctttctccctggctcgccgccgggggaggagcttaggagtatgaagcttccacttccggagtaaccggaagttcctgtgttctttattctactctccgctgaagtccacacagtttaaattaaagttcccggatttttgtgggcgcctgccccgcccctcgtccccctgctgtgtccatatatcgaggcgatagggttaagggaaggcggacgcctgatgggttaatgagcaaactgaagtgttttccatgatcttttttgaggtagggctgtttactgtcaccacccctgtcggattttacttcctaaacgtacctgtaactatccacttctctccatctcttctggcaccaccctggttaaagacaccatcatgtgtcgccaagacagccgcagtagcttcttaatggctctccctgcctctacttttgcctcttccaacctgcgctccattttgaaaaattaaaatttgcccatatcactttttttttcttaaaattatttactggctcccaattaccttgggtaaaatacagtctccacaaaccctgcctgatttggcccctgtccactggtctccctcactcccttgctccagacccgcttcagagggctatgtccctcaagcttcctgactgcctggcctggtctgaatcactcactcttcttttttcttctagtcgcaattgaagtaccacctcccgagggtgattgcttccccatgcggggtagaacctttgctgtcctgttcaccactctacctccagcacagaatttggcttatggtaggcgctaactgcgtttgtttgttcttctgtttaatgaatgaacagcatacatcaacataagaacttgacaaatccagggctgtaaaatcatcagtatggttctgcactgagatcggagagaagtaatatttctaggaaaattaggaaccctgggaacaggacgcttgctttagtatcctctccctgctcacctcccctgcactcccatcagcaccgacccacacccaatctcatagaagccttgtagctaaggatcaccctttctcctcccccactctcctcaccccttgtcaacttttctttttcgtcctgggggttggaatgagtaagaagtagcctgggattccattcactcacttaacaaacatttctgagtccttagctctagcaccttgctaagcaaggcaaaatctccaggaggcaccattcacattgcattttctgtgaatggtgctctggggagcagcattcacattgccttttctgtgaatggcaaattcttccagttaaatataacatgaatagtgtcccctggagttgaccacccaactgatactgactgagaagctgaaatgaacaaaacaaccccttagccctccaggagctgaccggaaatccagtgctaatactactttgcatcttacagattagttcttttacaatactgtttttttttcttttttcatttcattttgtcctttctgtgactctgggatgagtctttttatgaggatcctcatataaagatggacatttaggattaaagaggatgaaatcctgacaaaatagggagtctcccctttagaaaattcctaagtaaggctgggggtggtggctcacgcctgtaatcccagcactttgggaggccgaggcggacggatcacctgaggttaggagtttgagaccagcctgaccaacatggagaaaccccatctctactaaaaatacaaaattagttgggtgtggtggtgcatgcctgtaatcccagctactcaggaggctgaggcaggagaatcgcttgaacccagggaggcagaggttgtggtgagccaagattgcgccatcgcactccagcctgggcaacaagagcgaaactcaaaaaaaaaaaaaaaaagaaaaagaaaattccaattttgaaggcctcatcctatattatgtcaaacatactgaaatgcagtaacgccccacattaaataagatttataaataactatacatatatataattcaatctaattgctgttaatagttgacatattgctacatttatatacatttagttaaaaaaaattttttttcccagacagcctctcactctttcacctagactgaagtgcagtggcatgatcacgactcactgcaacctcaacctcccagactcaagtgatccttccatctcagcctcctgagtagctgggactgcagcatgcgccactatgccctgctaatttttttaattttttgtagagacacggtcttgctatgttgcctagactggtctccaattcctgggctcgagtgatcctcccgcctcaacctcccaaagtgctgggattacgggcgtgagccatgccacacggccataaaatattaattttcgcagctttcttatattttagaactaacaatggaaatttgttcgggtctaaagtatttcagaggtccttgaaaacccatgcctacatacctgatggaaaaagcaatcctaggttaatggtggaagtgggagtagagacttctgttctgttgacttcttggaagatggggtactgtctctctgggacagctcttgagaatttccctgccagcacagccccagataacaatctctagatggcgattacctggcctctcttcccaactttctagcctggagcccctagttctcccctgagcctccttagcttgtccttcttcctaacttgtatttggcttcagatgtgatccacagtctgaaaagtcactaattcattccttcaactcaggcttattgagtcctcctgtgtatcagccattgtactcatgggggaaaaaaaagacaaagcatatgttaatagtagagtgtgctggacaggcacagtggctcatgcctgtaatcccagcactttgggagggcgaggcaggtggatcatctgaggtcaggagttcgagaccagcctgacctaacatggagaaactcctgagatcgtgccattgcactccagcctgggcaacaagagcaaaactccgtttcaaaaaaaaaaaaaaaagtatagtgtgctaaaggctcaacggcaagctgaccatgttcttagatcaaaattggtagagagtctacaatgtgggttccttattcatcaaatgtttattaagtttaccatgtgcaagtctctgggaacagagtgatgaacaaggcactgtacttttcatggtcagaggagggaaacaggccataaacaagtgtcaaacaaaagactgaagccaggtgcggtggctcacatctgtaatcccagcactgtgggaggccaaggcaggcggatcatgagatcaggagatcgagaccatcctagccaacatggtgaaaccccatctctactaaaaatacaaaaaaattagctgggcatggtggcacgtgcctgtaatcccagctactccggaagctgaggcaggagaattgcttgaaccagggagttggaggttgcagtgagcctggattatgccactgcactccagcctggtgacagagcgagactccatctacattaaaaaaaaaaatatatatatatatatatacacacacacacacacacacacacacataccctctaacccaggaatttcactcctaggtatacctacataagctccagtatacctaaacaagtgcaaatttgtttaagtacagttatttgtggtagcattagtcattgttttcaatagcaagaagaaaaaggaaacaactaaatgtccatcaatagggaatgaattatattaatggagggagagccatacaatggaaggctgaacagaaattaataggaatggggcagatttgtaatgtactagcatggtaaaaccttcatgatagatatagatatagatatagatatagatatagatatatatacatatacatatacatatacatatacatatatatatatatatatatatatctcttgtgtctcagcctcccgagtagctgggattacaggtgtgtgccaccacatccggctaatttttgtattttttagtagagacagggcttcaccatgttggtaaggctgtcttgaactcccgacctcaggtgatccacctgtctcagcctcccaaagtgctgggattataggcatgagccatcacacctggccaaatatttttgataagtatcaagtgcacagtgcagaacaaaatatgtgtgtgtgtatgcatgtgtatgtacacctatacacttatatacagtaccccatgtgaagaaaaataagggtacgtgttatgcgcgtagtattatggttgttatttttgagaatatatctagaaagataaaaaagaaagtggaaatagttcttgcctctggtgggaagtgggactatgtgcctgatcaatagggaagtaaggaacactttttttttttttttttaaacggagtttttgctcttgttacccaggttggagtgcaatggcgcgatcttagctcactgcaacctctgcctcccaggttcaagcgattctgctgcctcagcctcctgagtagctgggattataggcatgcgcctccacgcctggctaattttgtatttttagtaaagatggggtttctccatgttggtcaggctggtcttgaactccccacctcaggtgatccgtccgcctcagcctcccaaagtgctaggattacaggcgtgagccaccgtgcctggccaggaacgctttttatttttgtacctttaaaagtgtgtaccgtctgtgtatataatcagttaaaaacaaagaaaagctgagtgtggtggctcatgcctgtaatcccagcccttaaggaggccgaggccggcggcagatcacctgaggtcaggagttcaagaccggcctgaccaaaacggtgaaaactcatctctacaaaaacataaaaattagccaggcatgatggcaagtgcctgtaatcccagctggttgggaggctgaggtgggagacttgcttgaacctaggaggcagagattgcagtgagccaagactgtaccactgcactccagcctgggcaacagagcaagtctctgtctcaaaacaaaaacaaaaacacaaagaaaaaatgtaaaacaatttcatgcagtagcaagcatcgagttaaatacagttgacccttgaacaacacaggtttgaattgcacgggtccatttatactcacatttcttccacctctgccacccccaaaatagcaagaccaaccccatctcttttcctttctcttccccctcctcagcctactcaatgtgaagatgatgaggatgaaaacctttgtgatgatccacttccacttaatgaatggtaaatatgttttttcttacttatgattttcttagtagcattttcttttctctagcttcctttattgtaaaaatacagtatataacacatatcacatacaaaatgtgtgtaaatggactgtttgctattgataagtattctggtaaacagtagactattagttttttttgttttgtgacaaggtctccctctgtcgcccagcctggaatgccgtggtgtgatcatggctcactgcagccaaaaacttctgggctaaagcaatcctctactaaaaatacaaaaattagccaggcatggtggtgcgcttctgtaatcccagctactcaggaggctgaggcaggagaattgcttgaacccgggaggcagaggttgcagtgagctgagattgcaccgttgcattccagcctggacaacagagcgagactccatctcgaaaataaaataataataataataataataataataataataataatagggctgggtgtggtggctcatgcctgtaatcccagcactttgggaggccaaggtggacagatcacctgaggtcaggagtctcaattaaaaaataaataggccgggcacagtggctcatgcccataatcccagcactttgggaggccgaggtgggcagatcacctgaggtcaggagtttgagaccagcctggccaacacggagaaacgctgcctctatcaaaaatacaaaaattagctggatgtggtggtgcatgctataatcccagtaataccagctactcggaaggctgaggcaggagaatcactcgaatccgggacacggaggttgcagtgagccgacatcatgccactgcgctccagcctgggtgacagtgagactctgtctcagaaaaaaaaaaaaaaaaaaaaaaaaaaaaaaaaaatatatatatatatatatatatatatatatatatatatatatgtgtgtatatatatatatatacacatatatatgtgtatatatatatacacacacacatatatatgtgtatatataaaataaaataaataataataaaacatttactttggctgctgttgctgcggggagaattgcagggtgtcaaaagtagcactggtggaggggtagtgatcaaagtctggtgctttagcccaaaggagaaatgatagagactcagactagctggtgatggaggtagaataagcataaatgtatcaaaaagaggagttgatagatcttaaagaatgattggatttgaagggcaaaggaagagaagaatcaaccaggtgggttcagtgaatgaaaccatcagaaacgaattgtcccctgaaatcaagactttgtgattgccatagttgtatgcttctcaaaggttcctcgtctcctcttccttggaccaaaagtcagaggcaagaatgccctcattcataccccagtggtctatacctccagcagcaagtcgagtgagcaagtgatgtcctgaaaggcccagtggatcagtggaatgaagcgggcaggaagacttagtgctcctgaaacaaggaatccagaatccaggagaaggatggctcagtggggctttcaagggacaagtatgggggttgaaggggtcactgtccctataccaaatccgaaaatattgtgaccaggaaccattctgtccaactcttctatttcaggtggcaaagcaaagctatattcaagaccacatgcaaagctactccctgagcaaagagtcacagataaaacgggggcaccagtagaatggccaggacaaacgcagtgcagcacagagactcagaccctggcagccatgcctgcgcaggcagtgatgagagtgacatgtactgttgtggacatgcacaaaagtgaggtgagtcgcaggacagaagagtgctttttgtttcagcagagcagcctggggagagataaaagctactcctggggcctgggcctgcattcctgagatgtgggtaagaggggcccagggtcagagtgtctggcaagcttggctctgcccctttgctgtcctggagactagggctaatcctgggctcagggagtggcctccccatggttaggatacaagtgctcatcaagggccacccctaggaaggaccaattttcctatcagaagcttctaagttatcctcctttggcccaaagggacacctcaagcctactctgaggaactctttccaatgaactaattcctacagtcacttccccagcaacctgtgcctcagcctcaaggcactgtggggtaggcctcagtttgtggcctggacatcggactgtggaccagacgactcctcccgatttctgtttgttttcagtcctctgaccccaagctggctggtgaagtaggtagagggaggagactttggtgcatgcatacacacacacacacacacacacacacacacacacacacacacacacacacacacgtctcctgtgccccccagtctccatggctggtcaatgattgactggcatttcacaggccgctggttgcagccccagcctgttgacttagaggtcaccctcggaagctagagccctgtcctgcctcttcagtgtcagtggtcactccactgcccacaggctggggtcttgggcaaaacacacgcatctgccctgatctgagtttgctgccctctgtcccgcagtcagccccactctgttcccactccctctccccagccccctagctagacccctctcaccagcacccctttcccttccctgagggtccccctcgctgtctttgtccctcagacatcctctttcctgggctctcctgccaggccctgctggagggacagttaaggaggaaatcgaatcagcagcgcccacccctgccccccttcctctcctcttgtcagacaccagacgaggttttttcctctggcttcccagctctgaatgggctcattctttttcagaggctcggcccctctcgagcctcctccccagggcgtgagttctgaccccagctcctccccccatccccactccagccccctctccagcttgctccaccctctctaccgcccaccgggactgggcattgtctgccagtccgggtttcttcctgggatttgggatgcagagaggatgggtttgcttgggcgggggggtggagagtgaaggggggaagcaggatctttgtagagggagggacctacagttacctggacttctttcctctgtctcccctcttggtacccttgactggggctcttgagggtaatgggtgaagccaaatctgccatggctcagttcccagctcagctctgtgaccttgggaaagttcctttagctcgtggaatctcaaggctcaaggttcctcttctgcaaaatggggaatgataacacctgcctcctctggagtcttggggactcagtgttctgaggaacgtggctgtaggtcagagtggcacagagtagggtccaatgaagcatggcgtccacagtagctttcctgactggactaacctttccggacacaacagcagggcaggggtggggcctggggagaaaggacacctctaaccctgatcctaacatcccgatggcctctaaggctgcctgcacactcatccaggtgcaagccctccaaggtgtggtgtgatgaaccagtgactcctggagccaggtcagcgcatcctcttcccgcagggctgtaagctgcaggactgagaggcaggttgaccaggtcctgggctggatgatggggtgagagtaaggggtcagttttgatacatgcccaacttttctctctagccctaagacatcctgggcaaattgcttacctcagttcccctgatcctcaccctaaccctaacaccagctcaagagaaaatagggatattgatggccatccagaagggctgctgtgttccatacacagcaatatttctcgaatgtttgtgacagcggtccaaggaataagttaattttacattatcactctggatacctgtacaaaactccaccttatccttactatatgaatgtgctagggttgtttttttgttttgttttttttttttttttttgagacagagtttcgctcttgttgcccaggctggagtacaatggcgcgatcttggctcaccgcaacctccgcttcccaggttcaagcgattcacctgcctcagccttcccgagtagctgggattacaggcatgcgccaccatgcccggctaattttgtgtttttagtagagacagggtttctccatgttggtcaggctggtaccaaactcccgacctcaggtgatccacctgccttggcctcccaaagtgctgcaattacaggcatgagccaccgcacccagccgtgctagggtctttttctgttcaattcctttctctctcttgctctctttctttctttcaatggagtcttactctgtcacccaggctggagtgcagtggcaagatctcagctcactgcaacctctgccctctgagttcaagcaattctcctgcctcagcctcccgagtagctgggattacaggtgcctgccaccacacctagttaatttttgtacttttagtagagatggggttttgtcatgttggccaggctggtctcgaactcctgacctcgtgatctgcctgtcttggcctcccaaagtgctgggattacaggcatgagccgccatactcggccaactttgtattactttcttaaagagagtttcccaaattatataagcttcaggccccacaaaacctagatctgccccagtataactaaatctgggaccatttattgagcaattattatgtgccaagtattgcgctgagtgcttccagagcattatctcctttaaccccagcatagtatgtcagatgctgttttacagatgagccaactgagaccagagatgctcagtcacttgcccaaggtgacatgactgatatggaatagagtcaagatttttttttttttttttgacacggagtctcactctgtctcccaggctggagtgcagaggcgcaatctcagctcactgcaagctctgcctcccaggttcacgccattctcctgcctcagcctcctgagtagctgggactacaggcacccgccaccacacctggctaattttttgtatttttagcagagacagggtttcaccgtgttagccaggatggtctcgatctcctgacctcgtgatctgcctgcctcggcctcccaaagtgctggaattacaggtgtgagccaccgcgactggccagattcaagatttgaacccaggtcctcttggtcccagaggcccctgtttctcaactccctaggatggcatagcaacctgtcccacaagaggtgcctgctttaagtgtgctcagcacatggaagcaagtttagaaatgcaagtgtatacctgtaaagaggtgtgggagatgggggggagggaagagagaaagagatgctggtgtccttcattctccagtccctgataggtgcctttgatcccttcttgaccagtatagctgcattcttggctggggcattccaactagaactgccaaatttagcacataaaaataaggaggcccagttaaatttgaatttcagataaacaatgaataatttgttagtataaatatgtcccatgcaatatcttgttgaaattaaaaaaaaaaaaaaaagtcttccttccatccccacccctaccactaggcctaaggaatagggtcaggggctccaaatagaatgtggttgagaagtggaattaagcaggctaatagaaggcaaggggcaaagaagaaaccttgaatgcattgggtgctgggtgcctccttaaataagcaagaagggtgcattttgaagaattgagatagaagtctttttgggctgggtgcagttgctcgtggttgtaattccagcactttgggaggctgaggcgggaggatcacctgaggttgggagttcaagaccagcctcaccaacgtggagaaaccctgtctttactaaaaatacaaaaaattagctggtcatggtggcacatgcctgtaatcccagctgctcgggaggctgaggcaggagaatcacttgaaccagggaggcagaggttgtggtgagcagagatcgcgccattgctctccagcctgggcaacaagagcaaaagttcgtttaaaaaaaaaaaaaagtcctttcgatgtgactgtctcctcccaaatttgtagaccctcttaagatcatgcttttcagatacttcaaagattccagaagatatgccccgggggtcctggaagccacaaggtaaacacaacacatccccctccttgactatcaattttactagaggatgtggtgggaaaaccattatttgatattaaaacaaataggcttgggatggagtaggatgcaagctccccaggaaagtttaagataaaacctgagacttaaaagggtgttaagagtggcagcctagggaatttatcccggactccgggggagggggcagagtcaccagcctctgcatttagggattctccgaggaaaagtgtgagaacggctgcaggcaacccaggcgtcccggcgctaggagggacgcacccaggcctgcgcgaagagagggagaaagtgaagctgggagttgccactcccagacttgttggaatgcagttggagggggcgagctgggagcgcgcttgctcccaatcacaggagaaggaggaggtggaggaggagggctgcttgaggaagtataagaatgaagttgtgaagctgagattcccctccattgggaccggagaaaccaggggagccccccgggcagccgcgcgccccttcccacggggccctttactgcgccgcgcgcccggcccccacccctcgcagcaccccgcgccccgcgccctcccagccgggtccagccggagccatggggccggagccgcagtgagcaccatggagctggcggccttgtgccgctgggggctcctcctcgccctcttgccccccggagccgcgagcacccaaggtgggtctggtgtggggaggggacggagcagcggcgggaccctgccctgtggatgccccgccgaggtcccgcggccggcggggccagaggggcccggacgagctctcctatcccgaagttgtggacagtcgagacgctcagggcagccgggccctggggccctcgggcgggagggggcagttacacggcagcggctcgagatggcccatccaagagactggcgctttccaggctccgaggggctccgggaacttgtcaaagaagttctctgaaattgttcagaaagttttcccgcaaagggtgtattgcgtagagcgcgcgcgcgcgtttccccccttcttgagccccctcaagctttctcaaagcctttccagttggcagcctccgcctccggactggcctgggctggattccttgggggggtcctctgccctgcccctcctccagcccctccccgctccccttcagacgattttggtttggttgctcctgcttctggcggggtcgggtgtgtgtgtgtgtggtggagtggagggtggcatagcaacctgtcccaaccagagccggggaggaaagggtggcccggagggtggcctcttgctggggtctgggttgggggcgggggagacgtttgctttgaacagattcttggggccagcttagggactgtgctctgtgacttttggagcgcgtggaccatggaggggtgggggtgggtttcttggggtgtaaagtgggagagttcccagagaaggaagctaagaaataaggccagatgggagcctagggagggctgcgttgttctgctgccttttccttggtgctgtgcgtggggaagggtgagtgggggcagtgtgtatcctgacccatctgtccacctgtgtgcattaatcataaaagctaacatatagcctgggccaggtatactctgccaggaactgtttgtggtgttttgcatgcattctcctttaatcctagaacacccctatagtggaagttctgccagcattctggactgagtagcagtccagaggttgagtagcagctagtaagtggtggggtcaagatgggaccccaggcagtgcgacccccaaccatgcattcgaaatcgctatatggatgagtgcacctggagcaatgagggacactgctccctgagtcactgggctgcaggggagacaaaatgaaagtgttctgggagtcgtgggtggtctccataggtcagagggtctggggagggagtgggtgtcatcgtggctgtgtgttgcccgaggggccctctgtgagtgagtgcatggccgtgttatctctgcaggtctacgccagggtgttcctcagttgtgtggtctttgtatttgtgtgtctgggctttgtgttgccaaacagcagtctctctgctgacttggggacacaggctgaactctgtcctctgcaggaactcccttaaggtgctgggccagatctgccataaacagagggaggtagccttctatggccacgccttcttgctgaggaagaaggttcctctcttccagggagtacatccttgccctccctgtttcccagacaagcatcttcacctctcatcttctgatgagaagggtgaggccatactgagctgtcaggctgagctgctgcccttcctcaccttgggctgggagttgatcagggaatggcagttgctgcagagctggatttgagggctgggttctctggatggggcctcctcatgtcctcacccctcaacctgcactattgattgtgttgtgcaggagttagttaaaaagtcattgcacagcctgggcaacaaggcaaaactctgtacaaaaaatacaaaaattagttggatgtgattacacgtgcctgtagtcccagctactccggaggctgaggcaggaggatcacctgagcccaggaagttgaggcttgcagtgagctgtgattgcaaatgctctccagcctgggtgacagtgtgagactccgtttcagaaaaaaagtataccacccagctgcctccagcacccagattttacccaaggggtgaggtctggggcaggaatgtgggggaaggggaggcctagggggagccccagaggggtcaggatttttctgaaatcctttcttagaggtatgggttttacaaattgcagcaaatacatccttttaatcttgcagaactccttcatattttaattccagtatgattcttccaacagcctcctctctttactatacttggggaaagtactcattttatttgtcaagaaaaaaacaattgaaaagatagggatcaaatgtaaaaagaaaaaatacgtggcattccaaagtcaaacacaaagcatgtttaattttctcgtggtttgggattacccatattcctgctgtatgaacctgtcttgtcttaacttttaagaaatgtacggtgtacttcctatatgctaggtttttatccatgctttcatttaatctctgtgacagtcctgtgaagtaggtgcacagatgagaaaatggaagttcagagaaatgaagcaacttatccaaggctcccagctacccagtaatgtccagggaatttttggactctgaagaggaggcattaagaggtggttagagtcttattccagccaacaataatgggttgaacaaagccttaggggcaggcaggtggccagatgggaggagaagcgctcctcttgttcaggcgaatgacctttccatccacttctctaggctgtagaaagtggagctgagctgggggccctgaggttccctcttgacttcagagtcctctcccttcctgtccagccaatgcctgtcttccttttgggccctaccagcatgacagggggctgcgggcaggaggggacagaggccacgttgacacacagggctgtgggtgagagagacagctgaagtgtcagcgtgaggggccagtgtggggctgcggctgggagggctggggtggggcccagggtagttgtgcctgtccttgggtgatggaatgatctggaaagagattccttccctgccctccacctgtgagaagcccctctagagtgacatctccatcttatgtttggccacccatcctccccctgggaagagagccgaggtggggtaagggatgtgtactctttcaaggagtgggagaattattctagcgaatgtttgtgttgtcccagttctgtttacaaagcctcgtcatgtttacagatggctgcgcaattcattacctcatttaactctcatgtacctcctctgagggagtaagagctgttacagccaagtttaggtcagtaaatattcaccaagttgcaggtactgcagggcatagagatgaatccgatttagcttctgccctggaggtctgggaacttgctcaagatcactcagtgagcagctgagctagggttctcaactaaagaccctgggcccaggccctggtctgatgtcaggcctgatacaccaggtgtttgtggtcggggaatcccagtgtcacttgaatgggctgtgacattatgggtctgggagagctgagctttggggacacaggtcattttactgtagtattcatggaaaccaagggaagtattggcttttctgctgtgagcaagaggagcagctggggctgcaagctggtggggaggagagaacccacctgagagaaacctcaggactggggtcaagtcctgaccaccagagtccagagagacatgaaggactgtgaccagctctgagcagagagatggattccatgacctcaactggtcccttttgttcggagactcgtgactggacttcattcatccactcattcattcattcactcagcagacacttatctagcgctccctgtggctggtcctgcctcatactgtctttgctctggagaattggaggttggggttcctgaggggcagggtcctggagacaaggacactcctgggtagaattaggacctaccccccaggaaatcaacggggaccaggtgccgtggctcacacctgtaatcccagcactttgggaggccgagacgggcggatcacaaggtcagcagttcaggaccagcctggccaacatggtgaaacccgcctcaactaaaaatacaaaaattagccaggtgtggtgtcaggcacccgtaatcccagctactgaggaggctgaggcaggagaattgcttgaacccgggaggcagaggttgcagtgagccgagattgcgccactgcactccagcctggcgacagggcgagactccatctcaaaaaaagaaaaccaatgggacagggcagatatggggacaatggtaaggagatgggagagtgggagggaggtgtcaggaagaccttcttgacttcatgtaggctggtgggggtgttagccagcaagcctccagttccctgggaaccgttctcagggtaccaattttaccacctgtctgcaaacactttaagattcttaatcagactcaaattggccacaaatcaggtaaacaaactcactagtggggtggggctaccacccgttctgaccctccagcccaacccagcccagccaccctgccctccgtagagcctgtggtgtttatcggtggcattgggagaattagtgtgtatttatgttggcgtggggtgtggggtggatttgtgtgtgtgcagttaggcctagtggaaggaatgtgggatctgaaggcaggccagcctgagttccagtcctgcctgttgctcacaagctttatgaggcgagagctaacccctgccagcctcagttgtcttctttgcaagatggaggttgcagccccagtctctggagcatgttatgcagatccaccgagagtgcctgccaggcacacagtaggtgctcagctcagttactgtggcggcccccactccccattgttgttgttttcctattgcctggcggccacagctggtatcccttgaaaagggctacagggggtggagtcggaccctgccccagccctgtggagaccctgggcttgggccagggcctggggtctgggcctgcagacagctgtgtctataaagcagctgaagggctgaggccgggggaggtcctggcagcagggcgttattttgggcctggcctgccacccccagctcctgtttctcttgggagtctgttgggggaggaagtgtggggaagaggagggggtgcaagtgggtgaggcatggagtggggaggcctccctcagggacatggacccttgagttctatttctgttcctccctcctgttcctccctctttgtccttatctgcctagagaggtgggaatagaggccattctgagtatcactaggagaccaccagtttgtggccactggccactggcccaggcagggaacctgggggcttgccctaccagcctctcccagcaatctgaaggcagggggtacctcgtattaccccctaggatttgaccttaggctccaacttgctgggagagcagtgcctctggtgtcagaccccaagccagcccttgtgctgtccctgaatctgcatgtagcctgtgggaggcggagcagtgaccggcaggaattctgggcagctcaggcacctgtgggcctgagggtgccctctgcccccacccttccgatctcctgggcaagacacgccaggtgattcatctcaccagagcagaaaaacaagttcaactgggcactttaatctcccctcactggcaggcctggtgtgagctgctaccccggcgcccctcaccaggggtgctttacctcctctagtattcctgaccttagtgggcatttctggtctcagggataccaggctggggtccaagtgggccaggtgtggcagttcagccctatgccccatggctgatggctcgcgctgggcaggtatgcagggctgacgtagtgcctttgtggcagcagtttcgtggcacacattctgccagctggttctggagtcttgccctgaggaggtggccagggtgagggtgccagcgcaggaacctttggcgcatgcttcaccctggcctgggatctgcagcctgggtccagatgcccacaactggaatctgacgctccttttctcttcatgggggactcccagaggtctctgcaatgaccagagccccggttgtcccatgcctcagctgcaactccagctgaccctccttccccactctctgggtggcattacgggggtgtggatcccttgccaagaggttggcatgtgggtgtgctggaatggcatagggagaatgcaccgagtttgtttgcttgggagaggggcagggggtatccagaagattcatgattcgtcatcgcctctcttgggggatttttacccctttgccctgagttgtgcctttgggacaaaggaagcctttctttgccagccaacaccctgtactggcgggcgagctccccagggctggcacgctggggcagcctctgaatgcacagggtgggcctagtcagaagaagcctttcccctgaaatccctctacttcccaagcacgcaagctttctcctgctgttaaacctgcagtgtgcaagggacatgggcggaggggtccttcagtcaggcttctccctgtctgaggtggcatgacttggagtgagtttggatggggtggccaggtctgagaaggtcccccgccagtgtcctctgacccatctgctctctcctgccagtgtgcaccggcacagacatgaagctgcggctccctgccagtcccgagacccacctggacatgctccgccacctctaccagggctgccaggtggtgcagggaaacctggaactcacctacctgcccaccaatgccagcctgtccttcctgcaggtgaggcccgtgggcaacccagccaggccctgcctccagctgggctgagccctctgtttacaggtgggtggcagaagaaggtgccctgcccttctgtttcctctcttgttgtggtttctcaaccaggaagtcctttctaacatctaacccccattcattttactgcagaatcagttgactctctctataacgtggctggccgaggtcatgtctggatgggatgcgtctgtgtttccgctaaatcttgtgctctcttgccagcatgatcatgtcccctgtccacctgctccagccactatccctctcccacttacagcagaagaaagggctggtgagaaaggtggattacaggcccacttctgccactgacgagccctatgaatgtggcctacacccccttagcttcactgggtctcagtttccctatctgtatattgggagcagttgtgaagctcagaagagaaatgtctgtgaaaaggttatgaacaggagggagagtggaaaccaacctgctggatcgtgtccacagaccctggaatggggccacatgcttggtttgtcaaattgcagacgccggccgggtgcgatggctcatgcctgtaatcccagcactttgggaggccgaggcggacagatcacttgaggtcgggagttcgagaccagcctgaccaacatggagaaaccccgtctctactgaaaatacaaaattagccaggcatggtggcacatgcctataatcccagctacttgggaaggctgaggcaggagaatcacttgaacctgggagacggaggttgtggtgagcctagatcgtgccattgtactccagcctgggcaacaagagtgaaactccgtctcaaaaaaaaaaaatttgcagacgccatcccatccaggcctttgctttcactgatgaagaaactgagatacagagagggcagggcacctgttcggagtttatgaaatgcccccccaccattatctttcttgatcatataagaatctggtgaggcaaggtagggcgtgatctttatctctattttatcgttttatttaagcgggaacaggactgctcagtggctgggggccttgcccaagatctccaagtactggggaaccccagggaggccctggggggtggcagtgttcctatttcagccccactctgcttccccctcccaggatatccaggaggtgcagggctacgtgctcatcgctcacaaccaagtgaggcaggtcccactgcagaggctgcggattgtgcgaggcacccagctctttgaggacaactatgccctggccgtgctagacaatggagacccgctgaacaataccacccctgtcacaggggcctccccaggaggcctgcgggagctgcagcttcgaagcctcacaggtggccttcaccgtcattgaaaccttctcttggttattcagagctgaccagggccactgctaaccagggggaggctttgtgtgcattagaaatggtgtcccttctgggcagacgcaggcagagcccgggaagacgccctcagaagattggaaaaagattccccttcttcctgggaagttgtagcttgcgtcagcacatataattcaatcgtgagaatgcaggctgggtttttgcccccacttggctgagtgaagtgtacagtgaacaacctatgtaactatttgctggccctggagccgactctgccccagagtctgggtgccaggtgctttgcccgcatggcccatttcagtcacgctgcagtcctgtcaggaaaaaatcagtgttattctcattctacatatgagaaaactgaggcttgcagatataagggccaaaagttacacagctagtgagtgatggggctgagtttcagactccacagtctcttaaccaccaagcagcatgcccagagtagaggtgagaaggaaggagagagctgcggtccacatgagcatctggacctagcatggacaactcactcctccctggctctcgctttgttcttgttgcgggtgtggtggtggtgggactcaaagacggtaaagatagctttctctcctccctggggaatctgggggttgtttaaaaggcctgctcctcttttagaaggcaggagggccccaagggaagcagaaggtgacagaaggggaaagggtcctctgatcattgctcaccccacagagatcttgaaaggaggggtcttgatccagcggaacccccagctctgctaccaggacacgattttgtggaaggacatcttccacaagaacaaccagctggctctcacactgatagacaccaaccgctctcgggcctgtaagccatgcccctccctgctgcctcttctctcagacagcctgaccccagccgcaaactcccaacttacaacccagtgcctgcccgccactgccccagccgcctacaccacccatttcctccctctctgtccctcctgccatctccctgtgcctcttcatctctggggttctctgtcttgtctccctctgcttataggttgtgcctctggtttgggggcctctcagcctgtctgggtccctcccttgctgtgcagttggcctcgtggcctctgctgctgtttgtgcctctctctgttactaacccgtcctctcgctgttagacatctctctcactgcctgtctctggttctgtcctcaggccacccctgttctccgatgtgtaagggctcccgctgctggggagagagttctgaggattgtcagagccgtgagtctcagggaggcctggagtcagggaaggggagggctggggccgggtggaatgcaggtgtcatacaggtgacatgggaggggtgggataacaggcttgggatgtctcccctgggccaggtagtctccctagaaggtgatgctgatgagggtctggtgcccagggcgccactcagccctcatcctgccctttgcccaacagtgacgcgcactgtctgtgccggtggctgtgcccgctgcaaggggccactgcccactgactgctgccatgagcagtgtgctgccggctgcacgggccccaagcactctgactgcctggtatgtgcctctgctttgtgcccaatgtgctctaccccccaggatgcaaggggtgggcaccctgcctggtactgccctattgcccctggcacaccagggcaaaacagcacagtgaaagccagccacctgtccccccaggcctgcctccacttcaaccacagtggcatctgtgagctgcactgcccagccctggtcacctacaacacagacacgtttgagtccatgcccaatcccgagggccggtatacattcggcgccagctgtgtgactgcctgtccctgtgagtgccagggagaaacacagttttctcattttggtggggaggtttgtttctgtaaatgggagcatatggggagcactgtctgcatcttgctttgagagctggtcatgacagttcctgccgagctgccttgttctttcaacagctgtggagcaggtggcagtaaggagaggcagctaagagcccagacttgggagccagactgcctgggtttgaaacccagctctatcaattagtaggcacgtgaccctcttgctgtgcctcagtttcctcatcagtaaaatgggggcaagaatagtcccaactgcataagatggttataacatttgaaagagttaatatttgtaaagctcttagaacggtgcctggtatgtactaagtgctcctaaatgttagcttttattctatagcctggtgaggtcagttttacctttcgttttgtttttgagaccgaatttagttagctctatcgcagtggcgcgatctcggctcactgcaacctccgcctcccaggttcgtgctattctcgtgtctcagcctcctgagtagctgggattacaggcgcccaccaccatgcctcgctaaattttgtatttttagtagagacagggtttcaccacgttggccagactggtctcgaactcctgacttcaggcgatccacctgcctcggcctctgaaagtgctgggattacaggcgtgagccactgcacccggacttttttttttttggcagagtctcgctccattgcccaggctggagtgcagtggtgcaattttggctcactgcaacctctgccttccgcattcaagcaattcttgtgcctcagactcttgagtaggtggaactacaggcatgcaccaccatggctgggtaatttttgtatttttagtagagacggagtttcactatgttggccaagctggtctcgaactcctgacctcaagtgatccacccgccttggtctcccaaagtgctgggattacaggcatgagccatcgtgcctggcctagctcagttttatttaacagatcacctatttactgatgggcgtttatggactgggctcagacctggggaacctctttcctcctctcacaggaacaggagtgggccttcagatcctggctgactgtgttagggagaggacaaaatgtagagccagaccatttgggttcaaatcctcgctcctccactcactagcacaatgaccttgaataatttacagaactctctgctttggtctccctttttgcaaaatgggaatctcacagtgctgatcccgtctggttgttgtgaggggtaaatggatgtcaggtgctgatgcgtggtagggcatttaagtattggttgatattattcttcttgtgcctgggcacggtaatgctgctcatggtggtgcacgaagggccagggtatgtggctacatgttcctgatctccttagacaactacctttctacggacgtgggatcctgcaccctcgtctgccccctgcacaaccaagaggtgacagcagaggatggaacacagcggtgtgagaagtgcagcaagccctgtgcccgaggtacccactcactgcccccgaggccagctgcagttcctgtccctctgcgcatgcagcctggcccagcccaccctgtcctatccttcctcagaccctcttgggacctagtctctgccttctactctctacccctggcccccctcagccctacaagtgtccctatatcccctgtcagtgtggggaggggcccggaccctgatgctcatgtggctgttgacctgtcccggtatgaaggctgagacggccccttccccacccacccccacctcctcagtgtgctatggtctgggcatggagcacttgcgagaggtgagggcagttaccagtgccaatatccaggagtttgctggctgcaagaagatctttgggagcctggcatttctgccggagagctttgatgggtaagagtgggcacgatgacctgagacagtgtcagggcagacagagtcctgaggatccagatgtggcagcatctcttggggatggcaggagacagaagtggggggatcaagaatgcaaagaaagcagatgggagaccagaggagcagggcctttggtgggtgggggtgattatttttgtaaatgacatgctatccgtgaacaaggacttgtatggaggtcagaccatctagataaagtaaaattccctttgagttcatagcagctttattcaaaatatccccaaattggaaataactcaaatgtgcatcactaggtgaaggaataaacaagtggcagtgtatccatttggtgaagttctacttagcaaccaaaggaaatgaactaccgatacaacataaatgaatctcagaaacattacattgagcaaaagaagccagagacaagattccatactgtctgatcccctttatgtgaggctctgaaccgaaaaaaccactctgtggtgggagagatcagaacggtggttgccccagggtggggggcttcaaaagggaggcacacaaggacatttctggggtaatagaaatgctctgtatagtgattggggtagtggatacatgagcgaatccatttgtcaaaactcatcaaactgtgtgataagagtctgtgcattttatttatttcattttattttttgagatagagtctcactctgtcagcaggctggagtgcagtggtacgatcttggctcactgcaacctctgcctcctggattcaagcaattctcctgcctcagtctcctgagtagctgggactacaggtgtgtgccaccatgcccagctaatttttgtatttttaatagagatggggtttcaccatgttggcaaggatggtctcgatctcttgacgtcgtgatccgcccacctcagcctcccaaagtgctgggattacaggcatgagccaccacacccggtgcattttattgtatataagttatacttcaataagaaatgaattggggccaggcacggtggctcacgcctgtaatcccagcactttgggaggccgaggcaggcagatcacttgaggtcaggagttcaagaccagcctggccaacatggtgaaaccccatctctactaaaaaatataaaaaattagccaggcttcctggcatgcgcctatcatcccagctacttgggaggctgaggcaggagaattgcatgaactcgggaggtggaggttgtagtgagctgagatttcgctattgcactccagcctgggcgacagagtgagaccctgtctcaaaaagaaaaaaaaaaaaaagggtcaggcgccgtggtgcacacctgtaatcccagcactttgggaggctgaagcaggaagattgcttgagcccaggaattcaagaacagcgtgggcaacatagtgagatcccatctctacaaaaaaacacaaaaaattagccgggcatggtggtacgcacctgtagtctcagctactagggagactgaggtgggagaatcacctgagcctgggaggtggaggttgcagtgggttgaaatcatgtcactgtactccagcctgggtgacagaatgagaccctgtctcaaaaaaaaaaaaaaaaaaaaaattccctttcacacttcctttacctccactcccctttccagagggggccatggttaacagtgtgtgtgttcacctagaccgtttatgcatctgtagacacacacacagtgaagtgtggttttcgtcgttttggtggggaggttggtttctgtaaatgggaacatatagggagcactgtctgcaccttgctttgagagccggtcatgacagttcccattgaactgccttgttctttcaatagctgcagagcaggtggcggcaaggagaggcagctaagagcccagacttgggagccagactgcctgggtttgaaacccggctctaccacttactaggcatgtgacccttgtgctgtgcctcagtttcttcatctgtaaagtgggggcaagaacagtcccaacttcataagatggttataccaccatgcctggccagatgattataaagtttgaatgagttaatatttgtaaagctcttagaacagtgcctggcagatactaggtgctcctaaatgttggtttttattatgtggctgggtggctcggggttttatttaacagctcccctatttactaatagacatttagatcatgttccattttcactcttacaaacagttccactttgtgtgtggctctgggaacatgggccagtgtctccctaggccacattcctagaaataagatttcttttcttttttttttttttttgagacagagtctcgctttatcgccaggctggtgtgcagtagtgtgatctcggctcactgcaacctctgcctcccgggttcaagtgattctcctgcctcagcctctcgagtaactgggactataggcgcgcggcaccacacccagctaatttttgtatttgtagtagagatggggtttcaccatgttggccaggatggtctccatctcttgacttcgtgatccgcccgcctcggcctcccaaagtgctgggattacaggcgtgagccactgagcccaggcagaaataagatttctagatcaaaggatataaatactgttttgatagatgttgccgaactaaggcctgggctttgaagcccaggatgggaacagctgggctcgatgggcaaagggtttgagtgaaggcattcatggtggggagtggctggcatggccagtgctgggagtgatgtccaccctgttcctggccctgctgactcctctcctgacccctccagggacccagcctccaacactgccccgctccagccagagcagctccaagtgtttgagactctggaagagatcacaggtgggctctgtctctgcatcctgttctgcaggggctgggagtccttgtcctgtccccactcctttaatctcaccctctgcctgcaggttacctatacatctcagcatggccggacagcctgcctgacctcagcgtcttccagaacctgcaagtaatccggggacgaattctgcacaagtgagcactgagaaagagggggcctgatggggaggagtcccagggaggagtccctgtgggaagctttgggcctgagggagtactcctgtagcagtaacctttccatgaaagtctgcagagtgtgctggggatggaggaagatgagaatagcctttgctgaccgggaaggggtccgtggtaaggtgcccacctttctcccatagtggcgcctactcgctgaccctgcaagggctgggcatcagctggctggggctgcgctcactgagggaactgggcagtggactggccctcatccaccataacacccacctctgcttcgtgcacacggtgccctgggaccagctctttcggaacccgcaccaagctctgctccacactgccaaccggccagaggacgagtgtggtaagacagggagcccagtgtgcgcactccccatctgccagcacacagcagtgcccagggggccctggcagcagcgttcttggacttgtgcagactgcccgtctctgtgcacccttcttgactcagcacagctctggctggcttggcctcttggcatggcttctctagctgggtcctacctgccttggcatccttccctccccctctgtttctgaaatctcagaactcttcctctccctacatcggccccacctgtccccacccctccagcccacagccatgcccacagccagttccctggttcacttggacctggggcctcccctaaaagtcccctgcggtcccttcctcctcactgcagtgggcgagggcctggcctgccaccagctgtgcgcccgagggcactgctggggtccagggcccacccagtgtgtcaactgcagccagttccttcggggccaggagtgcgtggaggaatgccgagtactgcaggggtatgaggggcggaggagagggtggctggaggggtgcatggggctcctctcagaccccctcaccactgtcccttctctcaggctccccagggagtatgtgaatgccaggcactgtttgccgtgccaccctgagtgtcagccccagaatggctcagtgacctgttttggaccggtgagctgctggcgggctcagagctgggtggaggggggcagcgagggggattgccagggacttggcaggatggcgagatgcagtagggtgtgctatctggtaaaatatccctggagagggctcagcgctcagacctgaacagcaacagagtggcagaaaaggggcctgggggacactggggcccttcagactatgaaaaggttctaaggaggtctgtgttggtggctgtgactgtggctgtgctagggtggtgagccctgtgggctcaggcgtcagactacctggattcagacccagctcctgcttccaaccttggttttttattcctaaaatgggtattgtaataatacctaccttgctggggtgtggcaagaatgaaattaaacagggcttggcacagtgaagcacgggaaaggctttctacagagcagtgactgttgttactcgctgttacaccttaggtaatgcgttttcctctctgggtgcctcccattttctggctcaagtccctgcccaggatcaagcttggaggagggccccgagggaggggccacagagactgggtgaagagcaagggtgtttgtcccaggagcatggcgaaaattgctgctgggtggccttgggaagcacaaaggggacccaactaagggcctgatcctactgccctgggggtgtcagtgccagccccccacaaatcttttctgccccccccaggaggctgaccagtgtgtggcctgtgcccactataaggaccctcccttctgcgtggcccgctgccccagcggtgtgaaacctgacctctcctacatgcccatctggaagtttccagatgaggagggcgcatgccagccttgccccatcaactgcacccactcgtgagtccaacggtcttttctgcagaaaggaggactttcctttcaggggtctttctggggctcttactataaaaggggaccaactctccctttgtcatatcttgtttctgatgacaaaaataacacattgttaaaattgtaaaattaaaacatgaaatataaattaatgccctagcagttctatccccactgttaataatttgaaatatttttcctctagttatttttgtctgtgcacattctaatatgtatatataagttaacatatattaatattattctccagttatttttatctgtgcacattttaacacacacacacacacacacacacacacacatatgtatttttagacggagtttcactctgtcgcccaggctggagtgcagtagtacaatcttggctcactgcagcctccacctcctgggtttaagcaattctcctgcttccgcctcctgagtagctgggattacgggaacgtgctaccttgcctggctaatttttgtatttttagtacataggatttcaccatgttggccaggctggtctcgaacccctgacctcaggtgatctgccagcctcggtcccccaaagtgttgggattacagcggtgagccaccatgcccagtcatatatttctttttaacaaatagaatcatagatcatacatattgtttgcaaattgctttttctcactttccagaaccttgaaatgtttttccatgttctaacatggtgatctaccttattcttttaatttttcttatttagttgtctttacacatgaaacacatgaatacatccttgtgataaacattttcagtaacataaaagtataaatgttacaaagccaacgtgccctttcactcaactccctgtccacccagtctctcctgtctgctgggagaaccaccgcattgacttgtgtgttcacccttccaggctcttttctgcacacttatatagacatactacatttatattaggtcgagtcaaataagattgctgtttgtgtaaaccaaaaagtgtcaagagcctgggcgcagtgactcacacctgtaatcccagcactttgggaggctgaggcaggcagatcacttgagatcaggagttcgagaccaatctggccaacatagcgagaccccgtctctactaaaaatacaaaaactagccaggtgtggtgatgctgttctgcactttgctttccccccgacttgaggtatcctttcttgtgagtacagacggatctaccacctttattttttttttaattactcaacctgtaacatggatgtaatttcactttgtttttgagggatattgagcttgtttccctgtttttgcagtttattgcaattgagctccacacacaagtgagccctcttttgtatgccccctagtgggaatacagtgctggcaatgtttatcacaaggatatattcatgcatttcaatttaaagacaactaaatgagaaaaattaaaagaatatggatccaggctgggcatggtggctcacgcctgtaatcccagcactttgggaggccgaggcaggcagatcacctgaggtcaggagttcaagaccagcctggccaacatggcaaaaccccgtctctactaaaaatacaaaaattagccaggcgtggtggtgggcgcctgtaatcccagctatttgagaggttgagacaggagaattgcttgaacctgggcagcggaggttgcagtgagacgagattgcaccagtgcactccaacctgggcaacacagtgcaactccttctcaagaaaaaaaagaaaaaaaaaaagaatatgggtccagatccatatggatcctagatccagatcacggtgttagaacatggaaaaacattgcaagattctgctaagtgaaaaaagcatttgcaaacagtatgtacagtctatattcagaggaggaactgctgggtcatagatgatatttcataggtattgccaaaccgttctctggagaagtggtatgggtttaccctgggattcttctatggagggaatagttgagctcccgggcttgctcttctgggtgcccctccccgcttcctatccaccacaaggagctgcaggggagcggggcatgccggttccttggctggagaaggagtctccttgtgaggtggtagaaggagcactgacggccttgagcccagtttctgcctttgtcaaatggggataatgacccagccacacccctcccagggttgttgtgaggctggaaaggtggttcccaagagggtggttcccagaattgttgatgagactgtttctcctgcagctgtgtggacctggatgacaagggctgccccgccgagcagagagccaggttggcctggaccccaggatgtacccttcattgcccttcactcccccactggatgctgggtggtcactgctgtagggaggggaccccctgacatatgtcccttcccacccactcttccactgtggaacctcctgtcattttccacttcaccaagtgacagaggacctgctcagatgctgaggggaggggactgcaaggaaagatggctaggaaacccagtccctccacaccctagagtaacttgatgccttgtgagggacacaggcaaagttcaattccttggaagtcaagggagactgagaagagtacagctgcagcactgagggagtgatgaattcttaactggggatggtgggaggcttcgagtgggaggtggcatttgagctaggctttgagagaggagcaggtattgcacttgcatttaggtagaaagcattggggtgcaaggtgacactggagggggaggcatcaggaaatccaggatgtcttcaaagttctggtgtcgggggctgttgagtaagcacaggaataagggggtcaagttagagtcagggtggggtctgacctggatgccataggacctgatccccaagccacagggtgggacttgactgggcagtggggacctttggaaaggactttggggagaaaaacagactggagtctgtcttaggcgatcatcggtccgtgaaatgagcatgtgttacaggcttggtatgtaccagaccctgtgctaagcaagggggtatggagaggagagggtgacaagaatattggatcaacacccgggagctccatctatcccaggatgcactatcttttttttatttttttgagacggagtctcactctgcctgcaggctggagtgcagtggctccatctcggttcactgcaacctctgcctcctgggttcaagcgcttcttgtgcctcagcctcccaagtagctgggattacaggcacatgccaccacacccagctaatttttgtatttttagtagagacggggtttcaccatgttggccaggatggtctcgatctcttgacctcaagatccgcccaccttggcctcccaaagtgctgggattacagacatgagccaccgtgcccagccagatacgctatctttttattgagtgattgagacagggtcttgctctcttgtccagtcttgaatgtggtggtgtaatcacaggctcactgcagccttgacctcctgggctcaagttacccttctgcagtagctgggactataggagcgtgccaccacgcctgggtaatttaaaaaattttttttgtatagacagggtctcactatgttgcccgagctggtctcaaactcgtgggctcaagtgatcctccagttttggcctcccaaaatgttgggatcacaggagtgagccaccactcctggcgatgagccaagtcttttttttttttttttttttttgatatggagtcttgctctgttgcccaggctggagtgcaatgacacgatcttggctcactgcaacctctgcctcccaggttcaagcagttcaagcaatcctcctgtctcagccccccagtagctgggattacaggcatgcgctaccacgtccggctaatttttgtatttttagtagagatgaggttttgccatgttggccaggctggtcttgaactgctgacctcaggtgatccacctgcctcggcctcccaaagtgctgggattacaggtgtgagccatcgtgcctggcggagccgagtcttaaaagatgaccctgtggagaaatggtggtccaggctgaagggacagcctatgcaaacactgggaggtgtggaaaatcatgacctgtgggtggaaattttggctagaacatcaaaatcatcaggtgtacattcctgtacccatgcagcagtcagaatctctgggggtggggccccaaaattgtatgcatacagactgtgtgctgatttgtgatattacttaggattttttgactttacaatggtggaaaagcaataatatacattcagtataaaccgtactttgaatacccatacagccattctgtttttcacttttatttttatttatttatttatttattatttattttgagatgtcattttgctgttgttacccaggctggagtgcaatggcgcagtcttggctcaccgcaacctccacctctcaggttcaaacgattctcctgcttcagcctccagagtggctgggattacaggcaggcaccaccacacccggctaattttgtatttttagtagagacggggtttctccatgttagtcaggctggtctcgaactcgagagctcaggtgatctgcccatctcagcctcaagccaccatgcccagccctactttcagtattcaataaattacatagccaggcaccgtggctcacacctgtaatcccagcactttaggaggccaaggtgggaggatcctttgaggccagaagctcgagaccagcctgggcaacatagtgagaccccatttctacaaaaaataaaaaaactagctgagtgtggtggcgtgtgtctgtagtcccagctacttgggcagctgaggtggaaagactgcttgagcccagaggtcagggctgcagtgggccatgatctcaccactgcactcagcctgggcaacacagcaaggccctgtctcaaaaataaataaataaataacacaaacttatttaacagtttactataaaataggctttgtgtcagatgattctgcccaactgtaagctgctggcagtgtaaatgttctgagcacgtgtaagccaggctaggtgtcttaaatgcattttcagtttcaacttagaattggtttatcaggacgtagccccttggtgttgaggggcatgtgtattaacagtctccttagtgacttttttttttttgagatggagtcttgcactggccgtagtgcagtggcacaatctcagctcactgcaacctcttgtctcccgggttcaagcgattctcctgcctcagtctcccaagtagctgggattacaggcacccacaccacgcccagctaatttttgtgtgtgtgtatttttagtagagacgggggtttcactatgttggccaggctggtctcgaactcctgaccttgtgatctgcccacctcagactctcaaagtgctaggattccaggcatgagccaccgcgcccagagtccttagtgatttttacaccatgaattgttgaagccctaagccagagccaagggcaagagtatagagaatctggagatgcggagagggttctgattgcctacaaggagtttggactttattgtggaggcagcggggagccaaggcaggttttagagtaggagagggtccaagcctgtgggtcacccttccgacttccctttccgaatgccaaacaccttcatgtcccccgtgggccccctttgtccctcccaccccaaactagccctcaatccctgaccctggcttccgcccccagccctctgacgtccatcatctctgcggtggttggcattctgctggtcgtggtcttgggggtggtctttgggatcctcatcaagcgacggcagcagaagatccggaagtacacgatgcggagactgctgcaggaaacggaggtgaggcggggtgaagtcctcccagcccgcgtggggtctgcaccggcccccggcactgacccaccaccccctcaccccagctggtggagccgctgacacctagcggagcgatgcccaaccaggcgcagatgcggatcctgaaagagacggagctgaggaaggtgaaggtgcttggatctggcgcttttggcacagtctacaaggtcagggccaggtcctggggtgggcggccccagaggatgggggcggtgcctggaggggtgtggtcggcagttctgatgggaggggcaagagctggaggcagtgtttgggggagggcagttacagcggagaagggagcggggccaagccctagggtggtgaaggatgtttggaggacaagtaatgatctcctggaaggcaggtaggatccagcccacgctcttctcactcatatcctcctctttctgcccagggcatctggatccctgatggggagaatgtgaaaattccagtggccatcaaagtgttgagggaaaacacatcccccaaagccaacaaagaaatcttagacgtaagcccctccaccctctcctgctaggaggacaggaaggaccccatggctgcaggtctgggctctggtctctcttcattggggtttggggagatatgactcccgcaaacctagactatttttttggagacggagtcttgctctgtcacccaggctggagtgcagtggcgttatctcggctcactgcaacctccacctcctggactcaagcgattttcatgcctcaggctcctgagtagctgggattacaagcgcccgctaattttttttttttttttgagacagagtctcgctctgtcacccaggctagagtgaaatggtgcggtctcagctcagcctcccaggttaaagcgattcttctccctcagtctcctgagtagctgggattacaggcgcgagccaccacgcccggctaatttttgtatttttagtagagatgggatttcaccatgttggccaggttggtgtcaaactcctgacctcatgatccgcccgcctcggcctcccaaagtgctgggattacaggtgtgagccaccgtgcccggcctaatctttgtatttttagtagagacagggtttcaccatgttgtccaggctggtactttgagccttcacaggctgtgggccatggctgtggtttgtgatggttgggaggctgtgtggtgtttgggggtgtgtggtctcccataccctctcagcgtacccttgtccccaggaagcatacgtgatggctggtgtgggctccccatatgtctcccgccttctgggcatctgcctgacatccacggtgcagctggtgacacagcttatgccctatggctgcctcttagaccatgtccgggaaaaccgcggacgcctgggctcccaggacctgctgaactggtgtatgcagattgccaaggtatgcacctgggctctttgcaggtctctccggagcaaacccctatgtccacaaggggctaggatggggactcttgctgggcatgtggccaggcccaggccctcccagaaggtctacatgggtgcttcccattccaggggatgagctacctggaggatgtgcggctcgtacacagggacttggccgctcggaacgtgctggtcaagagtcccaaccatgtcaaaattacagacttcgggctggctcggctgctggacattgacgagacagagtaccatgcagatgggggcaaggttaggtgaaggaccaaggagcagaggaggctgggtggagtggtgtctagcccatgggagaactctgagtggccacctccccacaacacacagttggaggacttcctcttctgccctcccaggtgcccatcaagtggatggcgctggagtccattctccgccggcggttcacccaccagagtgatgtgtggagttatggtgtgtgatggggggtgttgggaggggtgggtgaggagccatggctggagggaggatgagagctgggatggggagaattacggggccacctcagcatgtgaagggagggaaggggctgcctgtgccccaccttgcagggtctgtgcacttcccaggattagggaaagaccgggtagggtctgtctcctggcatcacatctccccctgctacctgccatgatgctagactcctgagcagaacctctggctcagtacactaaagctccctctggccctcccactcctgaccctgtctctgccttaggtgtgactgtgtgggagctgatgacttttggggccaaaccttacgatgggatcccagcccgggagatccctgacctgctggaaaagggggagcggctgccccagccccccatctgcaccattgatgtctacatgatcatggtcaaatgtgcgtggctgagctgtgctggctgcctggaggagggtgggaggtcctgggtggaggagcccacaaggggcatgaaaggggaccaggatgtatgtagacccaggagccctagtatgttaggagcctcaaaaccttcttgtatcccttttacagtcaaagtccaaagccactcttgaggaacactcttgtacaaaattaagctgggcacagtggctcatgcctgtaatcccagtacttttggaggctgaggtgggaggatcccttgaagccaggagttcaagaccagcctgggcaacatagtgagatcctatctctacaaaaaataaaaaaattatctgggtgtggtggtgtgtgccagtagtcccagctactcaggagaggctgaggcaggaagatcacttgagcctagtttaaggttgcagtaagctatgattgcaccactgaaatccagcctgggtgacagagcgaaacctcatctcaaaaaaataaaaaagcaaacaaaaagaaaaaaaaaattaaaagggaaactagaagagatgccaaaggttctggctgaagaccccagagtctggtgctacttctctaccacctgagggctttgggctgtcccttgggactgtctagaccagactggagggggagtgggaggggagaggcagcaagcacacagggcctgggactagcatgctgacctccctcctgccccaggttggatgattgactctgaatgtcggccaagattccgggagttggtgtctgaattctcccgcatggccagggacccccagcgctttgtggtcatccaggtactgggcctctgtgccccatccctgcctgtggctaagagcaccctcctgcagagggtgggaaggagagatgagtccagtatgccaggcccctcacggaaggctgcatgctgggctggggaggggccaccatcctgcctctccttcctccacagaatgaggacttgggcccagccagtcccttggacagcaccttctaccgctcactgctggaggacgatgacatgggggacctggtggatgctgaggagtatctggtaccccagcagggcttcttctgtccagaccctgccccgggcgctgggggcatggtccaccacaggcaccgcagctcatctaccagggtcagtgccctcggtcacactgtgtggctgtctgcttacctcccccaaccccggtggactagggtccctttctctgatgttccctcaactgtcacctctcaaggaaaccccattatccctacaaaaaattcttactgccttccaacccctgtgaccccattctctccacggtgactgtgtcataccccaaaggtgacctctgtttttctcctgtgaccctgtcaccttccatggagtccccatcccagatccgtgagtgacccccatcatgactttctttcttgtccccagagtggcggtggggacctgacactagggctggagccctctgaagaggaggcccccaggtctccactggcaccctccgaaggggctggctccgatgtatttgatggtgacctgggaatgggggcagccaaggggctgcaaagcctccccacacatgaccccagccctctacagcggtacagtgaggaccccacagtacccctgccctctgagactgatggctacgttgcccccctgacctgcagcccccagcctggtatggagtccagtctaagcagagagactgatgggcaggggaggtgggaccttcagcccagggtccactgtgggggcagagggagtggcagagacaccggggttccttcccctaatgggtcaccttctcttgacctttcagaatatgtgaaccagccagatgttcggccccagcccccttcgccccgagagggccctctgcctgctgcccgacctgctggtgccactctggaaaggcccaagactctctccccagggaagaatggggtcgtcaaagacgtttttgcctttgggggtgccgtggagaaccccgagtacttgacaccccagggaggagctgcccctcagccccaccctcctcctgccttcagcccagccttcgacaacctctattactgggaccaggacccaccagagcggggggctccacccagcaccttcaaagggacacctacggcagagaacccagagtacctgggtctggacgtgccagtgtgaaccagaaggccaagtccgcagaagccctgatgtgtcctcagggagcagggaaggcctgacttctgctggcatcaagaggtgggagggccctccgaccacttccaggggaacctgccatgccaggaacctgtcctaaggaaccttccttcctgcttgagttcccagatggctggaaggggtccagcctcgttggaagaggaacagcactggggagtctttgtggattctgaggccctgcccaatgagactctagggtccagtggatgccacagcccagcttggccctttccttccagatcctgggtactgaaagccttagggaagctggcctgagaggggaagcggccctaagggagtgtctaagaacaaaagcgacccattcagagactgtccctgaaacctagtactgccccccatgaggaaggaacagcaatggtgtcagtatccaggctttgtacagagtgcttttctgtttagtttttactttttttgttttgtttttttaaagatgaaataaagacccagggggagaatgggtgttgtatggggaggcaagtgtggggggtccttctccacacccactttgtccatttgcaaatatattttggaaaacagctaggcaccggcctatgtctgggggtggctctgtgccatcccttcctgctcaccttacactcaattcctcttttcctggagggagtggctgggaatcttcagaaagcttggatgaggagccagacatccagttctccagcttcagggttgggggagatcgggaagctggattcagatctgagagccctttgacgaccagatcattcttatttagaacgaactaattcctaaggccactcaccagaatggggttatttcctccttgtgagtgaggagagtggtgggtagggtgggggaaagacgaggcagggtctactgtgggactcattttccttgccttggctatgccagaggagctcactgacctaaggagtagctgtccagaaagcccacccagccagcacagccaccctggcggtgcaaaggctgggctgaccggacttctgtgccccccacattcccagactggacgtataaaaacacacactagttagcattagtgtttgtagcgccactttactgccaatagctgacattgccctgggttaggggagaataaataaaatctgtggcatcagacaggtattaccgaggcgaagagtggactgggctttcgtgggcacttaccctgggaagggggtatgaggtggctggagaagtgttcatggagagtgtctctctcctgcccccaaggccacggaatcttctattccttctttgtacccaaagggcaaagtggaggccagggtctctttgctaaggagctaagtaggggaaagaggcagggggagctcccagcaggaccaaagggagaccaaggtttggaccccagaacagagcaggaacccagagtcctgtgcagtcacaggatgacgcagggaggacggctgttggtgatcttttctagggtttctccattactggctcttcggatggcctcaatgagctagaggagtggaatgacaggatgatgcactgttggggtagggtgaccaagaggtcctcccaacgctgtaaatactcacatctttctcatagggaaagcccccattctccagcttggagaacaccagctgtccatttatctctatctcaaaggcacctggtaagaaatcaacagataaatggtacactgagaacataggcagaagtcaggagttcctccaaaggggtcccccgccttcaagtcccccatcaatcccactggagacccatttgtagctccttaagcaattccccaaccctgggtcaactccagggaacctgagggaggcctcgcctgtgtgcccctcgcaacactcaataaaggactccctcccctccaaccctacacgattgcagtctaataggtttttccccacaggcctctgtgacaccccctgacctatggaagggaactcatgttggccggacattttaccatgtgccaggcactgcgggcactttacataaagcagccaatgtcagaactagaaagcgggagagctgggattcagagcacagactgacccagcaggtgttctgcgagcctcacctgtgcccccgaggcgcgactcgatctcgatgcccggatactgctccttcacagcactggccagctccaggtaggtcgcctcgaagccgcagggttcactggggagtcaagagatggggctgggctggggattcgggggtggggcctcccgtggacccacctccgtccggcccgcgggaccagggtgcgggtcctccagccggggccgctcaccagtactccaccacgatgcggaccccactgcccggctcgacctcctcgggagggggcgctacggacgtctgccccggctccccgctcatcgcggccggctccgctcgggcccctgcttccgggtgtgacgcgaaccgcgggcacgtgacggggcggggcctctggagcggggaggggccgagggtggcgttcgggcgccccctgcgggtctccgccactgctacgttttgacctcgtagggcagctccggagctcgctccccgggcaggggctgggtccggtccagaccctccttccctggcccggtctcccggagtgccgggcttccccactccccactcccggtgtccgctggacttcatggcttcatttactctaatggactatcttagactgcaaagcgcttttcagtttacaaaagaaagagaaagtggtggggcaagcatcctggggatgggggtgggtgtggctgatgcatgaaatagttgacattttctcgctaacatgccgatggcattttttttttttttttttttgagacggagtttcgctcttgttgcccaggctggagtgcaatggcgcgatctcggttcactgcaacctctgcctcccgggttcaagcgattcttctgcctcagcttcccgagtagctgggactacaggcgcgtgccaccgcacccggttaattttgtattcttagtagagacagggtttcatcatgttggtcaggctggtctcgaactcttgacctcaggtgatccaccagcctcggcctcctaaagtgctggaattacagacatgagccaccgcgcctggcccagttttttgtttgtttgtttgtttgttttagtagagacagggtttcaccatgttcgccagactggtctcgaactcctgacctcaaatgatctgcctgccttggcctcccaaagtgctgggattacaggcgtgagccaccacgcccggtgctgatggcatttggaaccaccctgtagttacatacacaagtgtttctgatcccaaagctctaaactgctttttccagtcttttgcagctgcttcttgcctgcactggaaaacagtagatgctcttcaggctctgtgcccccaacagtttctgcgcatcccttctcatccagcctctcactggggggctggcgtcattattcccattttgcagctctggaaatggagtctgcacaagtcctcgctgccttttccctgcctacagtaccactatggtatcctaacacgccacccactctagtgtccctttaggctatttatttatttatttatttattttgagatggagtctcactctgtcacccaagcttgagtgcagtggcgcgatcttggctcactgcaacctccacctcctgggttcaggcgattctcctgcctcagtctccctagtagctgagatcataggtgccagccaccacgcccagctaacttttgtattactattattattatttttttgagacagagtcttgctctgttggccaggctggagtgcaatggtgcgatctcggcttactgcaacctctgccttccggcctcaagtgagtctcctgtctcagcctcctgagcagctgggattacaggtgcccaccaccaagccagctaatttttctatttttagtacagatggggtttcaccatgttggccaggctggtctcgaactcctgaagttgtgatctgcccatcttggcctcccaaagtgctgggattacaggtgtgaaccactgcacccgggctcattttttttttttttaaaccaggcaggtcgtagtggctcacacctgtaatcccagcgttttgggaggccaaggtgggcggatcacttgacgccaggagttcaagaccagcctggccaactcgacaaaaccctgtctctactaaaaatacaaaaattagctgggtgtggtggcgcaccagctactccagaggctgaggcaggagaatcgcttgaacctgggaggtggaggttgcagtgagctgagatctcaccactgcactccagcctgggtgacagagtgagactgtgttccaaaaaaaaaagaaaagaaaagaaaagaaagaaaatgcagtgatttgtactgttgcctaaccatcactacaatccagttacagaatgtttccgtcaacctgataagtccttcccacctgtttctggtcaatccagctcccaattccagtcctgtgcaaccactgatctgctttctgtctctaactttgccttttctggatgtttcatataaacagaataatacactatgtggccttttgcttctggttctttcattcaatatgttttttgaaatgcgttcatcctgtagcgtctagagtagtttgttccttttcattgctgagtcgtattccactgtgtggttatgccacatttttttcttaattcaccagctgatggatatttagggttccagttttttttgtcttttttgaataatgctgctacaaatgtttaggtgtctttgtataggtgtgtgttttcatttctcttgggtagattcctaagggtagaactgctgggtcctgtgtttaatttatgattatcttttttttttttgagacagggtctcgctctgttgcccacgctggaatgcagcagtgcaaacatggctcactgcagcctcgacctgctaaactcaagctatcctcttgcctcagcctcctgaatagctgggacgacagacacgcaccaccatgcccagctaatttttttttgtattttttgtagagacaaggttttgccattttgcccaggctagcatttaacattttaagaaatggccagactgtttttcaaagttttcccaccagcaatatatgaggatttgtctctccatatcctcaccaatacttgttttctgtctctttgattataaccatcctagtggacatgacatggtatgtaactgtggttttaattctcatttatctaatgactatgtcgtgtatcttttcatgtagttattagccattcatatacatattatttgaagaaacatctattcaagtcttttgcccatttttatttgtctctttattattgatttgtaaaagttctttatatattttggataccaaccaaaatatatacaaccatatatacaaccatatatagttgtatatgatttgcaactattttctcccagtcttcggctagttttttttcttttttctttctttctttctttttttgagacaggggtctcactgtgtcacccaggctggagtgcagtggcacaatcttggctcacttcaacctccacttcctgggttcaagagattcttgtgcctcagcctcccaagcagctgaaattacaggcgtgcaccaccatagcccagataattttttgtgtttttagtagcaatggccaggctgttttcgctatgttggcaaggctggtctggaactctggcctcaagtgatctggctacctcagcctcccaaagtgctgggatcacaggcatgagccacttcatctggcttcattttttctttcttttctttgagacagtgtctttctctgtcacccagactggagcgcagtagcacaatcacagctcactgcagccccaacttctcaggctcaagtgattgtcacacctcagccccaccaagtagctaggactataggcccgcaccaccatgcctggatagattttatatcttttgtagagatgaggtcttgccaggttgcctaggctggtctcaaactcctgggctcaagcgattcacctgcctcagcctcccaaaatgctgggattacaggtatgagccaccatgcctgaccccttctttttttttttttttttttttttttttttcgtatggagttttgctcttcttgcccaggctggagtgcaatggcaccatcttggctcactgcaacttccgcctcctgggtttaagcgattctcctgcctcagactcccgagtagctgggattacaggcatgcaccaccatgtctggctaattttgtattttttttttttttttttttttttttttagtagagatggggtttctccatgttggccaggctggtcttgaactcccgacctcaggtgacccatccgcctcggcctcccaaagtgctgggattacaggtgtgagccactgcgcgcggcctcctggcctcttattaatggtggcttttgaagtgcaaaaattttaaattttgacaaagtctaacatcaatttttttctcttgtcagttgtctttttgctgttatattcaagttctctgcctaacccaaggtcatgaagactatctcccatggtttcttctagaagttttatggttttagctcttacattcaggtatctgatctatttcaagttttttttttcttatgcatcctgtgagcaaaagatctaaattcaccttttggcatgtggctatccaattgatcacagcagcatttattgaatgcctatcctttcctccatgaaattgtcttggcaccttgtaaaatcaattgaccagaaatgtaagggtttctacttggactctggattctgttccattgacctataaacgcattcttatttattattattattattttcccccgagacggagtcttgctctgtcaccctggctggagtgcagtggcacgatctcagctcactgcaacccccgcctcctgggttcaagcaattctcctgcctcagcctcctgtgtagctggaattataggtgcacaccaccatgcccagctaatttttgcatttttagcagaggcggggtttcaccatgttggccaggctggtctcgaactcctgacctcatgatccacctgcctcggcctctcaaagtgttgggattacaggtgttagccaccgtacctggccttatagttgttgttgtttttaaattcagatacaacttatacacagtaaaattcatcctcttgagtgtacctttcttttttttttcttttcttgagatggagtctcgctcttgtctcccaggctggagtgcaatggctcgaactcagcacactgaaacctccgtctcgtgggttcaagagattctcctgcttcagcctcctgagtagctgagattacaggcgtacgccaccacgcccggctaatttttgtatttttagtagagacggggttttgccatgttggtcaggctggtcttgaactcctgacctcgtgatccacctgcctcagcctcccaaagtcctggaattacaggggtgaaccacgcacccagccttgagtgtgcctttctatgagtcctaagaaacacacacatttgtgcatccaaccccaaaaccaagatacagtatggtcccatcacctctcacaagtccctgtgccccctactgtggacccctctccctcctccccaaccccagacctggtttttgttcacacagttccacccgctccagaaagccatataagttgattcctacagcactccgccctctgactgtggctttgtttccatcccatccttcaatatccaggatgatctttccaaaatgtaaatgtgccctctcctctgtgcttctacttaagtctaaatacaacttgcagggtctggtctttgaccgctactcctgcccatctggacaaacaggatggatggctctcaaacctggtttgcagaacagccacctgagggcttgtcaataccacaccttcctgggtcttagccctagagactgagattcagttgctggagaggagcccaagaatctattttccacacaaggttagggaggtctagaggccacatttgcagaagcacagcttcctctctccacaccttccacacctgtccaggttcacccacgtggcctctgcttcctcccttctcctccaaccccactctctgtctccgcatgctgcatctcctcctgcccagagctctggcattgatttcctcactggggaaagtggcctccttccccaattcccatccaccgattccaacccccttcccatgtcagccagcttctcctctgctcagctgtcacctccactgagaagtctttcctgactccctatgtgagtcattttcccagcatagttgtctcctgtcatttcttatttgtgtgattctttggttaacatcaatcttcctgattggctgtgtgaggatgggcggggtctgtttttgttgtttacgcctgtatccccagcacaaaacatggggctggcatatggtaggtactaaacagatagttgaataaatgaatgagtgaattgtctactctgcctttgcacaagctgctccatcaccaaagagaccttgcctcctcccccacttctttgctgggcccactcataccggttttcctaggaaaactctggagaaaattgaggcaggagccactcattcgtgccccttccagggtggacctcttatcaccctaaggattgtttgttttcctgtcacccacatcaagctgggtggtggccgcagcctttgatctccacctcctaacccctctcccaagtaccctgtgtttgcccagcactgaatgagacagctaaagtgatccctgagagaactaaagtgttccctcaggccgggcgtggtggcttatgcctgtaatcctaacactttgggaggccgaggtgggcagatcacctgaggtcaggagttcaagaccaacttggttaacatggagaaaccccatctttactaaaaatacaaaaattagctgggtgtggtggcaggcgcctgtaatcccagctactccggaggctgaggtaggagaattgcttgaacctgggaggcagagtttgcagtgcgccaagatggcaccactacactccagcctgggtgacagagcgggactctggctcaaaaaaaaataaaataaagtgatccctctaagaggaatccccaggggcccaggccagagctttctccaggtcaccatggctcctcccactgtgccaccctgcctaaccccctcgattttaaaggagaagccaagactctggactttgctcagaaggtggggggcgggggagggagggcttaccctgggtacctctgaggggccagggcgcagccaccacggtaagggtgactgcagatcgaggggcaggccatgttgctggacaccaccctggctggcgtccctctcggcagggtgctctttgccccatggggtgggatccagagctgcagacaggcccccaggcttggccaatgaacagaccaggttcggggagggtgttggaaaagagtggatggggtggttccccttaccttgcagcccccaggccctcccccctccctcccaggtggtcgggactcttgatcttcgctcgtggtactgtctgttcggctgtcttccccgcctctccccaggcacctgcatcctcccttggcacctgctgccaggctaggaagggcaaaaacaatcccagttggcgtagtcagggagtctccgccctcctcccaggtttcctcctcccaggcgcctcccctggacccgcccccatctgcccaagataattttagtttccttgggcctggaatctggacacacagggctcccccccgcctctgacttctctgtccgaagtcgggacaccctcctaccacctgtagagaagcgggagtggatctgaaataaaatccaggaatctgggggttcctagacggagccagacttcggaacgggtgtcctgctactcctgctggggctcctccaggtaaggggaccgagatcggtctcagacgacagcctgccaggcaacccccagccgcaccagggccccaggctgtgccagtctccggctgaactggccggcggcccaggtgggaggattggagccacctggctctccccctcccccgctcggtgatgtcaggccaggggcgggggctggagggggacaggtagttaagggcctggcgtctccctccctgaagacgtggtcccagccgggtgtcctgacgctcggggttcaggtaagaacccaagcgggcatttatcctttgggggcaggcacggccggtctggaggccggtagggaaaggctgggtctcctgatgggttgcttggcctcccacttttctcttttctgtccatttcccaccctgccccctcctccccacccgccctcttttcgtccccatcctggtttccagcgctccttgttccctccctgtacacctccctgcaggcagcagctgagaatgggaaggaagacctgattctctcctccgacttggctttcccgctgaaactagcccctccccgcacacccggggagagccgccctcactctctggctcgcccagtttaccccagtttgggtttccccaagtctctaagacagacgtctctgcgggctgcggggagatgtggggagggccccctccactttggagggcagtgaaggagagggatcctctaaattgtcgaggcttcatctctccagattgtatgcccttctcagcaacaccgcctccggccctccgatgggaaagtggaggccgggtgagacggggtccctcctggcttcagcatgaaatgggcaggaaggctggaggggtgtatgaggggctctgcagtgcggtggggcctggggagagtggggtgggggatagcagatggtttcttctgcttgatgaggctagggagagacccaggttcccggtctgggtctccctggcagattgaggacagagaatgaatgcatctgccggcaaggtggaacgccccccaccccgccccccaactagccgcaccgccccccaggaatgccctcttttggtccgccggtcttggactctgctctcccctctcctgatatcctactgtatgcttggtggggggacctcatggaggcgggcagcctgtaatgattaactgcagagacactccagcattcttcccgaattaaactttaaaagagctgccccgccttctcccattgggtatttttcctgagtgagagtgggcggggcctcagagtcctgggtcctcccttatactaggagtcatccaggggtttctcaccttctcacctgggccctgcaccctaaaaaattataagcctctcccgtgggggcggggcgtggagtactgggcggacgggggctctcccgccacatccaggcccctggcccaggcctcagtcccgcaagcccttccccctgctctgggaagcagagttgttttctgttggccctgaacaccgggccccgccacctgcccttagggccagccaggtggggcgtgattcaggaagtaaacaaggaggttgggaggacgggaacgcgggtggggctggaaccactgggggaggaggcagctgggaagccacggacggagttacctcgttgaggggacaaactgattttgggggtcggtgtttccaaccgaagctttaccggggcctcagtttgaaaactccagatctctaagctgccaggcccacagccaggaccccttcctcctccctgctcaccccattggtcttgacgattccacccgcctccagccttagaagcttaagggcacggctggggggctctgaaggcaaaccccagccttggactggccctctctgatctctgaggccaggctctaatgtgatttgaatctacttctaaccccttccaagcactgccctcccgaattctctgctcctctccccaccccactgttggtctgtgatttcgaggcaggcgtggccccctgcagcctggaatgaagtcactggggctgtttggagaccggggctgtttggaggttagactggggtgggagtgggggattgtgttctggtattgaggtgctggtgtctcttgctagcgggtgatgggtgtgtcgtgcccctcctggcaggaccctgagccccctccctggcctttcatcctgtctgtcttcttgagtgttttccctttccactcctgctcctgtggtacccctctggccgggacacccaggagaatgtgtcaggaggaacttcatccacacagggcaggggctctgagcgatgctttgggtggggaggggcaccgccgggatgctggcttctctccaaatgggcctctgaatccaggccgggcattgcctctctccttcccaggcgagggactccctggcgaggaggtggtttgggactgggggtgagagcagatcgtaggtcccacctggcctggagctaggccgagggtggggaggaggaggtgatgtcaggagcctcaggcccacatcctcctcccccatcctgttcccagccccgtgcctcccccattccgctctggctagcagtgggttggggagttgggggaagggtggaggcagggctgtttttgtttctcctaagccaggaagttgtgtggatgagtcaaggttgaatggagagccctaggcagtgttgtcccgcccgccctgactcacctgtcccccaaatcccctgatgccctcactgaagggtcaggtgcctgctccctcctgaggggtcaatcccaggtgccccaggtggcctcatagtactggcccagtgtttggagaacaggctgggggctgggattgcaggttctcccaggtctcagcccggccaaaggggtctgctgggttcctgcggagaaggtgccagccccacctccacctctagtgctcgtctttgcctgctgtcctgtctttacttgtcttgagtgtctgtgcagcccctataagtgataagacatgggtgagattggccttgcctgggggtaccaggtgccctcagacaaatgggtggataggacaggtgcacagtaatggatgatgcggcccccgcacagtgctgagagagagtcattcagtctgaatgtggaaggccaggaaggcttctcagaggaggtggctctagcactggggcttcaggaaagagttgggcaggaggatggcctggggagggtacgcaaggtttgggggctgctggggccaggacccctaccccaggccctgctctcccccttgcactgcagcggagcccgctctcctgcctttctgactcccatccttccccacctccttctcccctctgcatcactcatcacttgggcaggccaaacctcgccaagtatgaacaggctctggcaactgggtctggcaacaaagtgctggaaaaacccggggcacagcccagcgcagtgagtgccccacacgtggaggcaaaggagtgggcctttgccctgaccctgagggctgagcctgagagtctgtgggttgtgaaatctgttgtgaccaccaggcttgtggtgggtggaccctcagctcttcctgtgagcaactttgtgctaaagaaagagcactggagccgggcgtggtggcttacgcctgtaatcccagcactttgggaggccaaggcgggcggatcaggagttcaagaccagcctggccaacatggtgaaaccctgtctctactaaaaatacaaaaattagacgggcgtggtggtgggcacctgtaatcccagttactcgggaggttaaggcacgagaattacttgaacccaggaggtggaggttgcagtgagtggagatgacgccgctgcaaaaaaaaaaaaaaaaaaggagaaaaaaaacagaaagagcactggacttggagtctaaacacaggttctactcccgactcacctgtgactgagggcaagaatgctttcttctcagagactcggtgtccccttttgtaaaatgaggctcattctgtccttccccaagggcttcagggaaactccagttagagcagtgaggtgctaggtaaactctgaggggcaccctaaccgccgtgtgaggtcaggaggtctgaattctctcatcccctctccccaggacaagggcacacaactggttccgttaagcccctctcttgctcagacgccatggagctggatctgtctccacctcatcttagcagctctccggaagacctttgcccagcccctgggacccctcctgggactccccggccccctgatacccctctgcctgaggaggtaaagaggtcccagcctctcctcatcccaaccaccggcaggtacgatggggcgtggggcttgggggaggtcagtgctggataatacacagaggcttgcaggccactgctcccttccccacacctctctccctttttcttcttgccacaggaaacttcgagaggaggagaggcgtgccacctccctcccctctatccccaaccccttccctgagctctgcagtcctccctcacagagcccaattctcgggggcccctccagtgcaagggggctgctcccccgcgatgccagccgcccccatgtgagttgtccctcagaagggaagggagggatgcacgggttctgggtctgtgggagatacacagccgcttccatggaggcaggggatcttggttaggagtccctgagggtctagcaggtgcggaaagggaatgaatcaccctttgcctcccctcaagtcgtgtgcaattcctggggcgcaggtagtaaaggtgtacagtgaggatggggcctgcaggtctgtggaggtggcagcaggtgccacagctcgccacgtgtgtgaaatgctggtgcagcgagctcacgccttgagcgacgagacctgggggctggtggagtgccacccccacctagcactgggtaagtcaggtgcatggaactatccgggctgggagatgatgccttgcatcttgggctaggcatgtggctcatccaggagatctggttgatctccaataacccctgctttttgcccttgtccccagagcggggtttggaggaccacgagtccgtggtggaagtgcaggctgcctggcccgtgggcggagatagccgcttcgtcttccggaaaaacttcgccaagtacgaactgttcaagagctccccagtgagtgcatgagggctgtctgggcgctgggatgccctgatcctcaacctggatgctggagccctgatccctgacacttgtctacccacagcactccctgttcccagaaaaaatggtctccagctgtctcgatgcacacactggtatatcccatgaagacctcatccaggtggggggaccccccatttcactgcagattcacgactccccagcattggccagtgcttctccacccttaagtcctgtgcctcccctctatgttgtagaaagagccaaatcacagtcctgtgtgactggggacagtcactttccctgcctgagcatcagtttcttctattaaatgggggcgagaaatgcatgtggagcatttccttgtaaaaacctgagggtgggctgggcacggtggctcatgcctataatcccagcactttgggaggctgaggcgggaggattacttaagcctagaagtttgagagtttgagaccagcctgggcaacataatgagacctcgtctctccaaaaaaaaaaaaaaaaaaaaaaaaaaggccaggaatggtggcatgagcctgtagtcccaggtgcttgggaggctgaggtgggaggatcacttgagctcgggaggtcgaggttgcagtgagctgtgatcgtgccaccgcactagcatgagaccctgtctcaaaaagaaaaagaaaaagagaaacatcctggtggtagaggggaagggaggaggtcagacctgtcactctcctctgctctcctctggctcagaacttcctgaatgctggcagctttcctgagatccagggctttctgcagctgcggggttcaggacggaagctttggaaacgctttttctgcttcttgcgccgatctggcctctattactccaccaagggcacctctaaggtaaggtcttgagggtaccagccccagcccctccagtccctggtccttttagaagttgccccttctctgctggaacctctgagcccttctccccctgggccccccaggccagccacctccagtttaccatctctccctacatccttgcctagctcacctgcccagggaggtagcaggagaaaagatgatcttagtttaagtcctggctctacttctatttgctgtgtgaccctgggtattcccctgcccctctctggtcctgaaatctccccacctggcttgtggggggaggtaatagtgggcgggatctacctgtaccaagtcctgctcactcatgctgcttaggatccgaggcacctgcagtacgtggcagatgtgaacgagtccaacgtgtacgtggtgacgcagggccgcaagctctacgggatgcccactgacttcggtttctgtgtcaaggtgaagacctggccaggcctggcccctggcctggggaagcaggaactgctcaggcccctggatcctgcccggggcttctgagccccaattcagacacctagactcctctccctgcaccctggcctgctggaaactcctggattcagctctgctatgtggagcaggggcagacatgtggtcctaaaggcagatatgggaccagtcaatttcctctctctgcagcccaacaagcttcgaaatggccacaaggggcttcggatcttctgcagtgaagatgagcagagccgcacctgctggctggctgccttccgcctcttcaaggtgagaccctgggagtggcatggggggctggcctggccagagggatccccagctctgccctcaggaagtctcaggaatgaggagggcatcacagccttgctctctgataacccccagtccaagcctgaagttataggaagtgcccatcgaaggcagaaacacagccctggtctgggcaagtcctggtctgaggggggcgtcacagccacgcccccaggacctctcgacctcaagctctctttctctccccacccccagtacggggtgcagctgtacaagaattaccagcaggcacagtctcgccatctgcatccatcttgtttgggctccccacccttggtgagtgtgcccaaggggatgggagggtgggtatgcaggccctgtcttacgggtacctgggccctgttctgacctctctcctctccttccatctccagagaagtgcctcagataataccctggtggccatggacttctctggccatgctgggcgtgtcattgagaacccccgggaggctctgagtgtggccctggaggaggcccaggcctggagggtgaggcctgctgtgtgtgtgtgtgtttgtgctggggacccactctctgggtgggatccctgaaataggagggaggaagagagggcggggggaggcccctggctgggaagaagtgctctaccttcctgaggtgctgggtaatgcccccaagcacgccccgactctcccgtatctcccactgctccacagaagaagacaaaccaccgcctcagcctgcccatgccagcctccggcacgagcctcagtgcaggtgggtgacggccccgagtcctggggcgggggctgcctcaacttctctttgtattcccagtggggagtagatggtataggggtcccctccccaaagtgaccgcccatgtccttccccaccacagccatccaccgcacccaactctggttccacgggcgcatttcccgtgaggagagccagcggcttattggacagcagggcttggtagacgggtaaggggcagggccgggcaacagacccagggataagagagactggggtccaggtggcagccatggtccttgggtagtaatgctgccccatctcctgtcttctggcagcctgttcctggtccgggagagtcagcggaacccccagggctttgtcctctctttgtgccacctgcagaaagtgaagcattatctcatcctgccggtgagcttccctgcgtccccggagtcctgcaatgagacacaggactcccagcaacctgtcctcctcaccaggcccctccagaggctccctggcccccagtgcgtctcccttttccctgcacaagaagtgggaggctgagtgcggtggctcacacctgtaatcccagcacttaggacggccaaggtgggagaatggcttgagcccaggagttcgagaccagcctgggcaacacagggagaccccatctctacaaataatttaaaaatgagccaggcatggtggtgcacacctgtagtccagctactcaggaggctgaggtgggagcattgcttgagcccagagggtcaaggctgcagtgagccatggtggcaccaccacactccagcctggatgacacagtgagaaaactgtctcaaaaaaaaaaaaagaaagaaaaagaaaaagaaaaaagaaaagaataaaaggaaatggtggggccctggcccaggagggagcttcccaagcctcgggcccctccctgaacttccaccccctttactgtaccccagagcgaggaggagggccgcctgtacttcagcatggatgatggccagacccgcttcactgacctgctgcagctcgtggagttccaccagctgaaccgcggcatcctgccgtgcttgctgcgccattgctgcacgcgggtggccctctgaccaggccgtggactggctcatgcctcagcccgccttcaggctgcccgccgcccctccacccatccagtggactctggggcgcggccacaggggacgggatgaggagcgggagggttccgccactccagttttctcctctgcttctttgcctccctcagatagaaaacagcccccactccagtccactcctgacccctctcctcaagggaaggccttgggtggccccctctccttctcctagctctggaggtgctgctctagggcagggaattatgggagaagtgggggcagcccaggcggtttcacgccccacactttgtacagaccgagaggccagttgatctgctctgttttatactagtgacaataaagattattttttgatacacctatgagttctgtctggcaaggcctggctggctgaatcaagaagggaaccagagctggacgtggtggctcatgcctgtaatcccagcactttgggaggccaaggtaggagaattgcttgagtccaggagtttgagaccagcctgggcaacatggcaagaccctgtccctacaaaaaataaaaaaatgagccgggcatggtggtgtgcacctgtagtcccagcttctcaggaggctgaggtgggaggatcccttgttccttgagcctgggatgtcaaggttgcagtgaactgagattgtgccgctgcactcagcctgagtgacagagtgagaccctgtctggaaaaaaaaagaggggagacctggagaggtgggcacctgtggaggccttggtggaagtgtcaaatggatcgaggccatgtctcagcctgcctggatgttcctcaagggcaggagtggttatctgagagtctccagtgcccaccatgcagcttgacacatagtaggcgcccagtcattgctaattaagtaagtgaatagacaagagaccatcatcccagagagattttctgacagtctaagtctagagaggtaattaacagggcctgggagttggagatgagtccgacagcatgcttgtcctccgctagtcctggactagctgacggatagttggccccagcatgcacacagttatgcatccagccccaccaccaagacacagaatggcctcatcacccccaacaagtccctgtgccccctactatcagccatgctccctcctacccaaactgaaacctcctttctgtcctagttctgccccttccagaaagccatataaatggagcctgctagcattcagccctctgcatctggcttccatctccaacacatccttcagcacccagagtgatcttttctcaaatataaattcaccactcccggcagggcactgtggctcacacctgtaatcccagcactttgggaggccgaggcgggcggatcacgaggtcaggagtttgagaccagcctggccaacatggcaaaaccccatctctactaaaaatacaaaaattagctgggcatggtggcgggcacctgtaatcccagctactagggaggctgaggcaggagaatagcttgaaccggggaggcagaggttgcagtgagccaagatcatgccattgcactccagcctgggcaacaagagcaagactcagtcttaaaaaaaaagacagatgtctggcctctgcccactgctcatgccagtctatgtttttgtcttagaggtttttttgttttgttttttgagatggagtctcactctgttgcgcaagctggaatgcagtggcacgatctcagctcactacaacctccttctcctgggttcaagcgattctcttgcctcatcctcccaagtaactgggattacaggcgcttgccaccacgcctggctaattttttgtatttgtggtagagacggggtttcaccatgttggccagcctggccttgaactcctgacctcaagtgatccactcaccttggcctcccaaagtgctgggattacacacccaagccactgcgcctggccttgtctaagagttttttagtttgagctcttacctgatgggagctctttaataaatatgtcagatcgactgcatctgaacttgctgcttaactcaggagacagaccctcctgcagacctgtgaaccccaactagtcattgtttttgtcaaaacaccaaacctgaatctgattccttggattcaacaactagtttacgggaaatacaagggaaacaatgacaaaaatccagattgggaaattctacagaacagataacccagtttcttcttcaacagcaacaaaattaccagaaaagatgggcaatctctagatttcaagaaatttagacatatatcaaccaaatgatgtgttgacctttgattcaaatgcaaactaactgtaaaaagcatttatgagcaattgggggaaatttgaattctgatcagatattcgatgatattaagggattatggctaactttctaaggtgtaataatggtattgcagttacggttttttctaaatctttatctttaagaaattcattatgaagtatttaaaggtgaaatcacatgatgtctcagctttgtttttattccttttcttttttttttttccaacttttattttagattcagggagtacatgtgcaggtttattacctgggtatattgagtaatgctgaagctttgtttttaaaataacccagaggtggccaggcacagtgggtcatgcctgtaatcccagtactttgggagctgaggtgggaggagtttgagaccagcctgggcaacatagtgaggccctctctacaaaaataaaaaataaaaaattagccaggtgtggtgacatgcatctgtggtcccagctacctgggaggctggggtgaaaggatcgtttgagcccaggaagtcaaggctggtgtgagccatgattgcatctctgcactccagcctgggccacagaacatgaccttgtctcaaaaaataaaaagaaaaaaatgaaatccagaggttaaaggagagggtgtgggcatagtcatggtgtggccatgagttgacactggctgttgatattggttgaagcttggtgacaggtactggctatgtggggatttgttaaattatcctctccacctttgtatatgcttggatattctattatatattgatatattttaatggagagccccttctcaaatctttgggactgactgggcaggaggtggtgagacgctgttttgtaggtgaggaaactgacggcccagtgggcagcctggccccagatcacagtgggagagccaagattccaacccaggtctgaggaccaggtctgggcatgttctgcttcccctgtctggctgacgtccaggtggcattcctcagccacagtgacagcaatagtggcctactggggtcctcccttagagagcccctcccttccctgcagccttggtctctggcctggagggttgtcctgaggtgaccttgagactgtgcagcctctgcaatcagcccctgggctgggtctggcagccctggcagccactcccgaccaaggcacccccatccttggctaactccaggctgggaagctgggaccaggtccagcagacagaggtgggcagagaggtctcatgcacaccccagcctgggacctcctgggaatctgctggaagaacttactgcagcccaagggcaggaagggtggcagattttgcttctttttagcaggactggaggcaggacccagtgcaacctgctgcctgccacctgccacggttcccagagccatccccaccacaggctgtggctcgagcaccgaacagggcagtgtcagctgtgtggctggccatgggtgcccagggccacctccgaggtgtgggtgccagagttccaggctggagtgagagtaaaggggtcaagatgagtcacctcttcagcatgtccaggggttcagactgtaaaaaaagaggacccagtgtcccttcacagcctgaggcactgggcagagacaaagcctctctgtcaatcagctaattggagactgtgagacagatgtccttcccactttacaaatgggaaactgaggctcagggaaagacagggactcacctgcgacaggggtcgcagagggagttcgggacagaggccagactcagcccactggacaggtggtgaaatgcagccctgccctgctctagcctttgttctctgccccctcccttctcagtgctggccacagtgagggacctaggctgccgagagcccttagagggggcagcatttggccctgatctggccacctgagaccagcagcagcccattcttggtgagtgtctgagatttctggctttttggagacgtagctgctaagagtttgggggcacagggaccctctcagggccagctcacagtggaacccctgggtaagatcccccagctctgaggatgtgggaaggatgctgctctacctcagagactgcagcatgacctacagtggtcagacagcagaaaggactgccaaggacggctgcagtgctagatcggggaggcttgtggttctgagaaaatctgggctggtgggaggggaagcaggggcttctctgggggagagggtgggggctgggacctcagatactgtcttttcaaaattgatttattgggtttcattctaaaattatacgtacttattaaaaacatttcagaaaaaaacttgagggcaaaggggaaattcctcatcatctttccatgcagaggaggacccagtactgagagagggtgacagggcccacatctggggagctgacgcgaagtgctgcctgccatgcatcacacgttccagcttcccgggaccagcgtggccggtgggagccgggtgccagggcacattgctatccttggcagcaccatgggcctttagggtaggggttctgtggagggtgtggctacaatgttggcctccctgcctgctcaagtgtggaggggagggaggactgctgccaacgctctggactctgggatgggggtgggcatgattccaggggagcccacctccctgggcggggcatccagacaaagccctggccagttctgcaacatccaagttcacgggtggtggacaggcccaagggttcaacatcaggtcagggaccctgcctggctccttccttgggccccagtgccaggcaccctgatgagggatgaagagaggaaggacaggacacagacaggggagcccaaagccacttggaaggattctttcttccaaactatccacataagcagttttctaactccttcccagagcccaagggttctggcaggggcttgaggggcaggttggggtggtgatgggggatgcattgcctttctatctggaacttgagccttatggtatattcaggaaaaaggcttgaaccagtgaagtactgatctggtccaacagatagaaagagggcccagagaggtcagggcttggtccaactcgcacagtggtggggcgtctgcagactgctttcctgtcctgtgctgttggcagaacctcagctttgggacttgagggggagtatgcagtggcaattaggacaaacgactctgagctctcagttgagttgggggaggagagaaaagaaggagttagatcctgggggagttggatgttgcagactggactccagagcctgggggtgtgggcgatcctggggtgtggggagggcgggctgaggctgctccacaagcgttctcgaagttcaccatacaagaaggggcggtgtggggaaatggggatgaggcctgaaattcaatcccatgtgggttgagttatgatgtcatctgacaccctctcacacggctgcatctaccccaaggaaggggcaagtttttctttgatgggcacctgggggggctgtttagctggagttttttttgtttcgctttttttgtttttgtgttttttttgagacaagtttcgctctgtggcccaggctggagtgcaatggtgtgatctcggtttaccgcaacctccacctcctgggttcaagcaattctcctgcctcagcctcccaagtagctgggattacagacatgcaccaccacgcccagcaattttgtatttttagtagagatggggtttatccacgttggtgaagctcgtctcgaactcccgacttcatgtgatccgcccgcctcagcctcccaaagtgctgggattacaggtgtgagccaccgcgccgggcctggagctgcatttttgttgtaagcactttgttcttacttggattaggtttattttagggtggtttggggcagactgagggagattggaaggcagaaaccaccccctcaggacaaccacgtggatctccttagggtctgggtagtggaactgggccctgtgaccttggagttggaggggaagctgtaagcagggatggaacgggccacccgcaccctcacacagctgtgaccaacaggcacggtcatccgcattcacctgcccaactcccatgccctgagtcctgtcctccagggcattcctactggcactaccccaatttcccaaaagattccagggatctctctctcgctctctctttttttttttttacagtctcactctgttgcccaggctggagtgcagtggctgatctcagctcactgcaacctccaccccctgggttcaagcgattttcctgcctcagcctcttgagtagtttgggattacaggcgtgcgccaccacgcccagctaatttttgtatttttagtagacggggttttgccatgttggccagactgatctcaaactcctgacctcaagtgatcctcccgctttggcctcccaagggagggttccttcctcccaggctgaggcaccctgccccacacatctactggaggaacttagtgttggggccagggggtggctgggtaaggctggatcccacacttgtcaggccaggttggggtaggggaggatacacgggggacccgtctctcagccgttctgggccggtgcctgaggcgatctgccccgccgcccgcccttccgccaccacccaagtcgcatgcgcgcgccggggccgacgggcgccaggctccaccgagccaccctccgtcgtggcggcccctcgtgcctctgcggagggaaggccgccggcttcgccagggggcgcgcgtcggggtcgcggctctttgaactcggccccacgaggggacgcgccatcggtttcgtggcttgcgtggcgccgcagcaacgagccggtcgccccggggcgttgcttagtccgggcctcgctgcgagtctgtgggcgaggcgggaggtgcttccttggccaggcgggtggaggaaggtgtgggcgccgcatcccagcgtcgcggagcctccaggcgcgggcaggcgagactggcgtgcagcgcgacggcctagtcccggcgtcccaccgtcccccactcccgcaggcgccgagccgattcagccgcgcggctgcagtgacacccagcggccgtcgcgggaagtgcggtcgccgcggccaggcctccggggctcctgtctctcgaggttcccaccccggttacgcgcgggcaccccggaggagagcggccgcgcgctgcagatgcccgcgggggcacttcccctgcccctcccccgtttcctccccgcaggcgcccgagcgccgggagatcctgcgcagcggcagtgcccggaagggcggggcggggtgcagcagcggcgctgggctgtgacccgggcagtttcacttctggatcctgctcgggctgtgataggacagcgcgggggcagcgggggaacacgcgggcacgccgagatccggcgctcgggaccccgatgaggggaggcctttcactcctggggtgtcacgcgacccacgctttcctccatgtccactcccaccccccatgggttccactttgctgtcccccgagctgccgctcctccccagcagacaccgtctccgccggggctgccgacccccggagaggccccgagcggcgtgggcggcgggaggagggagctgtgaagccgcaggcagggggttaggctgcgggctgctgagacgccgagctgtttctcagaagtgcagctgcccctcccctcacacccccctcactcccaccgcgcgccgcacccctgccccctctccgccggcctccctttcctctcccaggcaccctagccgggaatctggggtctgggtccacgcagaattaagaggagaacctgagaaagggcgggggccgggggttcagacccagcctcagcgcgcgttattccgagcctcctataattccacaggtgaggggatcctgtcccctacccctggggtccaggattggaatttgatagaacagttaggaaaatgacatcttgagagagtcagggcccggccactattactctagctccagcgtccagtgaggagaggagagagagggaagacctggagcccggctggtgcagtgaggttgaggcctgtcttaggagtaccagctggaaggcccttcagagatccctgactctggggaaaatcaacgcccagaaggggaagtcaagtgtctgggctcatcccgagagggagagggctgggattggaaccaggactccaaatagttgcgggagtctgcgactgtcttttgcttgggacttcagagctttgctggattcactgactcagcctgctttccctcaacacacacaaacacacacacacgagacacgtgcacgcgcgcacacacacagatacacagacacacacagacagacatgcaaggagagagacaggcacacatggagacagacacgcacacgcaaagagacacacagctccccaggagtctagcggggcagctgaggtctgtgagtgagacattctcagtgagacactgagaatgcaattccagtgggggtgggatggggattgggcggtggaaggacaagcccgggggaggaggtggcatcgcccccctagttcccatccaccaccacccccagtgctgtggtttatttgcctaggcagctcttctgggccagggggccagggtactggggtggagaggcgaggtgatgggaaaggctgttctggggcttcctgccccctcactcctggggaaggggggtagctgccatcacccgcaggcctttccactgcagccctttccttgggtatgtgtgttattctgggggaagatctgttatttgcggagaagggaggcagctgcctacttcacaggtcaagacagagttaaaaacaaaaccacagcaaattcaacaccccgtgtccttcagggactttccatgacaccttccttcccccctctcccctaagccagggagcacctccccagagggcctccccaccccaggtgcagtggcttttggcttttatgcaaacaactgtctgatcccggaatgctccacagcccgaactgtggcctgggccgaatgtgcccctccaccatcccttgggccagtgtttctggtcttcctggagttgtgacctccactcttcctcagaccctggattctgagggacaggagatgagggcaggaagctaggtcctttccccctgcctgccctcgggtggcagttgcctgcaggtggagggtttgggcacagcaacctaagtgaatggtccggggttttgagtgatgggggaggggaagaaggagggtgcaggtgtggggtggcctccactgccaggcccaccaccctctagggcattgaattagctcccaagatcaggaaggaaaactcttctcaggctgggagtccattcaaccccaacgccagtgtggacctccggtcctgctcactggcaaagggggtcaggatctccctgtctccctctcttctgcctgagctgcttctgctttggggagggatttggggatggggaaggccatataatcttctctccagggctgaaaaccagctactgaggggccgtttttgaatgtattcagtgctaaaatgcaaaggcagggtgccatgccattcctttctcctcctcagcttgagcaagactgggaaacctgtaggagaccctcagccagtttgaacattttggagtgctgatgggagggagatgatgctgatcatggagccagaggacgctggtgccagcctagccccacatttgttagtcttaaaacttcagacaatctttctcatgcctcttccacagaagacggaaaatggagggtgctttagatgaggctgagcagaaggccagactctctctctactttctctaacgttttctaagagagaacacaatgatgatggaaagaaagcagcctcatccctatgccattctcctaggacttttccccctaacaccttcggtttgggtctccaggtatctaaaaactgtatttaaatatggtcgagtttaaggactgcaactcaagtttcccaatgtggatgtctgtgagcccccacacatgaaaaagtcagaacttgactgtattttaagaagaatctctgttgagggaggaaggcagagcagtgacttggaataggggtgcaccatgctgaatgtgctgatcatgctaagtccaggtcctcaacctcctccagtttccttagtgaactaaggaccagtggaaccaggaaccctatcttgtgggttacaggggccagcagcaggatcacagtggtaggctcagcaaggcgtcaggtgagaacctttatttcagtgataattcatttttcttgataactggactttaagaaatagaggggcaaaattaagaaagtattccttggggcgggatgaaacccttctacatcctgacaccagcagacacaaatcataagtgataaggatgcacaaggactaatttcaaacataccaggatttttttatttttcagtgtaaaaatcaaacatgataaacctagaaaactatcagcagggctatttcttacagggttccagcaagggttagcattgttacatttcagaagctgactttctttaaaccatctttacagaggagtaaacttcacagttccacacatggctgggctccaggtagaactccataggagtgacgagggaaagtcaccactgggcagggagggcatttctgagaaatgcagatgagaggagaggctgtgagcacaggctgtgtcaaaacccagggcaagggctccctcccgccttccctcccagtgggaaggccaccctgagccccaaaccacattctgttccttcctcgtcattctgcagacaatggtcatccacagaccacacgtgtggtggctttggcaaccagaaatttaaaataagctatggtttttccagtagccaaaatgatcctgcaccaaagctcatagactgagaacctgagcatgcaaaaccacagtctgggtgaagggatgtctgctttgtaaatgacctgctaattctttgcaacccacagtaatttggtttctgtgaacccacagaagcaggcccaccaaaaagggccttgtctgctagcctggagtatacatgagtcactggcggtgggatcagtcattttttaggctgccccattttcctaacatgttaaaatgtgtgttctcagtcttttcaagagaggaagaagcaaagcggcacttacagagtgtgagatagacacagatctgtggcgagggattggggaaggtgggtggcatcttgggactctctccaggctttctggagtggggtcagtggagagatgaacagtgagaaacatttgaaataactcaagttttggagcagcggggggtggggtactaatggctgaggactcacagacagtgagggagcaaagcgctttgacttccctgggtgcgacaccatgaagtgtctatagcacgtggttagctcacgctggttccaagggtcagcagatcctctgcccttgtgcattaaaacaacatgaaggaaactgttagagatcagttacctccataattcatttgtaaaggaattgctattatgatctagtatgatcttgggatatttttcatgtctttaaatttaggacacggtacattttccactgaaaatttacaatcatccaacataatgcacaccacccctcaaaggtaacattagctcatatacaaaatcatggaaaacctcacaacatccttggaaggtagatattgttatatccttacaaaaatttaatacacccattaacattcctatttcaaatagctcaatcgatatcaacacataagacagcccacaattgtgatacagtattaagaagaaactcaggccagccgcggtgcctcacgcctgtaaccccaacactttgggaggctgaggtgggcagattacttgagcccaggagttcaggaccagcctgggcaacatggtgagaccctgtctctacaaaaagtacaaaaattagctgggtgtggtgacccacgcctgtagtctcagctagttgggaggctaagacgggaggatggctcgttgcttgagcccaggaggttgaggcggcaagtaagccttgattgtgccactgcactcagcctggggaaacagagcgagactttgtctcaaaaagaaaaaaaaaaagaggaaacttgtatccaatttattcaaactgcaaaaccctgtgtatcttcataacaatggtggggcaaagactatctacagctggggcaagggagaggcacagtcttgtgttactttacaagctctcagaagtttaaagcccacaattgtccttcaggctcttctgagtccatggtcctaaagggtcaggagtcctgaaccctggcttattctcagaaccattcagtcgtgctgccttggagaacagagtccttttcctgaggtggcccaggtccagctgctggtttcagatcaaaattgacctccttcatcggcacttatatctcaaatcattctccttgtctgaactctggatatagaggttttttgaactatactttctgtgtgaacacaaaaatagcttcccattctctaaaagatgaggtatcactatatatcgggtttttttcttctgttcctggtgctaacttttaggacaaagtttcaccactcccttttctcttcttgagctcacaagtcccgatgctgactctttgagtcctcagatagccaggctctttcacatcttgagtgtcccagagtttccaaatctctgctagagtccaacatacctcttctcagtggggtactctttaaagtgaggacttaaacatttccattgtggtcttatcacctgggattatatgtaacagtactatttttttccttaaaacattctttttttttttttttttgagatggagtctcactctgttgtccaggctggattgcaatggcgcgatctcggctcactgcaacctccacctcccaggttcaagcaattctcctgcgtcagcctcccgagtagctgggattacaggtgtgcaccaccacacccagctaatttttgtattttttttttcgagatggagtctcactctgtcacccaggctggagtgcaatggcacgatctcggctcaccacaacctcctcctcctgggttcaagcgattctcctgcctcagcctcctaagtagctgggattacaggcatgtgccaccacgcctggctaattttgtatttttagtagagacagggtttctccatgttggtcaggctggtctcgaactcccaaactcaggtgatccgcccgccttggcctcccaaagtgctgggattacaggcgtgagccaccgcacctgaccctccttaaaacattctaaacctcacattcagtagggcttggggaggtgggggtggtacaggaaataggagaataatagtgatacagatgctacctggaaaaactttgttctgtctgttcctcacgaaacaaagccgaaaagaaaaactttatgtggatgtgagatttgatagtaacacagtgtttcacctgagcaaaattttgtgtttttaaacatttctgtttgccaaagaaatctgaggttgtggctgggcgcagtggctcttgcctgtagttccagcactttgggaggctgaggtgggcagattgcttgagcccaggattttgagactagcctgggcagtatggcgaaacgccatctctgcagaaaaatacaaaaaaaattagctgtgcatggtggtgtgcctatagtcccagctacttgggaggctgaggtaggaggattgtttgagcctaggagatcaaaatctgaggtcattttatatctggccgattttgagtatgggcctaacaaaatgttaagcactgcatttaaaaggtgagaaattttgtcactgacaaagtcagaagctgtgtcaggaacagctcacagtgggtcataaagcataagattagctggcttatctgtgccaaggcgaatgtctttttgggagaataacttgaggaaactaaagactgatgagttcattttctctcttttttttttctggtggtagtggtgggggctcacgggagagacacttctatttagttttctttccgtaggaagtaccgatgcaacacttcaggtagtgacagaaaacatttggagagctgggcattgtttgtgcatgcctgtaatcccagctacttgggaggctgaggcaggattgcttgagcacaggagtttgagtctggcctaggcaacatagtgagaccctggtcctctaaaatatacatacatatatatacatatacaaaaaaaataaaaataaattaaaaaattaaaaaacacctggagcactggttctgtttcttttccaccctcagcccagttctgtcaccttggctgcaaggaaactttgcctgggtttttttgtttgtttgtttgtttttgttttagacagagtttcgctcttgttgccgaggctggagtgcagtggtgccatctcggctcaccgcaacctccgcctcccgggttcaagcgattctcctgcctcagcctcctgagtagctgggattacaggcatgtgccatcacgcccggctaattttgtatttttagtagagatgggggtttctccatgttggtcaggcaggtctcgaactcccaacctcaggtgatctgcctgccccagcctcccaaagtgctggcattacaggcgtgagctatcgcgcccggccctttgcatgggtttggttgttcctcagaccgtggcctcctgggtgtatggtggaaagcccgcctgataagaggctggtgggaaatgaaggagaggggcctacaaggctcttgttcagagggagtctgcatgagaaagtacaggtactatctgaagctgctccagggcttcagtgcccagcagtggcagatgcaagtcctgactctgcccttctgctaagattctccttcaccctcacctccccagccctggcaaggggtttgttaattagtacagcataaggggtatgtacagaaggcagcgtttatctgtgtgatggtaaccactgcatatctggttcaacttcaagacttaaggatgcagagtttccacacataaattttttctggaattgatgggccccaatctaggctcagaatgccacaaagaaagtgcctttgtgagtggtcaccttactcagaaaactaacctcagaagaatagaaatcatgcagcaaattcattagtcacaggaaaaaggaggatcatatctataaaaagagtccccaggctggtggaatgggccttggtttcacaatcttgagatgcaaaaggtggtctcaggctgggtgcggtagctcatgcctgtaatcccagcactgtgggaggccaaggcgggcagatcacctgaggtcaggagtttgagactggcctggccaacatggtgaaaccttgtctctactaaaaatacaaaaattagccgggcttggtggtgagcacctgtaatcccagctacttgggaggctgaggcaggagaattgcttgaacccgggaggcggaggttgccgtgagccgagatcgcgccactgcactccagcctgggcaacagagcgagagactgtctcaaaacaaaagaaaacaaaaaaagttggtctcctctgcaaagacttgaacactaatctggtggaaaggcttcctttccctcgttttctcttctactaatccctgcttccaaattctctttctcttgtcccttgaagaaccaacaggatgtgcgatatttcaagaacgtaatgagcaactcctctttcacaaagggaataagcaatctggcatagcttggagtctagtattacggaaatacagtgatatactgaagactacacaccaaaatacatccattcctttagctgaagtctcaaacatgttgggactgttgccatggaatttcataaaaccttttttcctgagacagacgccatgccacaaagaaggataagccatttgtgcagtctgaggtggaacattttaattactggcagcacatagacgagttgagttggagccgaatgcataagccccttagaaataaaacactaatctaccaggaatttgggattcttggctctggtagaaatgttacaaattaagctgactcttaatttgtaaataggctccatgaagttgtccctggaagcagaatttattttccctaacataatttcttaaaaagtaaaaaaaaaaagaaggctttggcaaacagctgcatgtgccaatttgtgtgtatgctttgtggcaagatcaaaatacctttctgttttttgttcctctccaccaccttcttcacattcacaactcagtggttaaaggaaaaacttaacacaccattttcataccaaaggaatgtgaaacatgtattcatataaatactcttctgcttaatatccatacattaggaggtttaaaaaataccttgtggttactgcataatcacatatgaattaaagctagaagggacctaagagaacattgaaatctaattcctattttatggatgaggaaactgagttttttttgtttttgtttgtttgtttttgttttgttttgtttgagacagggtctcactctgtcgcccagactggagtgcagtagtgtgatctccactcaccgcaacctcaacctcccaggcttaagcgatttttctgcctcagcctccggagtagctgggattacaggcatgtgccactactgcccagctaatttttgtatttttagtagagacagggtttcaccatgtgggtcaggctggtctcgaactcctgacctcaaatgatgcgcctgcctcggcttcccaaagtgttgggattacaggtgtgagccaccgagcctggccggaaactgagttttaagagttaaataaggctgggtgtggtggctcacacctgtaatcccagcactttaggaggctgaggcgggctgattgcttgagcccaggagttcaagaccagcatgggcaacatagtgagacccctatctctacaaaaagaacaaaatgtagccagacatggtggtgtgcacttgttgtcccagtactcaagaggctgaggtgggaggatcacctgagcctggggaggtcgaggctgcactgagccatgattgcaccactgcactccagcctgggcaacagagtgagatcctgtctcaaaaaaaaaaaaaaaaaaaaagttaaacgatttctcaaagtcacatagctaattagccagcattttgtgacctcctattccagtgctaattttaccatgataacagcactcctcctgatagtatgtacatattatgagtgacaaggatgacttatacatctgcagaaccgtgatcagactttcaggaattttcatggaatacagcagttccatttaaatgggaaaaaaagggccgaagcctgcctgatcaaggagaacctctcaatagaggtgtccctcctcaccccattccggagctcaactccgatctaaacacacatgccatctatctccaattcctctcctgtggggagggggaggctgagccatactttttggactttttttgtggaaaatatcattggcaaatttgctttgggtctgtatcaccaattctccatgaactctttcaagaagttttaggtagctgttttttgtttgtttgttttctgttggtgctgccaaacaatttccccctttatacccttgctctgccaaccttgaccaaaggaaagcgatgtcatcatccacagtggataaatttctggagtttcgatgatggtctatatttaaaaccatgagttcttctggcatagattttcttctatagacaactggtttagcccaaagcagctcagcttttcactggagatgggaaggtaaaggacagaagcagaagtgccatcagatgacattttttaaaaatgttgtgataggaaatggatctgatgcttggagaatggggtcttcagttactcgtaacagatacttattttatggctgttcttttacttactcttagactgtcatttagattagggagattagatcttaacccttcagcctgtgaagggcagaagggtgaggcttcccagcaaggtcagctggtcagctcttcctctttgtggatttgcatgtatgactgaaaggcttttccacgtgtggttgatatatctcagaaagaatgtttcatatagcacatctccgggaccactcattccactgctgtagaagataatgaccaaatacctttttggcttttaaattccataaaattcaagtccctgatgggaaaacaaaggtttcacaaaagtaataatatgctagacctgcgaataatttctgaaggaagacagtgtttccctggctacccctgtgaacacagctaaaaatggtatgaaaagaagtttggaactgagtatgttttgagagcaatctgttaggcgaggtcattggtttttagaaacgatgctgaatacataggagcaatccctgagaccagatattcacttcagcagggctctgtgttctcctctggctatgtgagacgagaactcataccgatcatggcttcgatatccacacatgttacactcgaaagggtcacggaagccgtggcagcccatgtgaatcgtgaacatcacatagtccaggaagaggacgcggcagtggtcacaccgatacacatccatcacctccccttccttgttgatcactttgacggagtctcttgggcagatgggcgggggcttgaggagttcgtaagagcggggaacctccttcagaagtggcatcccattgcgggcccgagacaggaccatgtgattttgctgatagatgtgattctggcgttcttcatggttgctgtcagtgtccgtggagtcgtggccactattgttgggagagaggcctctctcagaaggcacgctcttctctggaaggtggatgcttttcttttccagctcttgaggggcaccgtttgacatctcagcccgggtgagggctatgggatacatgctgctgataactggaaccatctccgaggtgggagcaggcggtgtctggaccaaggggcgcagggcttcggcgccaagatagctgatggcgttattgatggcttggtccatcatgcgggtctgtatgagctcactctctttctcatacatgtaacttgaattatagttgacatcaaagcagtggcgcttctcacctggaacaagtgacagaaagggttacaaagggaacactgccaaggcagagagtttgtaaatattttctagagacctcaaaaagggaggagagttaagttgcctgctgctcaagaagaccaagcctggcagaatggtttcccatggtgctgtctcaggggacactggtcggcagcaacgtgtttggatggttaaaataaagccagcaggcagaagagaggggcagagatgtggttcagttgaggccacatggtaaggtatgcccactgtgcatgttagaggagagccctcaagaaaggagggaaagaagcaggacactaggatggggctagagggacaagggagccaccagcccacaggagcctgggacttctgctatagttcatgatctcttaagacacagtcggctcccaactcttattttgcttttgcttgttattttctgcttgcaatattaggtagccagggggacagaagtgctgcaaagagtggggacactcggtgcctcacctcggcagctttttaaatagctacagagatagagaaaatagccccccagactccaactggctactccccaaactcacccgtcctggctgactgagactgaagtgaaagagcttcaaatgtagaaagtttgagaaaagttttcttgagaagagatcatggtctttgtccctttcctaacgtgtgtttctcttcctttgcttggcaagtgtatctctgatacacatgtgatcattagggcctatctcacacttaactgaaaaaatatacttgtggtcaccctctcctacttctcatgtcaaactgctgagaagttttgaaaacagagtttagccaccttcagagtgtgtgggtgttgtgtgttagaaaacagaggctctctggtcacagggaaggcagggatggggactgcagtgagggcagatgtgctcagtggtgagtggtggggagaggggagagaaagcgaggaagtggagccgagtgctggaggtgaggctgaggtcactgttgagcctctccattctgtcagcttggatcctggagggatttgctaaaccatatccttctataatgtttcctagtcatgttgagattccaaaatttgtcactgccctacagtaaagggttcagcaatgaaaataaagaagaagaagaaaaaatgccatgagaaaacaaaaggattggaagaaccagttcctgttcttgaggtgtctccaacctagtggatgagaaataagacctatatatatatagaactcgagaaaaagtataagttaaaagttggccgggcgcggtggctcaggcctgtaatcctagcactttgggaggctgaggagggaggatcacttgagcccaggagttcgagaccagcccgggcaacatggaggaaccttgtctctacaaaaaaatacaaaaattagccaggcatctgtagtcccagctactcaggaggctgaggtgggaggatcacctgagcctgggaggcagagattgtagtgagctgagatggcaccactgcactccagcctgggtggcagagtaagaccttgtctcaaaaaaaaaagttgtaaaaggactgctttgctctatggaggtctttgcttttattctaaatgcccacatttgaggcatttaggcagggaagtaacgtgttctttaaaaagaataataaggtaacatacaggcatcggtgagacaatttggtataaattgtatatttaggcattaagggaatgcagaaacttcagaagtacttggggaagggaaagcattcttggaaaatctaaattttgagaagggtcttgaactggaagaatttagattttcagagaagcgggagaggacatcctagttgagggggagtgcaggaatgaaggcagagaggtgggactacacgggacgtgtgcagaaagcgagtctggctgaaacgcgatcaagaagtatgaaatacagtatttctcaggcttcactcttccttcacattctgcaatatccacacaccagggcagtgtggtggttgagagaataaactctggtgtcagatgggctgggtttgatgctggctccattggtcaccagttttgtgaccttgggcaagtcacttaacctatgttccgtgtcctcatgtaaagtgaagataattgtatgtacctcacagggtcactggaaagcacttagaacagggcctgccacatggaaaacacttggtaaatgcttgggtttttttcctctgtttgatttggttcacattttctttctttttttctttttctaaaataaatgtggtttttaaggaaactttatatcactaacataaacggaaaaccagaatcactttccacaagtagaaggtaactatgaaaaataaagacaatgaaacagagcatttcattaaattttgatcggatactactgtgagtacttggagactaagatcccttccccctttgttaaaaacagagattaccaagtgtgagattagtgttaaagacaactggcatcaaattaagtctaaatttttctccttagtatgatccaggagactgaaagagaactggaaagaaaataattatcctgctgtgtggacccaggtttttaaatgctccatgtgcttgctggcaatttgcatcctacatttggggaaacactgaaaaaagataatgcatggtaggaccgaatggtgggcattccgaatggcccactgtagggtgtgaatccgaaccaagagccaaggctacctgcccttgagaaagacaggtttgtggttaacgtaacagcaatgtgtaaggcagaccagaacagtgagaaattggagccagaagaaccagctaaaagatctattcccatgagatgaatttgtctttgcatccccacaagcagctgaccttaaggccaacctgatagtttccagagaaatacctgagagagaaaaaaaatatgcaaacgaaaataccctgtcttggaaactcaatgagaagcaacagcagagtagaccttggccaaagtaatcaatgttttttattttcagtttccagattggatatatctttggtcaaggccatctggaagactgagaacatgagagccagctaaggtcacagacattcattccctagaatgtgacacagaaatgatgaacttcggtttcttggcctttttaaggttattggttattttccactgtggccacctctattcatctccctaaataccaggggtccttgagaaactttttctcttttcacccaacagagaggctccagaaggtttctgggtggggtaggcacatcacaaactctgattttatcctttctcctaagagtttgctttacttaacaaggcctacaatttcacaatctataccacctgcagcatatgtcagaaaacagctgagtgctaaaattgtaaaaggcaaaacattaagaggaagataaacccctggatgagtggaaatatgtgactgaattctgtagttaacacagaccattgttcattgttaaggagatggggcagcctcagatgttcacgtgcatgcaacttgcaatcatcagatcccctcgtctctgagttacggtaacttgagcagtgcagatgattatcagtcacctgtagacacgatgactcaatgtgtatgaaacccagaaagggtaaactacagtaattgaaaagccaacagctcacgtttctttagtaacacactcataaaaaaggttagtcaaaccacaaaagtgtaactgcttccaaacctgcacggagcatctggtccagcttctagtcaaaatcacaccacgcctttgaatgattcatgataccagcttcaggctgaattagaggtcttcttccaacaaaaatacacacggcaacagcaagtcctaagtttagaaactaaggctgcctggttgggccattccctacctgtggttctttttaaaggtgtcaatgtcttatatcttggctttgttaactctaaactaagaaaccacctgacctgaactgatgcaatgtggtgaggacatatggttgttggcttctaagtgccaacttggaagtacagaatcacaggctagagctaaaagggcccttaactgagcaagtggattcagaactctgtctgcagggttgagggggaagacccaccaccctaatatgtttacttctggtctttatatttcacagtaccttgcactgtgccttatatacaataatcccaataatgataagtactatttattgagcccctgctgtatccaccgtgccatcctagatactttgcatactgtctcattttaccagcccattaggggttgatactttttttttttttttgagacagagtcttgctctgtcacccaggatggagtgcaatggtacgatctcgactcactgcaacctccgtctcctgggttcaagtgattctcttgcctcagcctcccaagtgtctgggactacaggcacgtgccactatgcctggctaatttttgtatgataccttttaaggtatgaattatcatctcttagatgaagaacctaaagcacaaacagtttgattcactttccaagattgcccagttggtgaacagagaaccaggatgtaatccaagagcccacatatcccagtatatgtttgagtgttaactgatgtttcctggctgctaccttgcccatggctgcacagccccaccaccagcagtgacttcaggttttctgctgtgatggttcccatagcagagggaaagggggcttagtggcagcaactgctttttccacatggaccagcacatgcactcaagaagtatatgctgtgcagagttgttatgatatctataaagtgcttagcagtgccaggcatgtgtaagcactctattcccattatttgcttagcaccatggttaggtgatttgaggaatacaacaaaattgcaatccactagaggagatgcagcatgtacatcatttcatgacaaatcagtatccttaatgctacatggtagaacaaaacatagagtagccaagagagtggaaagagaaaactgaattacttctcaaatatgccacacttaatatggggcaaagattcatctattctttaaagtctccttgaaatcagaggtggtggtagtgacggtggtggagacagtcatatctataataagaagcagactagtaaactcgcctggagtgcagagggaggatggagcagagagagaacacaggggtgtgggaatgtggacaatgtgtgcttctttttattttttatttttgagacaaggtctcactctgttgctcaggtgggattgcagtggcgtgatcacagctcactgcagcctcaacctcctgggctcaagtgatactcccacctcagccccctaagtagctgggaccacaggcccatgccaccacacctggctaggtttttgatttttttttttttttcagagacagagtttcactatgttgcttgggccggtctcaaattcctgagctcaagtgatcctcccaccttggtctcctaaagtgctgggattacaggcatgaggcactgtgcctggcctacaatgtgtattttaagggcagatgtgagggaggccattcagacaagagtgagatattacacagaagagggaggaggagttcattgtggctgaagtaaaggactggttggctgaaatgataaaattagaagaggtaagttgaagacagattgtggagggctcagaaggcctgactgaatggtttagatttgattccactgggagccattgaaaggtttttttgaagaggggggcaaaatgatcgaacctttagaaaaataacagaaatccaatatttagagtcaccatgatggggtaaggtgaaatattcaggtcttaagtcttaaagttcttcaagtcacttaaatgtgtttgctgctgcgtcatataatttcccacaagtgttatccctcactcttactatcagcacacatccaaaagcaaatgaacaaaaaaggcaggaaaatagaatatccaaccatcatcatggctctgatctcaacctaagtgaaactaacacttcttgcaggaggtggaaaacagaggggagccagagaacaagaagaaacaggaaggaggaaagaacagagagagctgtgggggtggcactggggaaagctgagctggagaccacatttggttgctgcagaagtctttgtcctctgtgagacactgggaagtgctgtgtggatgtcatctgttctcatggagtcaccagggaagactgttcttttctaaagagaatcacccttgagggagaacaattgcccttcttcaagggtttttttcctcctatcaattttcttttttgtttttgaaacagagtcttgctctgttgcccaagctggtgcgatctcggcttactgcaacttctgcttcctgggttcaagtgattcttgtgcctcagcctcccaaatagttgggattacaggcacccaccaccacacctggctaatttttgtatttttagtagagatagggtttcaccatattggcccggctggtcttgaactcctgacctcaagtgatccacctgcttaggactcccaaagtggggaattacaggtgtgagccactgcacctggcctctcccaccaactttcaatgaccagactccttgctgtccaaagccccgcgcatgacatgcactgctcttggtcacctcctggggaaggaagggcctggactgcagtgccttataggccgaggtctggcgctgctctgtcacctgccagctgtgtcactccacctctctgatcctccttccttccatggtaaaagagcctcactggtggttcctaatagcccaaaaatactatgacattgtaatgcttacaggattatggacatcaggcctttgggaaggggttggaaaaatacttttttttctcttagaaacaggtattaaaactgcttcctgttgctgttaaccaaagcaggcaatttctcattagttacttcacagggagatccgatggtttgttgaagtgtcaaaacctcattaacatgtttaccacaggtgagtgagatctttttttcatgttcttttcgttatgaaaacttcctttaataaagtaatacataaaacttttaaaataaggagatgctatggtaaccactttggtctgaataacatctgtttttttgggaaagaataaaaatcaggagaaatatgcagaaatgtagtcatttttcttctgcatccaagagagaaatccattttgagccaagtatttgaggatggcctagtttgaagtgtagtcaaacaagtttataacaggagaacaagattcagagaaaggaaatcccctaaaggacagtatgtgcaaaggaaggtcttcttgtcctttgaaaagaacaacttaaacagaattattctgacaatgtaaagatggtgattcctgatggacgtgtgtccatttttttttttcccatttgaaacaaagacatacaaaatttcttggagaattagaaaaaaaaatatttttctccaacttgagagcatgtttgtgtctcaaaatacatttagacttgatccaatctgtccctcttccccagttcatctctaatggatgcaaaatgctccctactggtaattatcgccagcccgcctgagatagcagcgggctgacctgatggtctattttcacctttaccctcacagttcaagaggtcagggaagtcaaggctggtctgagtgctgtgcaactgtcagcaaggattaaagggaatgactcactcttccttcacaccttacccattgccattaccctggcagctgaatcttcaaaaaacagtgccttggagaggaaatataggagaaaggagagaagaggagaagagaagggaggagaggagggaagaggaggggagggaacaagaggacaagagaggagaggtgaggtgaggcgaggcaaggcgaggggagatggagagaaaacagtagccccatgttttacatcacttcatctcatacactgcacagtgtcacaaataatgttcctttctccctccgttgacattactattttctatcacaaaggttgattcaattaaataatttaaggggtttcttttatttttaatttttaaaaacctttcaaacaaaagtttaggatataagttaatgcaagaagattagaacagtgcccaaaacaagaataccatatatatgacaggaactcttaaccttctgtatgatgaatgaatggacaaaaaagtgagtgaacaagtagtactgccctaagtaaaacacatgaatgtcgggctaatgcgactgtgttttagattctcagatttataccatcttcctaaaacaaaaaagactctaaaaacctaggatatggtttatagcataaacaccacatctgtatagccttgagaaaaaggctatctgaagttacgcacatgggctttctaaacacacagtggtatcaataattgctgccttttatttcttttctaattaatctcacagacttgtacatgggaggagacttcctggtcacttcatcacctattcagtctcctcatttcacagatgagtaaagagaggcccagaaaggttctgtgattggtctaaacacacagttaagaaatgacagagctaggatcagaacctgggtcttttagcttctaatccagtactcttcttattgcactacaacacaacttacgaaaaaaaaaaaaaattcccccagttattctgggccctgaagccctgaagttgctacctcaatcaagagctaactctactaggtttctgattccagcacagagagaatgtgatggttcagaagatgagagaaatcaacacctacaagatcagcatctctcacaagtctggaagtagtgaagtgaaaatcctctggttgcaattgtagcaaacaaacgaaatagatccccgaggcaacaggcaaaatggcatgaatttgcacatatgaaacatgctatatttttgaacccatgaaataccaaagcaacttttattatattaagtagggctttagttcaactataggtttagggcaaccgaaaatactagggactgtctctcaaattttagttgtcttacaccaaaatgcattgaccacaactggattgaaattaagtcacagctgggcgcagtggctcacgcctgtaatcccagcactttgggaggccaaggcgggtggatcacctgaggtcgggagttcaagaccagcctgaccaacatggagaaaccctgtctctactaaaaatacaaaattagccaggcatggtggtgcatgcctgtaatcccagctactcaggaggctgaggcaggaaaatcgcttgaacccaggaggcagaggttgcggtgagccgagatcgcgccattgcaccccagcctgggcgacaagagtgaaactctgtctcaaaaaaaaaaaaaaaagaaagaaagaaagaaatgaagtcgctttacatttttttcttgcccagctctccctatgatgtccctcctcttgtcggcttcagccatttctagagtcaaagctttctccagaccagcctgggcaacatgaggagactctatctctacaaaaagtttaaaaattagctgagcctggtggtgcgtgcccatagttccagctacttgggaggctggggtaggaggatttcttgagcccaggtgtttgaggctgtgattgcaccacagcacgccagcctaggcagtacagtgagaccccgtctcaaaacaaaccaacaaacaaaacccataactttctccaaactaaaatacactcagaataataaggcaagctttcttttgtactccagtcagaacctcttcacataagtaaagcccaaaagatatatgggaatatttgtagacaatgtcttaaactcaccatttgtttactgtgcctaaactctaaatggaagtcactacatgctcccctgacatgtctcaccaaggggagggaggacagcaaggaggaggggatctccctaaactgaaatataccaacttttctctgacacaatttgttcttaaagtgactaaaagtgcacaaaaacctttcagctagtcaaaataaaataagtaggcagaaataccaaattaggtaattttgaaatatatgggttctttcaatatacctctataattcacatagactgtttgcttgtcaaaacattatctataccagaatcaaatttagtcagatttaaaaaccaggcaggcaacttattatctgtaagagctattgagaagaataaatacaaaaggactgaaataaaaaatcaacagcggcaagcagctttggaaaaagaggctgagacaggtttctaaaatattactgatgttgagggaggtctattttcatgtgataactatttttgttcaatatcaccaactttcaatttatagcaaaactgatacattcaatttcagctgtctacttcacaaatacaaatctatttcaaatatcatggtcacatttatgtaaacatctgggagagttcagcaaaatgtctctgccatttggaagtcctaacacttcaatgaacataattatttcatacccatctcattctgctgtattttttgacaatgtgaaaaccaatggcataaaaatgaactccagtaagacaaatgattaaatcaaaccttgttatttaaatctatgtttgcccaaccactttcccttaaagccaattctcaaattcaagaaaatatggcaatatgttttagagcatgaaaaaagtttgagcatgctaacgaaccaacttgtaaaatataattacaaaagattacaaaaatgctatcttgaacatcttactggtataaattgcataaactctctcatgcaacatatgtcattcagagtaaagaggaaggaacaggattttaaacatcacatccatttaggaaattggatatcaactactcccatctcctgtcatgatgatgctttagttaatatcttttattctattttccagagctatcagaatgaaccatgaagaataaaagtacacaatgaaaaactaattattttaacagaggttaagctaggaaaggccttgtgtagcaagcatcctatgttatttcattcaaactatctgctaacaacagcaggaaaaaggtttgtattcttaccaatgaatttctgaggcattgagctttttcgttttgccacattgcttgctaatctgtccagtacgagagctctttcacttcccatctctgctttgatgtgtcttgcctccgcacttgctagtttggaaaaatgtaaaaagaagagagaaaagaacacattggtacatggggagaaaaggaaataaactggaaggagaagtgtccgaagttggatgcacactctattgttgttacctgttataactgctcagattcttgcctggggtacctgctgtggtcagtgaagccgacaccagggcacattcaaatcttgcagtcttatgccgagatgggaaagctcgacccatccccaaccagtaccttcattagcaagaggaagtattaaataaacagcctggacgtggttggttgcaaaaagatagatagatggagatctaacccccgatcagccttctttctgattctgagtaactgcgtgtgacacctgcagactgatataattcttaacaactttgaaaaaaaagcatggtgccccagatttactgctctgtttatgttaacagcacttttgaaaataggtacactcacacagatagcaagacatctactcagtgatttgtgtattgaaattctgagtggtttctttctttttctttttctttttttttttcagcacgctcctctcagttcctatctttcatattctgtttctctgtgctctgtattatctgtttcatatgctcttcacatttcaaaatagtctcaattaaaatttccctaagcaacacttctgccttgaaattaaagaacaatttgtataatgcatctgtattgaatttctaataaaaatgtgaataaaaactgcctatgggctgggtgcggtggctcatgcctgtaatcccagcactttgggaggtggaggtgggcagatcacctgaggtcggagttcgagaccagcctgaccaacttggagaaaccctgtctctactaaaaatacaaaattagcctggtgtgatggtgcatgcctgtaatcccagctactcgggaggctgaggcaggagaatcacttgaacctgggaggcagaggttgcagtgagccgagatggcgccattgcactcctgcctgggcaacaagggcaaaattccgtctcaaaaaacaaagaaacaaacaaaacacaaaaaaacctgcctatgaatgtgggcccatccacaaatagacctgtgagtggtgtaggcctgtggttctcagacctggctgcacattagactcacctgaatagcaggtaagaaatacctatgcccaggccccccttcagatcaattaaatcaggatttctggtataggggcctaggcaagaatattttcaaagctccccagatgattttaaaatgcagccagaattgagaactactagaagagtatataaatagtggcaatatctaatcaactaaaatagtaaactgtaatgaatataatttacctcaattcagcaggcagtgcccaaatttatgtctaaagttcaaagaaggccaggcacggtggctcacgtctataatcccagcactttgcaaggccgaggcgggcagatcacctgaggtcgggagttcaagaccagcctgaccaacatggagaaaccccatctctactaaaaatataaataattagctgggtgtggtggcgaatgcctgtaatcttagctctcgggaggctgaggccggagaatcgcttgaacccaggaggcagaggttgtggtgagccgagattgagccattgcactccagcctgggcaataagagcaaaactccatctccaaaaaataaataaattaattaaataaatttcaaagagataccagcttctctaaatacaaggcttgacattttaacacatgatgctagcctgaaccagggatcagcaaacttttgtctgtaaagggccagacagtaaattttaaaaatttgccagacacatatagtctctatgttatattctttgttttttgttttttttttttctgttccacggccttttaaaaacgtaaaaatccctgtacacaaacaggccactggctgcacttgcctagagcgccacagtttgccctcacctgccctgggcaaacatattgtgatgctgtaaacatttttctctgttttctcataaacacttcgggagatccaaactaaaatgaactatccatacatttctattatgtctaaggaagaataaattgaaattagtttaagggattagagtaaaaagcaagtagtggctggcacagtggctcacccctgtaatcccagtgctttgggagactgaggcaggaagattgcttgaggccaggagttgagaccaacctgggcaatatagcaagatcctgttcctacaaaaagtaattttaaaaaattagctgggcatgttggcatgcgcctgtagtcctagctacttgggagactgaggtgggagggttccttgagcccaggggtttgaggttacggtgaactattaaggtaactgcaaagaccacaattacttttgcaccaacctattagtgccagtgcactccagcctgcgtgacagagtgagactctgtctaaaaaaaaaaaaaaaagccccaaagtattaaatatttctaattttattagtggccttaaaaaactgtatgttagtcattacacaatacattataaagctcagttttcattatttagttaatttatttacttatttttgaaacagggtctcaactctgttacccagggtggagtgcagtggcatgatcacagctcactgcaggctcaacctcctgggctcaagtaatccttctacctcaggttccaaagttgctgggactacagtctaaagccaccatgcctggctaattaaaaaaaaaaattattagtctcaatatattgctcagtctggtctccaactcttggcctcaggcagtcctcccacttcagcctcccaaagtgttgggattacaggcatgagccactgcactcagccaaagctcagcttttttttttttcctggaataacataaaatctggctctgccaggtgtggtggcactagcccatagtcccagctactcaggaggctgaggtgagaggatggcttgagcctaggagttcaagttcagcttgggcaacacagtgagatcccatctcttaaaaagaaaaagaaatccagctccaaaaatgaaaaagaagaggatgataataatgtgataataatgacaatatttactagacagtgagtttcttgtcaaaaataattctaggctctaaaggaataaatcatagccttcagtgaagctattaacaactatttgtgtaaatgaaaacagtaagggtcagaatagggggcctgagtggcttttgggctagtgcaaaagtactcgactgactctggctgaccagcagttgtaaataacgggcacttcagccacaagacactgctattgagtgaagagggtcaaattctgtccagcacagggataggtttaaatgaccaaacaggaaattatttatatatattatttcctttcacacaaaaccaccaccagatgtggcactacccaaagccccaagagcagagagatgaaagacaaagcttggaatttgcagtaagttcctggggctgttaggagacttttttcttagaatcaggggagaggtagctaagtttgcactttgactaggaacattcatcctggttccagcaattttgagaagattaaatccaagtaagcctcccctcaaccctgtagttatcaacaaaaagatttatagggaaaaaaagaatgaaaaacagtattctgggaatgtttaccttttatgcccattttaccattgttcttattagtctattgtggtccctcctctcactgccaaatcattacccaggaattaccccaagcacggtgctacccatctagttttcccatttgtttctcagcagtcgctgtctacattttactgaagtcaatgtcaattaaaacaagcagctttctgaggacacgtaatcaacatcctctacatttgggaggatgctgaagtgtggacacattgacctaaataactgtaattagggcaggtcactaaatggcaaacttttgagataacatcaccttttattcctcgttacccaccaaactggtctttagagtcatttccagataaacattattctgtaaatcagtgaccaaatgcctgacatttaaaaacataaaattctgcagtgttcatggatggacatattttgaggcatgggtggagactttcccatttccacaactccgattagattgaaagaaatcctctgaaacgaatctagaggactcctgttcacccacaccctctttctgggtcattcactcaaaatattaactacaagagctccactctcattgtacatgtgaacacactcctactgattcagttgatcttcactgaattaaccttgttttctagttgataagttaggcaaaggctagttttcaattgaagatggcactcattttctttcctaaactgctagtcttttgcctcacacttgttggatagctgatgcacaataccatgaaatgagtgccctttgaaacacaaagagccaggttccatggtttgcgcctgtaatccagcactttgggaggctgaggtgggaggattgcttgagcccagggagctatgatcttgccactgtactccagtgtgaggaacacagtgagccctgtctctaaacaacaacaacaacaacaacacacacacacacacacatatcacacatacacaaagaaatgctttgtaactggacaagctctttgggattactgagtggtttaggcagtgcactgaaaagaaaaaaaagaggactattggcttttggtccttttctccaactttaggacccaactgtctatttatacgaacagtctagacttgttatcttgccacttcatatctcagaaatgtaagtggagggaaaccagtttggcaagatagtaagggaacaagataatgggtttaaatgacgaaataggaaatccgttcctgggtggtgtttggcggtgtaatgctgcaagtggtgggtgtggggaatatgggatggtggcaaggaacaatttgcacattcagctcatgagtgagaacagaatgagtagaactgtcattgtggatcaatttcccttcacattgcttgcctactaaatagtagacatactaattttcattagaaaagttattttaaagacgtgctgaaaaaataataaaatgtagtacaaagtcacatttacagattaggttactactacctttattccctgtataagtcttaatatttggttttagttaactatttccatgatacaatttctacctcaaagtcattggaggtttaactatgtaattgtgttgtgcttttgtttttgttcaaaatccttcattagatcttgaagtgttaagtggagcttaaataagaggtattgcttcctgtctcttctatggtgtagtcagtcagtaactaatggagagtggaacaaagtggtgttattatgcaatagaaattgtctaacaagagattggtatcaaagacagaggcaggttctaacaaaaaagtttcataaaactgttgcctttttgaacaagtaaaatgaatactacctgtgagatagcattttttattttttgagatggagtctcgctctgttgcctaggctggagtgcagtggcatgatcttggctcaccacaacctctgcctcccgggttcaagcaattctcctgcctcagcctcctgagtagctgggactatcagtgcatgctatcgtgcctggctaatttttgtatttttagtagagatggggtttcactatgttggccaggctgttctggaactcctgacctcgcgatccgcccacctcagcatcctaaagtgctgggattacaggcgtgagccaccgcgcccggccagtattgatttttaaaaagaataggttggggccaagtgtggtggcttacgcccataatcacaataatttgggaggccaaggtgggcagattacctgagatcaggagtttgagatgcctggccaacatggtgaaaccccgtctctactaaaaacacaaaaattagctgggcatggtggcaggcacctgtaatcccagctactcagtaggctgaggcaggagaattgcttgaacccagaaggcggaggttgcggtgagctgagatcgtgccactgcactccagcctgggtgacagagtgagactctgtctcaaaacaaaaaacaaaaaacaaaacaaaaaaaaataggttgggaaaacaaacttaaaaatttttaaacattttctttggtctgctaagttggtaaaaatgtaagtttattctgaagccctcatgcttgtattagcttgaagaactattgaagatgaaaagtttggagtcttagattcataaatagatgtgattattcaattatttaaaaatattattattgctagaactcattgttacataaaatatttcctgctccaagtattcataatctgtgtgaatgaggctaaatgaatctctataccggctgttagtctctttctgaaataagaatcaagctaatgggaaaatgcagtccatgttcttctgtatttttccttcttttcatatatactccattaagacagaattggaatattctgatggtgtcacttgtgatgcctgatgtagaaacttggactaaagtagcaatatcactagtgtctttttttttttttgagatggagtcttgctctgttgccaggctagagtacagcggcatgatctcagctcactgcaacctccacctcctggattcaagcaattctcctgcctcagcctcctgagtagctgggactacaggtgagcaccaccacacctagctaatttttgtatttttagtagagacggggtttcaacatgttggccaagatggtctccatctcttgaccttgtgatccgcccgcctcggcctcccaaagtgtcaggattacaggcgcgacccaccgcgcccggccaggattgtaaatccttaaagtgtaggggcttaaccttaactcatctttacaaacagctttgatacagagcctggcacatagagaactcaacaaatgctatctggataaaagaaatgattagcaaggccagaagtcctgttgcccaatacctgcatttttttgcaggctggtcttcactccaaggcctttttatccatctgcttgcttctagaaagtcctgcttccccttgcaggcaggtttgtccacaggcttggctctcacactacgctgcacttcaacttacaataagcacttgaagaatgagtgctgcaggcacaacagcaatggagcatcatctctttacaagtgacggatgaggcataagatgtactatactgctcaggctcagaatagaaccccatgtccacaatggactcccaattctaagaaggaaacagaaatggaaaccacacatggaagggtgcaaaatagttaaaggattggcttatgttgggttaaatattctgtaaattttggcctcaggaaaaattataggaactatttgaaatataaaagagtaatgtgtgaactgagatgcagtaacttgattaagctgtgaatttacacatttataacctgaaaccaccattacaacatatttgtttgaaaaaaaaatcaaaacttgctgacttagttaaccctttatctttttttgctgagacttaaagtatggtgcacgcatccaccaaaccaccctatgaaatgcaaattaactcaacctctgtatttcagcatttcctgaatcacctaatatcactgagaatagctaaaatattacttttgatacttttccttatttgaaattcctaaaaaaggttgtgagaatgggaagtaaggtggtgaccttacttcaaaatcaataattttgaacttactgtttatagagtgtagttttctgatttttccccctccttccaggagaatcaggacacacatatatgtatatacatgtgtgtctattagtatgtgtgttactatatttcttttgcaaaccagataatatataacctttaagaaatatagctaatcaagccaaaaagtggaaaaggtgtaaaagactcaaatgtccattagctgatgaatggataaatggaaagtgccatatccaaacaatggaatattattcagccacaaaaaggaatgaagtcctgataaatgcttcagcatacataaatgcctcagaaacattatgctaagtaaaaggagccgacacaaaaggccacatattgtatgattccatttatgtgaaatgtccagaacaggcaaatccatagagacagaaagtagattggtggctgccaggagctagaggaagggggaatagggagtgactgctaatgagcacagcactgcttttgcggatggtgataatgttctgaaataagatagtggtgatggttgtacaactttgtgaatatactaaaattattgaaatgtgcactttaaaaaggtaaattttatagcatgtgagttatatctcaagtttttgaaaattaaaaaatatgactaatcacaaaaacaactaaagttctggtgaattttaagtaggtcactgaattttgggcgagtctcagtcttgtcacctctaaaatgaagaagtagggtcagatgctctctttcattctagctttaaatattagtgattctacttggaatatgatagatttcatagcttgggaatctcttacagtgagagctttgcctattgtctgaaatacagaactgcaagtagagatgcctacattccgtccttgagcgagtactgcctgactgccatgaagcatgccacttaagatgtcaaaatctttcctagcaagcagactcagataaaagcaaaacaaagagaagatgtcaaaacccaaatattaggtttttctttttattttattattattgttttagagatggtgtcttgctttgttgcccaggttgggcttgagctcctgggctcaagcaatcctcttgcctcagcctcctcagcagctaggactacaggtgtgtaccactgtgtatgacctgtttgttttttataagggggtaaacatttctttttatttggataagctttatccaaataagttggatttcctttatcaaattagaaatccaactccttgataaaaccaaagatgccattaggataaaaagcagaagcactgcaagccatcagaattcagttggccagctcctaacatcatgcaataggttttatctaaaataaaagtttcctctcactcaaaatgagggcagtttaggtagtcatttctactccatttttcctgagtttcacattatttctgtcatctttttgtaacttttctgttttagcctattcaaactactcaactgcaacaattgctgtcaaacactaaatcccatgagggtttgtacctattctaaataagcaattggttcaagttaccaaataaaaatgtcagacaacccaagctgcagaaccaggctgacagccaactcaatgggacaaaggacagctgaagagatgtgacacaaaaaagtttcaggctgttccaacaaagaattaaaaggaaataaaaccacaattgagatatagaagaacatctagtgtttcaaccaattgccagtaggcatctaattcaaatcactgaataaaacaaggaatccccaaagccaaatagaagcatcacaataaatcatatgagtagacaaggatataaattgggccctgtgcaaagaaaatccttgtagttttaattgcctcttccctagccactccccaacctcctctaccctcaatttttgccattttttgtaaacgacaactccactcttcatcaatctgttaggaaatcttgttgactctacctttaaatatacagagaattagaatacttctcaccacctctaccactaacaagacataattttctcttgcttgaattattgcaatggcctcctaactggacccccaatttccaaccttgccccaaatacaatctcttctcaaaagcaagtagagtgattctttcaaatgagaagaccaatgatgtcacctctttgtacaaaaccctctaaagatttttaatttcactcagagtaaaagccaaagcctttacaatggcctgcaaggcctgagaagatctggtttcccatttcctctctggcttcaggtcccattactcactgtgttccagacacacagaactacgtacacttcttcaaatttgtgccccagggcctttgctcttgctgttccctagttatctgcagggcttactcaccctgttaagaagtctgttaaaatgttacctcgttgaagccttccctgattctcaccctcactcctcagcaactgcttcatttttctcaatagcacttaccacccgctaaccttccaacttacagtttgctcatttactttctttataatctgtctgcccccagtaaaatataaactccacgagtctttttacttactattgtatctcaccacctaggacagcagatgctcactaaacgtgtgttgcgtgaactcaccagtgtcccctgggtcagtgctctgaagaaatgtacggcagcgctccttgtgctcctcaagggaacttctctgcttgtaactccttccacaaaactcacatttgtagggtttctccactagaaggagaacataaggggcactcagtgaccctcaggggttccacacaggtcaggtattggggctctgtgacaactgttcactagaaatgagactgctgagtgaagccagagtatttggatacttttgaatctatattttaaatttggtaagcttaaataaggttatggtctatgattaattattacgtcagagtattcttcaaaaggatcgcctcctatcacaaatggaagaatttggatttagtgattaccatttcgcatactgttttggctccaggtcaaattttgttttctttgggaaaaagaaaatagggcccttttattcttcaaggaggttaatgtggtataagcaatgaaataggaaaggattctttattttggacatccatctggctgtaagtaaagattgctgtagtttgtgggagttagccattcggctagaaactgatggccttttcagaacattgacatatttgggtaaatttagctcatccttgccacgtggctatagcaaagtctaggctaaaacaataaaaactgagctaattaactacggatttttttgtttttttgtttttgagacagggtctcactctatcacccaggcttgggtgcagtggtgaaatcacagctcgctacagccccaatttcataggctcaggtgaagtctgggcctcccaaaggccaccttggcctcccaaagtgagaggcttacaggtgtgagccattgcacccggccaggatatttttgaataatagaaataaaaataggccgggcgcagtggctgacacctgtaatcccagcactttgggaggccgaagtgggaggatcacctgaggtcaggagttcgagaccagcctgcctaacatggcaaaaccccatctctactaaaaatacaaaaattagccaggcacagtggctcacgcctgtaatctcagcactttcggaggccgaggcaggcggatcacgaggtgaggagttcgagaccagcctggccaatgtggtgaaaccccatctctactaaaaatacaaaaattagccaggcgtgatggcgtgaccctttagtcccagctactcaggaggctgaggcagaagaatcgcttgaacctgggaggtggaggttgcagtgggctgagattgcaccactgcatcccagcctgggcggcagagtgagactccatctcaaacaaacaaacaaaattagccgggcgtcgtggtaggcatctataatcccagctactagggaggctgaggcaggagaatcgcttgaacctgggaggtagaggttgcagtgagctgagatggcgccgctgtactccagcctgggtgacagagtgagacaccatctcaaacaaacaaacaaacaaacaaaattagctgggcgttgtggtaggcatctataatcccagctactagggaggctgaggcaggagaatcgcttgaacctgggaggcggaggttgcagtgagccaagatcacgccactgcaacagcctaggcaacagagcaagactccgtctcaaaaaaaaaaaaaaaaagagagaaataaaaatgaattgtaaaaatgacttcgtctaaatgtctaagatgaaggaaaggtttcacccatacaattcatgcaaactttattctgccaactccccaaatgctttattgcttgaaatatgtaagtaataacttcaactatctgtgcaaggctggtctttctgattgttgatagaatatactcaatgaatttgtcagttttaggggctaaaatttttattttctaactcttgctctgtttaaaacagaggctttgggatttaaagcactaaaagatccttatggaatcctaaattaaaacaaatgcaggtttgctagggctaaaaatgttacgtttctgcataaattgggttctctggaatctgtctttaaaaagcctactattgtttcttacttgaaaaaggcaacagtagagaactattctaatttttttcgaaccaaactcatccttaattcactactttgaaaaatgagctgtaaaagagagaaacccttcaattgccaattatgatctctcatggtgggttttgttggggctgacttgtttaatcctagtggctgaattataacaagttttgagtttggggctaggttttaatcaaagcagtagatgtgaactgacataaaaacaagcctttttttccaattaaaattttgccagataacatcaagaacatgaggtcccaaatttgaaaataaactcagtcttatttttctaggacggaaattctaaatcttgaaaaaaaagtattatcttggtcaaaataaggagtaaaaacatcacgacagcacataacttttacaaatctttaccgttgttcaatcttttagagatttaaaataagtaggctggctgggcatggtggctcctgcctgtaatcccagcactttgggaggtcaaagtgggaggaatgcctgagctcagaagtttgagaccagcctgagcaacatagtgagacctcatgtttatttaaaaaaaaaaaaaaaagtgggccaatcaagaggaaagttggatttaataaatttatcccaaatggccaaaaagtagcccccaaacaatgatttatatccagatcacagtttttcataatttacaaactgtacatcatttgcttgtctcgtcttttgaatggaaagagtgtgtgtgttgggaaaataatcttctaataaagtttaccagaagaaaatactgatggctataattttctcacaaaaattaaaaggacattttttatagggtgggctcttcctatctgactgtgttgttctccatgggtgcaaggatggtgaggagatgatcatctccactgaggcagacggagagcaattagtgccttaatggtcgtgtaattagccctagaggtctctgctgttgtaacccttcagaacaagaatgacagattgaaaccttcctacttaactctttctagtttccacactgggctctgaggaatgcacttcctagacaaggaatgctcatttctctcacttaccagaatgtgtcctaagatgccccgtgagcgcatctcttctttggcatgcatagttgcagaggtgacacttaaaaggtttttcccctgtgtgcagtttaatgtggcggaggaggttacctttctgagtaaaagatgccccacactgattacactggaatgggcgttcacctttaaaaaggacaaaaaaggagatttctggtcacaggcaagtggagaaacatatgcacagattagatgcctaggggaaaagctcatcttttagacaattactgttcacattgggatcagttgggagctgcatttcaaggcaagcctaagacttacttatgaaatctcctctgtagaagagaaaaagcacccactagcaaggctattttaggtatcatattgaatcagagcaaagaaacaagagcagctctagaagtgctttctagatctaagtttttatattactatattacttggtactcccttttttttttttttttttttttagacagggtcttcttgctctgttgctcaggctggagtgcaatggtcccatcatggctcactgaaaccttgacctcctgggttcaagtgagcctgtcacctcagccttcagaatagctgggactaccagtgtttgccattatgcctggctaattttttagtattccttttgaatataatctcctttgaaaaaagagccagaaactaaagtccttacaaggtgttgagggctagaaattctcctttttaaagtcttcatatgagatatgggatggaatcgactggctcaagtgcgatggttgtgtttgtatgcatttctatagactacctgtttattgtctgaagatacattattttaagctggaaataaaaactatgtcctttcatttaccaaatttgaacccaatacaataagaagatctgctcttattaaaaatgttatgcaaaaatatacaaaagatggctaagaagcaaatcacacaattcaactcctacttagaaactgaagaaaaagtatttggctgacctagaacactgtgctctctacagtctttttttattcatagcatttgcaatatgtttgccaaatgcatggtgaggcaggaataaaaagcactgagtgaacagcaatgcagagagagagatacatcagcattatagcaaaaatcaatgaaagtaaccaaaagttccaaattccaccacttcatttctcacgtggctgcattaggagagttttcagaagaatgaaaaaagcagactatttaccagtatggcttcgcttatgaaccattaagacattgaagctgatgcaggataatccacacacatcgcagttcatctttccactggttggcctgctactatcgaatgagacaacatgtctctccaacttaatgttttcatattcattatattctcttgaatagctgtaagggatttcaggctcttctgcatttcccatgggttctgactttaaaacattctcatctctttcactgtattcatctttcactttcattgaatcatctgcagggaagaaaatgcaagaaatgaacaacgactatacttgaagctatcaaagcagctcaaacagcagagacccacaactgacaattaaataccaatcgaagctaacaaaacactgtacatctacaaaacaagaaagcaccattagcgtgaccgcacgttatttaaattcagaaccacagtcagaggaaaacacacatacttacacacataaaaatagacgatagtgttttaggctatccagaaaattacagataatagattttagctaagtttgctcaaagtggccatgaaacaaacattgagcaactcttctccagtactaggggagaggaagggttctcagatctagtactgtttttggtggctgcagttaaaaaggcaaggtgatgtactcttaggtttcaaggagaaaatattgtttgaatccttcagatgcatccagtgtaagccattaagattaagagttgactagttaacatagtttttctaattttaagccatgcattgcctcttccccttccacgtatatgaattgctaaaacacatcttatctctgtctctcttggagctgataaaggcacaacattgactgtagaggaagttgtcagtactaatgaaaaagtgttgagaaagacaaaaggaaaagtaattctttcatataacctaaggagtcactttcatcgacacaggtaagtggggctcaatctaaataaggggaaggaccattaggtcccaagttagggagaactaaactcaaggactcaaggattgtgtaataggactggataggagaggagggactggctcaagtgagttggctgaccaagtactatcttaagaactgcaatgtaaatgaatgaaatttaaaagaagagctgtaatactcttcatgaagagcataagaacatatgaagaacgtgggaaaaatatgaagaacataagaaacaaagaaggcaaatttatgtacttgcactgacactagtaaaacctaaaaatttgcctgatgtaagaataataaacatttgtaagggattttgcatatataaaatatgctatataaatgcttactttttcaaccattggtccttagaaatcaaaagttgtacctccccatgaggaatcacaaatcaatggagtgtagggctggaagggaatttaaaggtcatctaatccaaccctcttgtttctcagatgaggaaatctgggagcagagatgtttttggtcatttgtcgaaggttacacatccagttactggcagaggtgtgattagaatgcaaaacttaagcttgaactatcaattacttggatttgacctcatgcactagacatataaggcctaagtgggttcttaccaactgtattacacaccctcccatcaatggtgtaaatgttaaaacccaaaacagtctgaaaaaagatattttaaaaaactacatcccttccaaaaaacatcagtaagtgttgctcctcttgctgcataggaggaagtacaactgcagctgtgcctggcttgctaccttcaacccaagtttcaattttcacttctatcaaggttacctttcatctatattaactgtgtttgcttaatagagcaagacagggcctaaccaccatcagaggagccagggctgccacacagttccactgcttcctaccacagttcatggttcacaacttttcactctttgactagcaaagatgtagggctgtaggataagtccaacatgtttcaaatttgcccaccctatggatctggattatataagaaatgatatctgtttcctacttggaaagaggtttacttctttctctggataggtcttccctgctttcaagtggaatttgtttgcttaagtgtttattttttatttttttaagagaaggatgcacctgaggcttgtacttgcctcccttcctccatcactccagctgtgggtaatatcccaccaaagcttgagtgctcttcagtttgcatgtaggcgtttaaaagaacctcaacggaaaatttcagctacttaaaaccaaaaacagcagatagaaaaggccagcagaaaaggatcctttccattttggttagaaaatgtgaacatgaccagactcaggccactccatggtcactgaactttaaaatgtagtaagatcaatgtgttgagtctttctgaaaacagaggacataagagagctgctcctttccctcaggattttggctttagttggcctgacctggaattcaatacgacaccatcctggctcaagagcagatcttagctttagtcctttaggagtcagctatagagcaaggaagacagtatttgagacccagggacataaggacacagggacagggcattagagaagtcctttgggcttacatagttgctggtttgcctttggagtcttaccagttttagatgaatgacctggatgacctctctgcatggttactggggattagcaacttatttttattttattctattttattttttgagacatagtcttgctctgttgcccagcctggagtgtagtggcacgatcagctcactgccacctctgcttcccaggttcaagtgattctcctgcctcagcctcccgagtagctgggattacaggcatgcaccacaatgcctggctgatttttgtgtttttagtaaagacggggtttcgccatgttggccaggctggtctcgaactcctgacctcaagtgatccaccctccttggcctcccaaagtgctgggattacaggcctgagccaccgtgtccaaccagattctaatttattctaatattcaactctgttaccttctcaaggtaagccataataaattgctggctgggcatagtggctcatgcctgtaatctcagcactttgggaggccaaggcaggtggatcacttgaggtcaggagtttgagaccagcctggtcaacatagcaaaaccccgtctccactaaaaatatagaaaattagctgggcatggtggctcccagctactggggaggctgaggcaggataatcgcttcaacctgggaggtggaggttgcagtgacccgagatcgtaccactgcactccagcctgggcgacagagcgagacgccatctcaaaaaagataaaataaaataaaataaattagaatttaaggtatgaatgagattcctgagagatattaggcttagtactcagcctccaaacacagtccaccaaaaccaggaaaggcattagcctgctctaatgaagagattcatcccattccctggaagacttattgaagcagagaaaaggggtgttctacttagaaaaattctattagaaaatactaatgaacatgtctaaaatcaaacttgtcatctttgaacccaaacttgcttctaatttatgacttatttatgttgacaaatggcatcacccttcttccagtctccaagccatcaaactgtggaaccttttctctttcaatttctacatcaagtcagtctccaagatctatcaactctatgtcttcaggctctctaggtgccaactcctcttttcctttccttttgcaatttggtttcacctttcatcacatcatacctaaattcatcctctctcaacattcctttcttttttttttttttttgagtcagagtctcactctgttgcccaggctggagagcagtggtgtgatctcggctcactgcaacctctgcctccctggttcaagcgattctcctgcctcagcctcctgagtagctgggattacaggtgcccaccaccacacctggctatttttttaattttttttttttagtagagacggggtttcaccatcttggccaggctggtcttgaactcctgacctcgtgatccacccacctcggcctcccaaactgctgggattacaggagtgagccactgcgctcggcctcaacattcctttctagacagatttaagacacaggtggtccaggagcggtggctcacacctgtaattccagcactttgggaggccgaggcgggtggatcatgaggtcaggagatcgagaccatcctgactaacatggtgaaaccccatctctactaaaaatacaaaaaaattagccaggcgtggtggtgtgcgcctatagtcccagctactcaagaggctgaggcaggagaatcgcttgaacctgggaagtggaggttgcagtgagctgagatcccaccactgcactccagcttgggtgacaaagtgagactccgtctcaagaaaaaaaaaaaaagacataggtaagctatgcttactgcctctacagcctcaaaaaggactcagaattctctgtaatatggcttccgcctccacaattcacttaatctgctcccttgaatatcaccaaccataatctcctgattcctagattcagagcctttttgtatgccactctctccaacttctttgtaatcctcaacactactgaccactcaccattccttgttcttctgcactcctatgtcttttctttctttctttttttttttttttgagacagagtctcactctgttgcccaggctagagtacagtggtgcgatctcggctcactgcaacctctgcttcccaggtccaagcgattctcctgcctcagcctcccgagtagctgggactataggcacgtgccaccacacctggctaatttctgtatttttagtagagacagggttttaccatgttggccaggctggtctcgaactcctgacttcaggtgatccacctgtcttggcctcccaaagtgttgggattacaggcatgagccaccgtgcccggcccctgcactcctatttcttcaatgaaaatgtaccttctttccttgcctttctgattgcttccttcttgccccttttcttccctctgcatcctaaatactgtccttaaccttcttttttcttccctctacacccctcttgtatggcaatttcattcattcttaaggcttcgactaacatcttatatgattaatttccatatatataactccaggtgtaacctctctccctttctttagtcctctatttctgaaggcttcctaggtatcttcccagttactcaggctagaatccttagagtcatctttcctttctcctgattgggccccacattcaatcattcagtggttctatctgtgtatccaatctctaatctgtttctccactcctgtattttgcatgcccattacctaattctcagaccctatgactttcccacgatctacttattgctgtagcccccgcactgttctctttggctcccttctttctcctttccagcccgtcttgtttgttgctacaagattgctcttcctaaattctacctctggtcatgtcatagccctgtcaaaattcttcaatattttccactgccaacaaaataaagtccaaactcagaaacaaataatttaaaaggcctttcgggatctggccccaacctatctttggcatattaattttgactagttagatctttaactaaagagcttctaagtagtcttatttctactgcctaaaagatctttccccaatatggccacaggtccaagtcctacacatcctacgtattttttttttttttttgagacggagtctttctctgtctctcaggctggagtgcagtggtgcgatctctgctcactgcaacttctgcctcccgggttcatgccattctcttggctcagcctcctgagtagctgggactacaggcgcccaccaccatacccagctaattttttgtatttttagtagagacagggtttcactgtgttagccaggatggtctcaatctcctgacctcgtgatccgccggcctcggcctcccaaagtgctgggattacaggcatgagccactgcgcctggccactgtcctacacatttttaaaggtcaaactaatatgctgtctcctggctactatgccttctctgatcaacccagctggaaaatagcctgctccttcttcctgggttacttatgaactcacctcccctagtctccccaataaatatgtaaactagctgagggcagaagctatacagattgtgtgtgtgtgtgcgtgtgtgtgtgtgtgtgtgtgtgtttaactcagtattccctatgacactgcttaacctgtatctgtaagaccagaggttatgtggttttaaaatagaaaatttggggctcctaccatagatctactaatctgggggtggagactggaaatgttcatttaaaaccatgctctccagataaaccttatgcacaatggagtttgagagccactgcctcgagttagatgcagtgccctacataaagtagacatcccataaattcctggtgtatgaatatatcattgcattagcctcctaactggcccacggtacatgtgacctctgttatactgcatcctattgccagaataatcatgctgtagcaaagaaactcttatttaaaactttcaatgatttcatttgcttatagaataaagtccaaactccttaatgaggtattcaagcacctgtccagaacttgccccaggactacttaatcatctcatttctcagtcttcttgaatcacctttctctctatactagaactttactatgcaaagtgaggtccttggataagcagttctgcaaccgcctgggagcttgttagaaatacaggtgctcaggcctcaacctagacctactggaccagaatttgcattttaacaagatcctcaaggattcttatgcacattaaagtctgagaagcacagcagcaacatgactaatcacagttcttcaagcctcttctccagcctttcccacacctaaaatatccttctaccatttcaatagtgtattcaaacttccacatgcagtttaaatgccacttcttccatgaagtcttccttgatacccttaactagaaaaaaaattatgtttctttgttctcatacatccgtcttattctgctttatatttagtatgatataattacattgctacagatccgcttttatgtagttgatgtgttcataaaatgtttcatgcaaaaccaataacactgtcccgctgattaacattctacattcagaaatgtttattttgccctgatttcagttgtcagtgactggcaacacccgttcatttaataaaggcagaaaatcttaaagacctggcaacaaatacttgaatatatttggggaactgcctgatagtatcctgaagtcttttgtaaagtgaataaaccttttatagtatgaataatctcatgttttggttttgtaaattctaatcttcttataatatatatcaggtttcttagacatacatcttaagttgacacttagaagactatcaagaagcctcatagacactggtgaaagtttatttcttaagtcaggtggtgggtgtatggatgttttcttattattctttaatctatacatgtaattatacttgcctttttgtacatatgatctattttataataaaaaaagttaaaggcttcctgaataccttttttataactgaacttgtggagaaaagaatataccaaaccacaaattgctgataaaggtaattgctatacattcccagaggcagggaaaagatgtctaaattgaatctaacccataggaaattagattaaactaaactttctaaaggagctactctagggtacaattgctcccatctttgtctatgttttcaggcctcttaggaagatgacacacacgaacacacacacacaccccagagagaattttgtaggctgaagagaacaaaggtttggctcactggggctgatgcacatggtttcatttcctggggtgatggttatcacatgaaaggcttgtactccagagcagacatttttggtttcacctgagacactgcaaaaacaatgggtcctggaaaggatccaacatctaaatccttcaggggcaatagcagtctcagccaactgtgcctcagtttgtttttacaggcacataaaatgctcagttggagagaagaacctatcaaagatggcaaacagaatagacaacttgggtatcttggagagcatgttgatactaggaatttcccagtggaaaaaagagattctgaatttccaccttaaactatgagatctcagaatccaactctacgaaggacaaagttggaagtaatatcctcaggtctgccggagatattgtgagaagggacaaaacaagatagaggctgttagggaaggcacaaaagggtgatgttatttaagtgttttacaaggatcgggggtcataaccatgaaatcttcagcaaatgcaaaagtcaactggataacaaagaagcttaatcatcttaatgtggcattttaatgatgccactgatttgctatgccaattcagagataatgaggccctaatgctacagatgttcagccaggctaaaagaaagggggtgggggggggcttttctagcacgccattttctaactatccaattaaacaaattgtgaaagcatctaaatagtttaccaggttttgacagctgttaataggatttagaagcttgaagcactaaagagcaaaatgggaaatatatgtattgtaggtattcagtctacaaagtttgttactgtcgcccaatctagcacaaacagatgaactagaacagttttccttataaaattaatgtctatacttctctcccacaatgacctctttgtattaggaagaagaacactgaaacgatgggtcattttcattttctaatttacatttttgcatgtaaagtaatgagagagagaaaccgatgatatttttagaactaaagagtaaggaaagttttaatatttgctaaccagtaaaattataaagcttcaatgcaaactaaacttttggtcattgatttataaaatctattatgttttctttttttctcttttaaaatttaaaataatggacgtctgttaattttgaaaatgcctatttttaaattaggaaaaaactggaaaaggtaaatcaggctaacaagagatgaaatactggcagggcgcagtggttcacgcctgtaatcccagcactttgggaggctgaggcaggcggatcacgagatcaggagatcaagaccatcaagacatggtgaaaccctgtctctactaaaaatataaaaaattagccgggcatggtgacgggcacctgtagtcccagctactcgggaggctgaggcaggagaatgctgtgaacccgggaggcggagcttgcagtgagccaagatcgcaccactgcactccagcctgggtgacagagtgagactccatctcaaaaaaaaaaaaaaaaaaaaaaaaagagagatgaaatactgatatctcaatacaggtttggataaaattctatagatttaagttctcattgaaatacatttttggccaggtgcaatagcttacatctgtaactccagcacttcaggaggcagaggtgggaggatcgcttgggcccagaagtttgagaccagcctaggcaacaaagtaagaccctgtctctacaaaaaatcaaaaaattagccggatgtggtagtgtgtgcctgttgtcccagctacataggaggctaaggcaggagattcccttgaactcaggaggtcaaggctgcagtgagctgtgttcatgccattgcactctagcctgggagacagagcgagaccctgtctcaaaaaaaaaaaaaagaaaaaaaattaaagtcatgagaaaatagccaggtatggtagaatacctgggaatagctgggaatacagcatgcctgtagtcccaactactcaagaggctgagaagggaggatcacctgagcctggagaggtccaggctgcagtgagctgtgatcatgccactgtactccagccagcctgggcaacagaatgagacctgtctcaaaaaaaaaaaaaaaaaagaatctaaactggccatcagtaaatcacatcacttcaaacacaagagcattagcatgtaaaaagtttcatttgcaaaggaactaccctcaattttactaataacattaatttttgccttatctgactatcaaatagctcattcatgggcataataataaaaataattttgcttaataatttcagtgcaattctttgcttccccattagaagaagaggagatttactacttttacaacagaaatacactatacatcagcagtaggtaaggttccagctgctcagctgggctaagctcttcaaatgtcatggggccaggtataattctttatctagaattgtgaggactgaaggccatgatgtatgaaaggtctttctaaactataaagagtctacaagtatattgtttcatttctgcccattataacaattactttttctattgattattttcatctatgtattaaactcttttgtatttatatttttgagaaataactgctacccatcaaaaaacaatggatgaaatacatttaaagaggctgaagttttagatgttgcctaaacaagcatagactaaagtagttacctggtagaaacttcatttgtaaatccgaaagaaaaaaaacttcctttttcattcaaaattcccttgcatagaatattcactctatcttttttttttttttttgagacagagtttcgctcttgttgcccaggctggagtgcaatggcgcgatctcggctcacagcaacctccacctcccgggttcaagccattctcctgcctcagcctccggagtagctgggattacaggcatgtaccaccatgccctgctaattttgcatttttagtagaggcagggtttctccatgttggtcaggctggtctcgaactctggacctcagatgatccgcccacctcggcctcccaaagtgctaggattacaggcgtgagccaccgcgcccagccactctatcttttttaaaaacaggaatgaaaaagtttaaagcatgttaaaatacaattcttagtaaaattcaaaaactgtcatccaaatacaattggctaaaaaacattctgactgtcacaataccaaactcagggtcacaggtaaaggaaggaatgaaaaagtcttctatatccagagcataagtagttcttggtgtatatagcatgttttgtgttatatcacaattagtgtatttatctcccatatagactaggagtattttcaaggtggggaccaggtttaaataatatttgtgtccccagaacctaacaagggcctcgttactttagaaattgaatgaatgggccgggtgtggtggctcatgcctgtaatcccaacactccagcactttgggaggccaaggcgggcagattatttgaggccagcagttcgagaccagcctggctgacatggtgaatccctgtctctactaaaaatacaaaacattagctgggcatagtggcacgcgcctgtaatcccagctactcaggaggctgaggcaagagaatcgcttgaacccaggaggcagaggttgcagtgagccaagatagctccactgcactccagcctgggtgagagcgagactctgtctcaaaaaaaaaaaaaaaagaaattgaatgaatgaatgaatgaacttcttgggcagcctgaaccaatttagtgatgataactaggccaggcagagaagaagtagtagatcacaatagacccctaacttgtctacaagattctgatgctgtcatgcagtatgtagtttctcttaatgcatcagaataaggtccatggcccacagtgatagccagtcatctagttgacttctttgcccattgtggtctggcttctgcccttcctgctccaccattttgcaataggatgccactggccagtccctgctttttaaatctctttccttggcttattctttgctggtcctactcctacctcacttatttacttatatcctctgtttattcctctttctctatctcctagatgtgaattatttcctagggcctatttcttgaaacttttgccttttcactttacatactctgtctcctgatccaagtttttattgctgttgactctcaaatttttatttccggtagacctggaaagccatagacatatacttcctgacatgtacaatcacttcctgaatttccaacacttatctcacactcaacaagttgcaaacaagctccttatctctcccatttcttctccgcttttcctataatattccccgttgtcctctctacatagtggctgtttgatgtcaacgtctgtatattatgctgcttctatcaacatttagcactgatacagagctcagtgactacttaccaaacaaacaaggaagtaaggaaggaaagaagataagaaggaggaaaggaaagcgtgaacaactatactattatttgcttcaagtacaaaattagggttgacagtgtttttaaaaattgtacagattgcaattttgcctaaagctagcatattagccgaagacagagggaaaaaataaattgttatttctaactcaaggtataacaatcagacccaaagcgtataaaggattcttggatgagaaggaaatgagtataaggattaagaattagaagactcttgttctttttagcattacattaaaatacaaaataaaaattaacatttaccatctgtaacatattatttagacttttacccatctctggttcttcccttccttcttccctggttctcaaataatggaattagagcactgagaaataatagaagaaactcagcactgacttctcctgggtgaatgtacaacattaaaagcacacaagggaatgagctatcttgtcactggaacatgttcatccctggggataaagtgtaacaactgcttaacagctgcccagtaacatacttcaaggctgcaagcaaagatgcatcctagctctactggaaactgcagagggaatattgtctggcagaataaaactagaatagaatctggccaacaaactgcaatctatgtcctttctatttcaaacagcagcttctaatgatcacagagaggtttctactaacaatattcaagtaatattggatgggtattggtaattacagggaaggaacaatatggtatttaacttatttttttccactgaaaatagagttgaatgacttctttttttttaagtttctgataaaagagcatgggctttggagtaagacagaacccaggttcaagttgtactaactagctgtgtgacctcagcaagtaatttgacttccgtgaattttctcatttgtgttgcagtaatgataatatctatacctaatagggctgttacagtaatgaaattaagcaaaataatgtatatataggcgtagcatagtagctggcacataatatgttcatgaccttgagacaggcaaagatttcttagatacagcactgaaaacatgattcataaatgaaaatatcctgcaactcagtaagacaaataatccaattttaaaatgcacgaaagtagtctttagcttttctaaggtaataaataaaatttttaaaacgcacaaaagatgtgaattaacatttcaccaggaaattatatgaatggacaacagaccaatgaaaagatgctcatcatcctcagtcattagagaagtgtgaattaaaaccataatgagattccacttcacacctgctagaatggctactataaaaaagacacaataaagagcgctggcaaggatgtgaagaaaatggaaccctcatccgttgctggtgggagtgtaaaatgatacagtcattttggaaaacagtttggcagtatggtgggcagccttctaaaacggctcctagcattcacacccttgtgtaatattcccctccagtgtgggctggacctaggtgattgcttctaatgaaaaaaacatggaaaagtgatggaaggtgtctcttctgtgtttaggttataaaagactgtgacttccatctctctctctctttctctctgtggtgtttcttgcaagcttctcagatgaagtaagctggagagcaaggagctgaaggcagtgtctggccaacctccagtgaagaaacgaggccttcagtctaacagccttcaggaactgaatcctgacaacaaccacatgagtgagcttggaaactgatccttccctagtcaagtctttagatgagaccacagttcaggtcagtatcttgttagcagccttgggagagactgaagcagaggacccagatatgctgtgcctgtattcctgagataatatgttttaagttgctagggtttggggtcatttgtcacacagcaatcaataactaatataggggtagtttcttataaaattaaacataaatttaccatacaagccaacaattctaggtatctgctcaaaagcagtgataacctatgtccacataaagacttgtacataaatgttcatagaagctaaaaaatgcaaacaattgaatgtccaccaaacagtgaattgataatcaaaatgtactatataaatacaatgatattctttttttttttttttttgacagagtctcactgtcacccaggctggagtgcagcggcatgatcatggctcactaggcagcctcgacctcctaggctcaagcaatcctcccacctcagtctcctgagtagctgggactatttaaatttttttttttttttttttttttttgtagagacggggcctctatatgtttccagctactcgggcggctgaggtgggaggatcacttgagcccaggagtttgagaccagcctaggcaacacagtgagatcccatctcaaaaattttaagaaaaaagaaataaaagaaacaaactactgatacatgcagcaacatagatgaacttcaaaaacattatgctaagtaaaagaagccagaaacaaaatattacatatggtattattccatttatatgaaatacccagaaacagtaaatctttagagacagaaataattagtggttgcctgaggctgcaggcaagaatggggatcaactacaaacaagtacaaagggttttttagggtgatggaaatgttctaaaacatggtggtagttgtacagctctgtaaatttactagaaaagtcattgaattgaacatttaaagtatgtaaattataaccacattaaagctgttttaaaaagaaatctatacagataaacaaaacaaaataaaattgatagctctgatactgactctgatactgactctgtctcaaaatgggaatgtttagctacccattcaccaatgattacaagaagcatcatggtaagtatagtttctgagctatgattacttccatatgacaaatgctcagaagactatttttaactccttttgttcctgtacaactgatttcattccctttcaacaaaattaacaagaattagcttgttgaaaaacacaagggcacccgctacttgacagtaggaaaggaaggttaaaaaatcaagtataaaagagttggcctgattggacatttcccatacttagttattttattatcgatttcagacaaatacctaactactgatttttgctctttctaaattgggctaaaattcataaggatccagatacataaggatatattacttctttgttatattttgtgcttttatggaccatactgtctcactttctgttctgttaataatttagtgtgttttactaggctgtggttattaattagttaatgagcactatctctggactgcaaagcagcagtgatataaatgcacctggggaagttcactgagggttcattcaggaatgtgagttctctcgtaagacaaaataagaaaataaagaattatcttttctttacagtctgagagagagagagaactagtacaacctgaaggactagaaccggaaaatcaagctgatggtaagtaaggaataggtcatataaaaatgcaagagagagttctgggctccaagtaatgaaaagagtaataatggaccattaagtagtgtttgttcaaatgtcggtggatgggaggtatgaccacagcctaggctgacttaacagaagttaacaaagagcctttcctattttctcaagggctgctatgaaattacttaaggagtaagaaaggataacaaaggccctggctgagatttttgcttctgtagacgcaggtgcagaaaaggctggttctaacacatcttgtcaatgtctttaatgccaccagactgatgaatatagtgaaatatctatcgtgatcccatttttacttattcagttgacataattagcaaatctattaagggtaaggtcacaaattatttttagttattaaaccataggtctccatatgttactgtttagacagtatcacccagtgcagaatgtagttttcaagactgtcattcctgcaacctcaaatctagatccaaatgcagtcagttaaagcagatttcaaccaggcagctaaacgagaaaacatctggacctaccagtcaaaatgagaaaggtcacatgttaaacccagataatcttgtttattggtgtttgaaggttatacaccaagggctggattaccagggtgctcctttaggcctggctctgacatcttcattcacctgctgtgtgtgtgacgctttaaaatccaaagctttgaaagtactgtgttattagtcacttccaaatgtaattttcctaattctaagcctgaatactatgtcaacctattgctagactgctgattagatcctggaagaaaccgcaagacacaactgtcaggggcagatgatgtctattcttttaaaaactgttttccacatttccattcagcatttttctatggatgaagcacctgtaattttctccatcaaaattaagaaaagaaaaggcctctgaataagcaaggaataaaattaaaagattgacatagatttcaggatgatgatgaagaaagggagattgaatctttcattatttttcataattagtattattttatatacaaacaactgaaccaaaattgtttatgttggaagcaattccacatgccagtgcatatgaaactattatgaaaacagcaaagtcaagtttcttaagactttacatgctttggtcagatctttttaatcttttttaggttgtgaacatctttgagaactgtactctttgcccagaaaaaggtacacatgcccataaacacgaaatttcacatactattgattgatttctcaaaccctgagatctcaggttgagaatctctgcctcaggcctttaaataggctcaggcttaaagacacctctgtgttatattttgtaaacttcatataatagtggttggcatttttcaaattttttgctcaagcatcctcaaaagaattttgaaaaattatatatctctcttatacatagtggacattaagtacatactaagttgacatctataatttttcatcatgagtttaactatttttaaacaaaagaatacagtttgtgtattgtaaataatgatagtttaaaccattaccacaccctttcaaatgtatctacttaggaatatatacatatttgtgatttaatttactccatcatgaatttaaaaatacataagtaagcttttcaagaaagtcaggaaatttctctttgaacttctatttccatttcactacccccatggaattttctcctaatgtagtactcttgtatgcttgagtcatctattgttcatcccattatatgtatctgcagcaaaaaaaaaaaaaaaaacccaataaaatatagttacttttgttaacatgaagtgctatgtgtcaaaatgtgttttcttctggattgaattagcattacaattattaacatacaattgagtaaaacaatataggtatattataatttgatcaataattaccaaatacaaaaagtaaaatttattgggactgtatctcctaatgagaaggatagagaggaaataagttatgaaaatttgataaaagaaattatctaattgatcctttgtttggcatcttggaagtacttacaccttagaggtgggtgagaaatgttcttttcttttataaagtggagaaggaaggctgggcatggtggcttatgcctgtaatctcagcaatttgggagaccaaggcgagaagatcacttgagtctaggagttcaagaccagcctgggcaacacagtgagacccctctacaaaaagttaaaaaattagcagggcatggtggtgggtgcctgtagacctagttactcaggaggttgaggtggaagtattgcttgagcccacgaggtcaaggctacagtgaactgtgattacaccactgcactccagcctggacagcagagcaagaccctgtctgaaagaaagaaagaaagagagggagagaaagaaaaagagggagaaagggaggaaataaaaaaagagaaagagaaagagagaaggaaagaaagaaagaaagaaagaaagggaaagaaagacagaaagggaaagaaagaaggaaggaaggaaggaagaaaggacggaaggaagaaaggaaggaagaaaaggaaggaaggaaaggaaggaaggaagaaagaaagaaaggaagaaagaaaagaaaaagcaagcaagctcaatggcagcagtcttctaggcagatcagttttaggaagaagggcagagaatatactgaagttgcggacctggaaattgattctcttaaaattatcccatgcaatccttggaaagttttcccagcatttcaagaacactactaaaataaaagaccccaatgccaaaatgtactcacatgctgttcttcactttagttaatgaaccaataattatttagtgagcacttgtgaacactgcaggggataaatggatgaatggatggttggatggaaaggcagaaagaaaaatggataaacactgagcatttactatattcccagaactttggcacaaaagaacacaactataaaagactgttcttgccatgtctttgggacacaatcaagtacaataacaccctgccacaatacaatgtgtacaaatttggatgtaaaaggattgctgattgcctccagttgtctacccttgcccacttctcagacaagagcaagctaaagttcttatgggaatggataggaagtaattgcttcaagatcatttgggtcttttaaggtttacaattgtgtccagtttaaacttcactgtcattgctttgtgctttttgtaacagtatattaaaaacaaaacaaaacacaaaaccacctactatatttcatttacttgcaataatatgacccccatattttacaagataaaatttcgggatcccatctactatgttgtggagagagctcatgtactcttcttgtctccgacactattctctttcatgcaaactacaacacaaaaacaaaaacaaaacagaacacccaaaacccaaaatccctttgggctgacaaattacaaaaaatttgatagttctgatgagccaggacaggattttgttcagtcttcagtccagtggtgttctggtaattgcttaacaaccagctcaggatcggggaagggcttatttgtggcatttgctgatttcagtggtataaatactccaccatggccaatttcaagctaccatcatggagtcagccagcatacaaaattgttgaaaatttaacaagcagctatgagctgattctggcacaccactgggactcctcatttatccctcagcagggtaccttcctctagctatcaaatggcaccaaggtacacaatggctcgggtcaccgtgcctggtgccaaagtttatttgagaagcagaactcacttggcaagaaaagctgctatgaaagttagcaggcacataagggtgtttcatgcgttctcttaatccagctggaaggaggcaccaacactactgcttaacagacaaagaatgcaaaaagaggcagggcgaagtggctcacgcctgtaatcccagaactttgggaggccgaggtgggcaaatcacgaggtcaggagatcaagaccatcttggctaacacggtgaaaccccgtgtctactaaaaatacaaaaataaaattagccgggtgtggtggcgggcgcctgtagtcccagctactttagaggctgaggtggaagaatggcgtgaacccgggaggtggagcttgcagggagcccagttcgcaccactgcactccagcctgggcgacagggcaagactccatctcaaaaaataaataaataaataaataaataaataaataaaaagaatgcaaaaagaagggagaaaactctccagaggatccactaaggacagtgggcagccccatttttctgttaaccattgcaactgtctgtggctctttggcagatgtcaaatatcttcctacacattccttttagtttgctgtgctacgcagcttagttatgaaaaaaaaaaaaaagaagaaaagaaaatccagagatgttttctgttaaaaagtttcaagggccaggcacagtggctcacacctgtaatcccagcactttgggaagccaaggcaggaggattgattgagtccaaaagtttgagactagcctgggcaacatagcgagaccccgtatctacagaaaaaaaaaaattagccatgcatggtggcatgcaactgtagtcacagctactctggagtctcgggtgggaggatcacttgagcctgggaggttggggctgcagtgagccgagatcgtgccactgcactccagcctgggtgacagcgtgattaaaaaaaaaaaaagattcagggagagatgtcttggttttatcatcaacagaacttacccgtttgacacagtacaagctgtaaagctctgcccatggtaagcacttacagaaatcccctgtgagtgaacttctgcagcacagcactgctgattttgtaagataacccctgcatcccatgagtgacaggtcttgatctgggcttgagagatgtaatattttgataaaaaacggcacttccttttgaagcatatatttgcgtgtactaagcagtaccgcgggagcctcagcgagtgcctaagcgaggctgacgcggtctctcccagctcgctccagccacccttcttcacacatctaaatgtggcggtaattagcatccataaaccacacatgtggcttaattttttttcccctttcagaagcatcaaagtagtttgtacttcttctaagcaccaaagagttgtacacctcaaaagggaccgagactatgccatgggaagctactgaagatgggagttatttctcctaaggggaagaagaattatttttttcagcaagctttctaattaaagttcttatctttgatctaagcatctacactgcacaagatgtcacaatggagaaaatataaggcctttcaaaagtgatcaaattcaacttttctcttggaatcaggcaagacccatagcttgtacagaatggaagtaattaaatacatacaccgattgatcaccactgcacaattaattaaaaaagaaatctatttcatgatgggtattgggtctatttgatatttagttacagagccaggagatgaagggtgtactgtgttgaatagtgtccctcctaaattcatgtcctcctggaacctcagaatgtgactttatttggaaatatcgtcatagtagatgtaattagttaagatgaggtcacactggattagggtaggccctaaatccaatgactagtctccctagaggaggacagaaacaggagatgcccacagagatgaagcccacgtgacaatggaggcagagattagagttatgctgccatgaccaaggaacaccaggcattgctggaagtcaccagaagccagaaagaggcaaaaaagaactcttccctaggcccttcccatggtcctgctgacatcttaattttgaacttctaccctccagaatagtaaaaaatttctgttgctttgtgacaaactggtgttttgtcacccagtttgtggtaatttattatggaagccctggaaaactaagacagagggtaaatgtgcaactcaggcagggtaaacagctagtgttgatgggtatcgaggtatcgtgtgtactttttacccctacagcagctccagaacaaatggcttgtgtaaatagagatagtggatgatgggggctgctgaaaaatagggggccagtagagtgttaaatacagggggtcagtagcccaacttttattcctcagctattcaaagaggaaaaaatactatcggcaaatgcatcataccctcataacatatacatgctcatgacagaacctttccttctattttctaagtgggaaatggcaaagacgggaatccaatttcagaggaagaaggactgaaacaaaaagtcgcaagagttctatttcagtcgttcaggccttaaggccatgtcttttccactaatttaagcacctaattacattctctctgaaattgtttgtgcatgacaattgccttgctgggatgacattccaccatctcgagtcttatctctacctagttaatatccctcagtacactagcatgaaacacatcttccctctagccttgatactcagaggtttttattttttagttgctctgtgatcataggccaagatataagcaacaataatattctttctcatgatattttataaaattgttttaactcttgcttttgacatcacagtatcttgctgacattttagatccaagtagaaggtcccaaatcttttgtattcagtaaagtggctgtgatattcccagcactcattggatgctaaacaaaaataaagacttggggatctctgggttatttcctatggctcaagatcagtctgaagatagttacagttggtcactaagaggaagagaaataataattgttcataagagtgaatgagcaggctagaaaaagaactctgaatttcttcatttcttctgctttccaaactggttggattatatcacttcataggtaagtattcttagaaagatgtaaatataggttagggcttcttttttcaaaaagtttatgatataatggggtgaaaccttgtcatgcacaaacaatttcgaacagaatataattacgtgtttaaataagtactaactaaacatactcttaaaaattcagctctgagaccacactgtggaaggtgggatagtataaaaaggcctcctggaggaaataaacttgagttgatgtaaatatttgccagtgcttgttagatttaaattttcaggaataaaggagaaaaccaactaaatggtaacacaacatttagtctacatatggttttatttatgtctaattaatttatgtaaatagagctatatcaactatacatgcatgtgataaaaagctgttagtgatatatatttttctgatttttaaaataatagtattagaatcctcactgatgcccttttgaaatggttacacaaacactgttcctttcaagtgccaaatcttttcttaactcatcatacaataaatgtatacactaggttaggagtaagggaattatggcctgcaggtcaaatccaacccactgcctatttttgtaaataaagttttattggtacaaagccactcacattcatttatgtatcttctacagttgtcttaccttgcaatggcagagttgagaagatgcaacagagattgtatagcccacaaagcctaagatatttactatctggtcctttacagaaaaagtttgccaatacctgcactaggctcctgggaatatactgtaaaaaattaccacaatgtctgtgggatcacaagcaagcgtatttatgttcaaagttaatacttttgtttgttttgtttttgtttttttgagacagagtctcactccgtcgcccaggcttgagcacgatctcagctcattgctggaacctctgcctcccaggctcagaagattctcccacctcagcctcccgagtagctgggattacaggcatgcgccaccacgcccagctaatttttgtatttttagtagagacggggtttcaccatgttggccaggctggccttgaactcctaacctcaggcgatctgcctgcctgggcctcccaaagtgctgggattacaggcctgagccaccatgcctggccaatattaatagttttttaaagttttttccaagtatttttgttttgttttccaaacttactctagttgggtaaagccttttcccctagaaattagtctgtctttccgcaagagaaaaaataaagtgagtgtttccatcagggtgtgaaattttctacaaaacaattttctaagaactggaagcttataaagatgcacacgatatttcattttttaacatatacattaaacatgattgcaattattctgaattttaaacactccagacaagtctttggttcctaaaatctttcaaat

SEQ ID NO: 49 - DNA, 149419 bp, Homo sapiens
ggaattctgggcagctcaggcacctgtgggcctgagggtgccctctgcccccacccttccgatctcctgggcaagacacgccaggtgattcatctcaccagagcagaaaaacaagttcaactgggcactttaatctcccctcactggcaggcctggtgtgagctgctaccccggcgcccctcaccaggggtgctttacctcctctagtattcctgaccttagtgggcatttctggtctcagggataccaggctggggtccaagtgggccaggtgtggcagttcagccctatgccccatggctgatggctcgcgctgggcaggtatgcagggctgacgtagtgcctttgtggcagcagtttcgtggcacacattctgccagctggttctggagtcttgccctgaggaggtggccagggtgagggtgccagcgcaggaacctttggcgcatgcttcaccctggcctgggatctgcagcctgggtccagatgcccacaactggaatctgacgctccttttctcttcatgggggactcccagaggtctctgcaatgaccagagccccggttgtcccatgcctcagctgcaactccagctgaccctccttccccactctctgggtggcattacgggggtgtggatcccttgccaagaggttggcatgtgggtgtgctggaatggcatagggagaatgcaccgagtttgtttgcttgggagaggggcagggggtatccagaagattcatgattcgtcatcgcctctcttgggggatttttacccctttgccctgagttgtgcctttgggacaaaggaagcctttctttgccagccaacaccctgtactggcgggcgagctccccagggctggcacgctggggcagcctctgaatgcacagggtgggcctagtcagaagaagcctttcccctgaaatccctctacttcccaagcacgcaagctttctcctgctgttaaacctgcagtgtgcaagggacatgggcggaggggtccttcagtcaggcttctccctgtctgaggtggcatgacttggagtgagtttggatggggtggccaggtctgagaaggtcccccgccagtgtcctctgacccatctgctctctcctgccagtgtgcaccggcacagacatgaagctgcggctccctgccagtcccgagacccacctggacatgctccgccacctctaccagggctgccaggtggtgcagggaaacctggaactcacctacctgcccaccaatgccagcctgtccttcctgcaggtgaggcccgtgggcaacccagccaggccctgcctccagctgggctgagccctctgtttacaggtgggtggcagaagaaggtgccctgcccttctgtttcctctcttgttgtggtttctcaaccaggaagtcctttctaacatctaacccccattcattttactgcagaatcagttgactctctctataacgtggctggccgaggtcatgtctggatgggatgcgtctgtgtttccgctaaatcttgtgctctcttgccagcatgatcatgtcccctgtccacctgctccagccactatccctctcccacttacagcagaagaaagggctggtgagaaaggtggattacaggcccacttctgccactgacgagccctatgaatgtggcctacacccccttagcttcactgggtctcagtttccctatctgtatattgggagcagttgtgaagctcagaagagaaatgtctgtgaaaaggttatgaacaggagggagagtggaaaccaacctgctggatcgtgtccacagaccctggaatggggccacatgcttggtttgtcaaattgcagacgccggccgggtgcgatggctcatgcctgtaatcccagcactttgggaggccgaggcggacagatcacttgaggtcgggagttcgagaccagcctgaccaacatggagaaaccccgtctctactgaaaatacaaaattagccaggcatggtggcacatgcctataatcccagctacttgggaaggctgaggcaggagaatcacttgaacctgggagacggaggttgtggtgagcctagatcgtgccattgtactccagcctgggcaacaagagtgaaactccgtctcaaaaaaaaaaaatttgcagacgccatcccatccaggcctttgctttcactgatgaagaaactgagatacagagagggcagggcacctgttcggagtttatgaaatgcccccccaccattatctttcttgatcatataagaatctggtgaggcaaggtagggcgtgatctttatctctattttatcgttttatttaagcgggaacaggactgctcagtggctgggggccttgcccaagatctccaagtactggggaaccccagggaggccctggggggtggcagtgttcctatttcagccccactctgcttccccctcccaggatatccaggaggtgcagggctacgtgctcatcgctcacaaccaagtgaggcaggtcccactgcagaggctgcggattgtgcgaggcacccagctctttgaggacaactatgccctggccgtgctagacaatggagacccgctgaacaataccacccctgtcacaggggcctccccaggaggcctgcgggagctgcagcttcgaagcctcacaggtggccttcaccgtcattgaaaccttctcttggttattcagagctgaccagggccactgctaaccagggggaggctttgtgtgcattagaaatggtgtcccttctgggcagacgcaggcagagcccgggaagacgccctcagaagattggaaaaagattccccttcttcctgggaagttgtagcttgcgtcagcacatataattcaatcgtgagaatgcaggctgggtttttgcccccacttggctgagtgaagtgtacagtgaacaacctatgtaactatttgctggccctggagccgactctgccccagagtctgggtgccaggtgctttgcccgcatggcccatttcagtcacgctgcagtcctgtcaggaaaaaatcagtgttattctcattctacatatgagaaaactgaggcttgcagatataagggccaaaagttacacagctagtgagtgatggggctgagtttcagactccacagtctcttaaccaccaagcagcatgcccagagtagaggtgagaaggaaggagagagctgcggtccacatgagcatctggacctagcatggacaactcactcctccctggctctcgctttgttcttgttgcgggtgtggtggtggtgggactcaaagacggtaaagatagctttctctcctccctggggaatctgggggttgtttaaaaggcctgctcctcttttagaaggcaggagggccccaagggaagcagaaggtgacagaaggggaaagggtcctctgatcattgctcaccccacagagatcttgaaaggaggggtcttgatccagcggaacccccagctctgctaccaggacacgattttgtggaaggacatcttccacaagaacaaccagctggctctcacactgatagacaccaaccgctctcgggcctgtaagccatgcccctccctgctgcctcttctctcagacagcctgaccccagccgcaaactcccaacttacaacccagtgcctgcccgccactgccccagccgcctacaccacccatttcctccctctctgtccctcctgccatctccctgtgcctcttcatctctggggttctctgtcttgtctccctctgcttataggttgtgcctctggtttgggggcctctcagcctgtctgggtccctcccttgctgtgcagttggcctcgtggcctctgctgctgtttgtgcctctctctgttactaacccgtcctctcgctgttagacatctctctcactgcctgtctctggttctgtcctcaggccacccctgttctccgatgtgtaagggctcccgctgctggggagagagttctgaggattgtcagagccgtgagtctcagggaggcctggagtcagggaaggggagggctggggccgggtggaatgcaggtgtcatacaggtgacatgggaggggtgggataacaggcttgggatgtctcccctgggccaggtagtctccctagaaggtgatgctgatgagggtctggtgcccagggcgccactcagccctcatcctgccctttgcccaacagtgacgcgcactgtctgtgccggtggctgtgcccgctgcaaggggccactgcccactgactgctgccatgagcagtgtgctgccggctgcacgggccccaagcactctgactgcctggtatgtgcctctgctttgtgcccaatgtgctctaccccccaggatgcaaggggtgggcaccctgcctggtactgccctattgcccctggcacaccagggcaaaacagcacagtgaaagccagccacctgtccccccaggcctgcctccacttcaaccacagtggcatctgtgagctgcactgcccagccctggtcacctacaacacagacacgtttgagtccatgcccaatcccgagggccggtatacattcggcgccagctgtgtgactgcctgtccctgtgagtgccagggagaaacacagttttctcattttggtggggaggtttgtttctgtaaatgggagcatatggggagcactgtctgcatcttgctttgagagctggtcatgacagttcctgccgagctgccttgttctttcaacagctgtggagcaggtggcagtaaggagaggcagctaagagcccagacttgggagccagactgcctgggtttgaaacccagctctatcaattagtaggcacgtgaccctcttgctgtgcctcagtttcctcatcagtaaaatgggggcaagaatagtcccaactgcataagatggttataacatttgaaagagttaatatttgtaaagctcttagaacggtgcctggtatgtactaagtgctcctaaatgttagcttttattctatagcctggtgaggtcagttttacctttcgttttgtttttgagaccgaatttagttagctctatcgcagtggcgcgatctcggctcactgcaacctccgcctcccaggttcgtgctattctcgtgtctcagcctcctgagtagctgggattacaggcgcccaccaccatgcctcgctaaattttgtatttttagtagagacagggtttcaccacgttggccagactggtctcgaactcctgacttcaggcgatccacctgcctcggcctctgaaagtgctgggattacaggcgtgagccactgcacccggacttttttttttttggcagagtctcgctccattgcccaggctggagtgcagtggtgcaattttggctcactgcaacctctgccttccgcattcaagcaattcttgtgcctcagactcttgagtaggtggaactacaggcatgcaccaccatggctgggtaatttttgtatttttagtagagacggagtttcactatgttggccaagctggtctcgaactcctgacctcaagtgatccacccgccttggtctcccaaagtgctgggattacaggcatgagccatcgtgcctggcctagctcagttttatttaacagatcacctatttactgatgggcgtttatggactgggctcagacctggggaacctctttcctcctctcacaggaacaggagtgggccttcagatcctggctgactgtgttagggagaggacaaaatgtagagccagaccatttgggttcaaatcctcgctcctccactcactagcacaatgaccttgaataatttacagaactctctgctttggtctccctttttgcaaaatgggaatctcacagtgctgatcccgtctggttgttgtgaggggtaaatggatgtcaggtgctgatgcgtggtagggcatttaagtattggttgatattattcttcttgtgcctgggcacggtaatgctgctcatggtggtgcacgaagggccagggtatgtggctacatgttcctgatctccttagacaactacctttctacggacgtgggatcctgcaccctcgtctgccccctgcacaaccaagaggtgacagcagaggatggaacacagcggtgtgagaagtgcagcaagccctgtgcccgaggtacccactcactgcccccgaggccagctgcagttcctgtccctctgcgcatgcagcctggcccagcccaccctgtcctatccttcctcagaccctcttgggacctagtctctgccttctactctctacccctggcccccctcagccctacaagtgtccctatatcccctgtcagtgtggggaggggcccggaccctgatgctcatgtggctgttgacctgtcccggtatgaaggctgagacggccccttccccacccacccccacctcctcagtgtgctatggtctgggcatggagcacttgcgagaggtgagggcagttaccagtgccaatatccaggagtttgctggctgcaagaagatctttgggagcctggcatttctgccggagagctttgatgggtaagagtgggcacgatgacctgagacagtgtcagggcagacagagtcctgaggatccagatgtggcagcatctcttggggatggcaggagacagaagtggggggatcaagaatgcaaagaaagcagatgggagaccagaggagcagggcctttggtgggtgggggtgattatttttgtaaatgacatgctatccgtgaacaaggacttgtatggaggtcagaccatctagataaagtaaaattccctttgagttcatagcagctttattcaaaatatccccaaattggaaataactcaaatgtgcatcactaggtgaaggaataaacaagtggcagtgtatccatttggtgaagttctacttagcaaccaaaggaaatgaactaccgatacaacataaatgaatctcagaaacattacattgagcaaaagaagccagagacaagattccatactgtctgatcccctttatgtgaggctctgaaccgaaaaaaccactctgtggtgggagagatcagaacggtggttgccccagggtggggggcttcaaaagggaggcacacaaggacatttctggggtaatagaaatgctctgtatagtgattggggtagtggatacatgagcgaatccatttgtcaaaactcatcaaactgtgtgataagagtctgtgcattttatttatttcattttattttttgagatagagtctcactctgtcagcaggctggagtgcagtggtacgatcttggctcactgcaacctctgcctcctggattcaagcaattctcctgcctcagtctcctgagtagctgggactacaggtgtgtgccaccatgcccagctaatttttgtatttttaatagagatggggtttcaccatgttggcaaggatggtctcgatctcttgacgtcgtgatccgcccacctcagcctcccaaagtgctgggattacaggcatgagccaccacacccggtgcattttattgtatataagttatacttcaataagaaatgaattggggccaggcacggtggctcacgcctgtaatcccagcactttgggaggccgaggcaggcagatcacttgaggtcaggagttcaagaccagcctggccaacatggtgaaaccccatctctactaaaaaatataaaaaattagccaggcttcctggcatgcgcctatcatcccagctacttgggaggctgaggcaggagaattgcatgaactcgggaggtggaggttgtagtgagctgagatttcgctattgcactccagcctgggcgacagagtgagaccctgtctcaaaaagaaaaaaaaaaaaaagggtcaggcgccgtggtgcacacctgtaatcccagcactttgggaggctgaagcaggaagattgcttgagcccaggaattcaagaacagcgtgggcaacatagtgagatcccatctctacaaaaaaacacaaaaaattagccgggcatggtggtacgcacctgtagtctcagctactagggagactgaggtgggagaatcacctgagcctgggaggtggaggttgcagtgggttgaaatcatgtcactgtactccagcctgggtgacagaatgagaccctgtctcaaaaaaaaaaaaaaaaaaaaaattccctttcacacttcctttacctccactcccctttccagagggggccatggttaacagtgtgtgtgttcacctagaccgtttatgcatctgtagacacacacacagtgaagtgtggttttcgtcgttttggtggggaggttggtttctgtaaatgggaacatatagggagcactgtctgcaccttgctttgagagccggtcatgacagttcccattgaactgccttgttctttcaatagctgcagagcaggtggcggcaaggagaggcagctaagagcccagacttgggagccagactgcctgggtttgaaacccggctctaccacttactaggcatgtgacccttgtgctgtgcctcagtttcttcatctgtaaagtgggggcaagaacagtcccaacttcataagatggttataccaccatgcctggccagatgattataaagtttgaatgagttaatatttgtaaagctcttagaacagtgcctggcagatactaggtgctcctaaatgttggtttttattatgtggctgggtggctcggggttttatttaacagctcccctatttactaatagacatttagatcatgttccattttcactcttacaaacagttccactttgtgtgtggctctgggaacatgggccagtgtctccctaggccacattcctagaaataagatttcttttcttttttttttttttttgagacagagtctcgctttatcgccaggctggtgtgcagtagtgtgatctcggctcactgcaacctctgcctcccgggttcaagtgattctcctgcctcagcctctcgagtaactgggactataggcgcgcggcaccacacccagctaatttttgtatttgtagtagagatggggtttcaccatgttggccaggatggtctccatctcttgacttcgtgatccgcccgcctcggcctcccaaagtgctgggattacaggcgtgagccactgagcccaggcagaaataagatttctagatcaaaggatataaatactgttttgatagatgttgccgaactaaggcctgggctttgaagcccaggatgggaacagctgggctcgatgggcaaagggtttgagtgaaggcattcatggtggggagtggctggcatggccagtgctgggagtgatgtccaccctgttcctggccctgctgactcctctcctgacccctccagggacccagcctccaacactgccccgctccagccagagcagctccaagtgtttgagactctggaagagatcacaggtgggctctgtctctgcatcctgttctgcaggggctgggagtccttgtcctgtccccactcctttaatctcaccctctgcctgcaggttacctatacatctcagcatggccggacagcctgcctgacctcagcgtcttccagaacctgcaagtaatccggggacgaattctgcacaagtgagcactgagaaagagggggcctgatggggaggagtcccagggaggagtccctgtgggaagctttgggcctgagggagtactcctgtagcagtaacctttccatgaaagtctgcagagtgtgctggggatggaggaagatgagaatagcctttgctgaccgggaaggggtccgtggtaaggtgcccacctttctcccatagtggcgcctactcgctgaccctgcaagggctgggcatcagctggctggggctgcgctcactgagggaactgggcagtggactggccctcatccaccataacacccacctctgcttcgtgcacacggtgccctgggaccagctctttcggaacccgcaccaagctctgctccacactgccaaccggccagaggacgagtgtggtaagacagggagcccagtgtgcgcactccccatctgccagcacacagcagtgcccagggggccctggcagcagcgttcttggacttgtgcagactgcccgtctctgtgcacccttcttgactcagcacagctctggctggcttggcctcttggcatggcttctctagctgggtcctacctgccttggcatccttccctccccctctgtttctgaaatctcagaactcttcctctccctacatcggccccacctgtccccacccctccagcccacagccatgcccacagccagttccctggttcacttggacctggggcctcccctaaaagtcccctgcggtcccttcctcctcactgcagtgggcgagggcctggcctgccaccagctgtgcgcccgagggcactgctggggtccagggcccacccagtgtgtcaactgcagccagttccttcggggccaggagtgcgtggaggaatgccgagtactgcaggggtatgaggggcggaggagagggtggctggaggggtgcatggggctcctctcagaccccctcaccactgtcccttctctcaggctccccagggagtatgtgaatgccaggcactgtttgccgtgccaccctgagtgtcagccccagaatggctcagtgacctgttttggaccggtgagctgctggcgggctcagagctgggtggaggggggcagcgagggggattgccagggacttggcaggatggcgagatgcagtagggtgtgctatctggtaaaatatccctggagagggctcagcgctcagacctgaacagcaacagagtggcagaaaaggggcctgggggacactggggcccttcagactatgaaaaggttctaaggaggtctgtgttggtggctgtgactgtggctgtgctagggtggtgagccctgtgggctcaggcgtcagactacctggattcagacccagctcctgcttccaaccttggttttttattcctaaaatgggtattgtaataatacctaccttgctggggtgtggcaagaatgaaattaaacagggcttggcacagtgaagcacgggaaaggctttctacagagcagtgactgttgttactcgctgttacaccttaggtaatgcgttttcctctctgggtgcctcccattttctggctcaagtccctgcccaggatcaagcttggaggagggccccgagggaggggccacagagactgggtgaagagcaagggtgtttgtcccaggagcatggcgaaaattgctgctgggtggccttgggaagcacaaaggggacccaactaagggcctgatcctactgccctgggggtgtcagtgccagccccccacaaatcttttctgccccccccaggaggctgaccagtgtgtggcctgtgcccactataaggaccctcccttctgcgtggcccgctgccccagcggtgtgaaacctgacctctcctacatgcccatctggaagtttccagatgaggagggcgcatgccagccttgccccatcaactgcacccactcgtgagtccaacggtcttttctgcagaaaggaggactttcctttcaggggtctttctggggctcttactataaaaggggaccaactctccctttgtcatatcttgtttctgatgacaaaaataacacattgttaaaattgtaaaattaaaacatgaaatataaattaatgccctagcagttctatccccactgttaataatttgaaatatttttcctctagttatttttgtctgtgcacattctaatatgtatatataagttaacatatattaatattattctccagttatttttatctgtgcacattttaacacacacacacacacacacacacacacacatatgtatttttagacggagtttcactctgtcgcccaggctggagtgcagtagtacaatcttggctcactgcagcctccacctcctgggtttaagcaattctcctgcttccgcctcctgagtagctgggattacgggaacgtgctaccttgcctggctaatttttgtatttttagtacataggatttcaccatgttggccaggctggtctcgaacccctgacctcaggtgatctgccagcctcggtcccccaaagtgttgggattacagcggtgagccaccatgcccagtcatatatttctttttaacaaatagaatcatagatcatacatattgtttgcaaattgctttttctcactttccagaaccttgaaatgtttttccatgttctaacatggtgatctaccttattcttttaatttttcttatttagttgtctttacacatgaaacacatgaatacatccttgtgataaacattttcagtaacataaaagtataaatgttacaaagccaacgtgccctttcactcaactccctgtccacccagtctctcctgtctgctgggagaaccaccgcattgacttgtgtgttcacccttccaggctcttttctgcacacttatatagacatactacatttatattaggtcgagtcaaataagattgctgtttgtgtaaaccaaaaagtgtcaagagcctgggcgcagtgactcacacctgtaatcccagcactttgggaggctgaggcaggcagatcacttgagatcaggagttcgagaccaatctggccaacatagcgagaccccgtctctactaaaaatacaaaaactagccaggtgtggtgatgctgttctgcactttgctttccccccgacttgaggtatcctttcttgtgagtacagacggatctaccacctttattttttttttaattactcaacctgtaacatggatgtaatttcactttgtttttgagggatattgagcttgtttccctgtttttgcagtttattgcaattgagctccacacacaagtgagccctcttttgtatgccccctagtgggaatacagtgctggcaatgtttatcacaaggatatattcatgcatttcaatttaaagacaactaaatgagaaaaattaaaagaatatggatccaggctgggcatggtggctcacgcctgtaatcccagcactttgggaggccgaggcaggcagatcacctgaggtcaggagttcaagaccagcctggccaacatggcaaaaccccgtctctactaaaaatacaaaaattagccaggcgtggtggtgggcgcctgtaatcccagctatttgagaggttgagacaggagaattgcttgaacctgggcagcggaggttgcagtgagacgagattgcaccagtgcactccaacctgggcaacacagtgcaactccttctcaagaaaaaaaagaaaaaaaaaaagaatatgggtccagatccatatggatcctagatccagatcacggtgttagaacatggaaaaacattgcaagattctgctaagtgaaaaaagcatttgcaaacagtatgtacagtctatattcagaggaggaactgctgggtcatagatgatatttcataggtattgccaaaccgttctctggagaagtggtatgggtttaccctgggattcttctatggagggaatagttgagctcccgggcttgctcttctgggtgcccctccccgcttcctatccaccacaaggagctgcaggggagcggggcatgccggttccttggctggagaaggagtctccttgtgaggtggtagaaggagcactgacggccttgagcccagtttctgcctttgtcaaatggggataatgacccagccacacccctcccagggttgttgtgaggctggaaaggtggttcccaagagggtggttcccagaattgttgatgagactgtttctcctgcagctgtgtggacctggatgacaagggctgccccgccgagcagagagccaggttggcctggaccccaggatgtacccttcattgcccttcactcccccactggatgctgggtggtcactgctgtagggaggggaccccctgacatatgtcccttcccacccactcttccactgtggaacctcctgtcattttccacttcaccaagtgacagaggacctgctcagatgctgaggggaggggactgcaaggaaagatggctaggaaacccagtccctccacaccctagagtaacttgatgccttgtgagggacacaggcaaagttcaattccttggaagtcaagggagactgagaagagtacagctgcagcactgagggagtgatgaattcttaactggggatggtgggaggcttcgagtgggaggtggcatttgagctaggctttgagagaggagcaggtattgcacttgcatttaggtagaaagcattggggtgcaaggtgacactggagggggaggcatcaggaaatccaggatgtcttcaaagttctggtgtcgggggctgttgagtaagcacaggaataagggggtcaagttagagtcagggtggggtctgacctggatgccataggacctgatccccaagccacagggtgggacttgactgggcagtggggacctttggaaaggactttggggagaaaaacagactggagtctgtcttaggcgatcatcggtccgtgaaatgagcatgtgttacaggcttggtatgtaccagaccctgtgctaagcaagggggtatggagaggagagggtgacaagaatattggatcaacacccgggagctccatctatcccaggatgcactatcttttttttatttttttgagacggagtctcactctgcctgcaggctggagtgcagtggctccatctcggttcactgcaacctctgcctcctgggttcaagcgcttcttgtgcctcagcctcccaagtagctgggattacaggcacatgccaccacacccagctaatttttgtatttttagtagagacggggtttcaccatgttggccaggatggtctcgatctcttgacctcaagatccgcccaccttggcctcccaaagtgctgggattacagacatgagccaccgtgcccagccagatacgctatctttttattgagtgattgagacagggtcttgctctcttgtccagtcttgaatgtggtggtgtaatcacaggctcactgcagccttgacctcctgggctcaagttacccttctgcagtagctgggactataggagcgtgccaccacgcctgggtaatttaaaaaattttttttgtatagacagggtctcactatgttgcccgagctggtctcaaactcgtgggctcaagtgatcctccagttttggcctcccaaaatgttgggatcacaggagtgagccaccactcctggcgatgagccaagtcttttttttttttttttttttttgatatggagtcttgctctgttgcccaggctggagtgcaatgacacgatcttggctcactgcaacctctgcctcccaggttcaagcagttcaagcaatcctcctgtctcagccccccagtagctgggattacaggcatgcgctaccacgtccggctaatttttgtatttttagtagagatgaggttttgccatgttggccaggctggtcttgaactgctgacctcaggtgatccacctgcctcggcctcccaaagtgctgggattacaggtgtgagccatcgtgcctggcggagccgagtcttaaaagatgaccctgtggagaaatggtggtccaggctgaagggacagcctatgcaaacactgggaggtgtggaaaatcatgacctgtgggtggaaattttggctagaacatcaaaatcatcaggtgtacattcctgtacccatgcagcagtcagaatctctgggggtggggccccaaaattgtatgcatacagactgtgtgctgatttgtgatattacttaggattttttgactttacaatggtggaaaagcaataatatacattcagtataaaccgtactttgaatacccatacagccattctgtttttcacttttatttttatttatttatttatttattatttattttgagatgtcattttgctgttgttacccaggctggagtgcaatggcgcagtcttggctcaccgcaacctccacctctcaggttcaaacgattctcctgcttcagcctccagagtggctgggattacaggcaggcaccaccacacccggctaattttgtatttttagtagagacggggtttctccatgttagtcaggctggtctcgaactcgagagctcaggtgatctgcccatctcagcctcaagccaccatgcccagccctactttcagtattcaataaattacatagccaggcaccgtggctcacacctgtaatcccagcactttaggaggccaaggtgggaggatcctttgaggccagaagctcgagaccagcctgggcaacatagtgagaccccatttctacaaaaaataaaaaaactagctgagtgtggtggcgtgtgtctgtagtcccagctacttgggcagctgaggtggaaagactgcttgagcccagaggtcagggctgcagtgggccatgatctcaccactgcactcagcctgggcaacacagcaaggccctgtctcaaaaataaataaataaataacacaaacttatttaacagtttactataaaataggctttgtgtcagatgattctgcccaactgtaagctgctggcagtgtaaatgttctgagcacgtgtaagccaggctaggtgtcttaaatgcattttcagtttcaacttagaattggtttatcaggacgtagccccttggtgttgaggggcatgtgtattaacagtctccttagtgacttttttttttttgagatggagtcttgcactggccgtagtgcagtggcacaatctcagctcactgcaacctcttgtctcccgggttcaagcgattctcctgcctcagtctcccaagtagctgggattacaggcacccacaccacgcccagctaatttttgtgtgtgtgtatttttagtagagacgggggtttcactatgttggccaggctggtctcgaactcctgaccttgtgatctgcccacctcagactctcaaagtgctaggattccaggcatgagccaccgcgcccagagtccttagtgatttttacaccatgaattgttgaagccctaagccagagccaagggcaagagtatagagaatctggagatgcggagagggttctgattgcctacaaggagtttggactttattgtggaggcagcggggagccaaggcaggttttagagtaggagagggtccaagcctgtgggtcacccttccgacttccctttccgaatgccaaacaccttcatgtcccccgtgggccccctttgtccctcccaccccaaactagccctcaatccctgaccctggcttccgcccccagccctctgacgtccatcatctctgcggtggttggcattctgctggtcgtggtcttgggggtggtctttgggatcctcatcaagcgacggcagcagaagatccggaagtacacgatgcggagactgctgcaggaaacggaggtgaggcggggtgaagtcctcccagcccgcgtggggtctgcaccggcccccggcactgacccaccaccccctcaccccagctggtggagccgctgacacctagcggagcgatgcccaaccaggcgcagatgcggatcctgaaagagacggagctgaggaaggtgaaggtgcttggatctggcgcttttggcacagtctacaaggtcagggccaggtcctggggtgggcggccccagaggatgggggcggtgcctggaggggtgtggtcggcagttctgatgggaggggcaagagctggaggcagtgtttgggggagggcagttacagcggagaagggagcggggccaagccctagggtggtgaaggatgtttggaggacaagtaatgatctcctggaaggcaggtaggatccagcccacgctcttctcactcatatcctcctctttctgcccagggcatctggatccctgatggggagaatgtgaaaattccagtggccatcaaagtgttgagggaaaacacatcccccaaagccaacaaagaaatcttagacgtaagcccctccaccctctcctgctaggaggacaggaaggaccccatggctgcaggtctgggctctggtctctcttcattggggtttggggagatatgactcccgcaaacctagactatttttttggagacggagtcttgctctgtcacccaggctggagtgcagtggcgttatctcggctcactgcaacctccacctcctggactcaagcgattttcatgcctcaggctcctgagtagctgggattacaagcgcccgctaattttttttttttttttgagacagagtctcgctctgtcacccaggctagagtgaaatggtgcggtctcagctcagcctcccaggttaaagcgattcttctccctcagtctcctgagtagctgggattacaggcgcgagccaccacgcccggctaatttttgtatttttagtagagatgggatttcaccatgttggccaggttggtgtcaaactcctgacctcatgatccgcccgcctcggcctcccaaagtgctgggattacaggtgtgagccaccgtgcccggcctaatctttgtatttttagtagagacagggtttcaccatgttgtccaggctggtactttgagccttcacaggctgtgggccatggctgtggtttgtgatggttgggaggctgtgtggtgtttgggggtgtgtggtctcccataccctctcagcgtacccttgtccccaggaagcatacgtgatggctggtgtgggctccccatatgtctcccgccttctgggcatctgcctgacatccacggtgcagctggtgacacagcttatgccctatggctgcctcttagaccatgtccgggaaaaccgcggacgcctgggctcccaggacctgctgaactggtgtatgcagattgccaaggtatgcacctgggctctttgcaggtctctccggagcaaacccctatgtccacaaggggctaggatggggactcttgctgggcatgtggccaggcccaggccctcccagaaggtctacatgggtgcttcccattccaggggatgagctacctggaggatgtgcggctcgtacacagggacttggccgctcggaacgtgctggtcaagagtcccaaccatgtcaaaattacagacttcgggctggctcggctgctggacattgacgagacagagtaccatgcagatgggggcaaggttaggtgaaggaccaaggagcagaggaggctgggtggagtggtgtctagcccatgggagaactctgagtggccacctccccacaacacacagttggaggacttcctcttctgccctcccaggtgcccatcaagtggatggcgctggagtccattctccgccggcggttcacccaccagagtgatgtgtggagttatggtgtgtgatggggggtgttgggaggggtgggtgaggagccatggctggagggaggatgagagctgggatggggagaattacggggccacctcagcatgtgaagggagggaaggggctgcctgtgccccaccttgcagggtctgtgcacttcccaggattagggaaagaccgggtagggtctgtctcctggcatcacatctccccctgctacctgccatgatgctagactcctgagcagaacctctggctcagtacactaaagctccctctggccctcccactcctgaccctgtctctgccttaggtgtgactgtgtgggagctgatgacttttggggccaaaccttacgatgggatcccagcccgggagatccctgacctgctggaaaagggggagcggctgccccagccccccatctgcaccattgatgtctacatgatcatggtcaaatgtgcgtggctgagctgtgctggctgcctggaggagggtgggaggtcctgggtggaggagcccacaaggggcatgaaaggggaccaggatgtatgtagacccaggagccctagtatgttaggagcctcaaaaccttcttgtatcccttttacagtcaaagtccaaagccactcttgaggaacactcttgtacaaaattaagctgggcacagtggctcatgcctgtaatcccagtacttttggaggctgaggtgggaggatcccttgaagccaggagttcaagaccagcctgggcaacatagtgagatcctatctctacaaaaaataaaaaaattatctgggtgtggtggtgtgtgccagtagtcccagctactcaggagaggctgaggcaggaagatcacttgagcctagtttaaggttgcagtaagctatgattgcaccactgaaatccagcctgggtgacagagcgaaacctcatctcaaaaaaataaaaaagcaaacaaaaagaaaaaaaaaattaaaagggaaactagaagagatgccaaaggttctggctgaagaccccagagtctggtgctacttctctaccacctgagggctttgggctgtcccttgggactgtctagaccagactggagggggagtgggaggggagaggcagcaagcacacagggcctgggactagcatgctgacctccctcctgccccaggttggatgattgactctgaatgtcggccaagattccgggagttggtgtctgaattctcccgcatggccagggacccccagcgctttgtggtcatccaggtactgggcctctgtgccccatccctgcctgtggctaagagcaccctcctgcagagggtgggaaggagagatgagtccagtatgccaggcccctcacggaaggctgcatgctgggctggggaggggccaccatcctgcctctccttcctccacagaatgaggacttgggcccagccagtcccttggacagcaccttctaccgctcactgctggaggacgatgacatgggggacctggtggatgctgaggagtatctggtaccccagcagggcttcttctgtccagaccctgccccgggcgctgggggcatggtccaccacaggcaccgcagctcatctaccagggtcagtgccctcggtcacactgtgtggctgtctgcttacctcccccaaccccggtggactagggtccctttctctgatgttccctcaactgtcacctctcaaggaaaccccattatccctacaaaaaattcttactgccttccaacccctgtgaccccattctctccacggtgactgtgtcataccccaaaggtgacctctgtttttctcctgtgaccctgtcaccttccatggagtccccatcccagatccgtgagtgacccccatcatgactttctttcttgtccccagagtggcggtggggacctgacactagggctggagccctctgaagaggaggcccccaggtctccactggcaccctccgaaggggctggctccgatgtatttgatggtgacctgggaatgggggcagccaaggggctgcaaagcctccccacacatgaccccagccctctacagcggtacagtgaggaccccacagtacccctgccctctgagactgatggctacgttgcccccctgacctgcagcccccagcctggtatggagtccagtctaagcagagagactgatgggcaggggaggtgggaccttcagcccagggtccactgtgggggcagagggagtggcagagacaccggggttccttcccctaatgggtcaccttctcttgacctttcagaatatgtgaaccagccagatgttcggccccagcccccttcgccccgagagggccctctgcctgctgcccgacctgctggtgccactctggaaaggcccaagactctctccccagggaagaatggggtcgtcaaagacgtttttgcctttgggggtgccgtggagaaccccgagtacttgacaccccagggaggagctgcccctcagccccaccctcctcctgccttcagcccagccttcgacaacctctattactgggaccaggacccaccagagcggggggctccacccagcaccttcaaagggacacctacggcagagaacccagagtacctgggtctggacgtgccagtgtgaaccagaaggccaagtccgcagaagccctgatgtgtcctcagggagcagggaaggcctgacttctgctggcatcaagaggtgggagggccctccgaccacttccaggggaacctgccatgccaggaacctgtcctaaggaaccttccttcctgcttgagttcccagatggctggaaggggtccagcctcgttggaagaggaacagcactggggagtctttgtggattctgaggccctgcccaatgagactctagggtccagtggatgccacagcccagcttggccctttccttccagatcctgggtactgaaagccttagggaagctggcctgagaggggaagcggccctaagggagtgtctaagaacaaaagcgacccattcagagactgtccctgaaacctagtactgccccccatgaggaaggaacagcaatggtgtcagtatccaggctttgtacagagtgcttttctgtttagtttttactttttttgttttgtttttttaaagatgaaataaagacccagggggagaatgggtgttgtatggggaggcaagtgtggggggtccttctccacacccactttgtccatttgcaaatatattttggaaaacagctaggcaccggcctatgtctgggggtggctctgtgccatcccttcctgctcaccttacactcaattcctcttttcctggagggagtggctgggaatcttcagaaagcttggatgaggagccagacatccagttctccagcttcagggttgggggagatcgggaagctggattcagatctgagagccctttgacgaccagatcattcttatttagaacgaactaattcctaaggccactcaccagaatggggttatttcctccttgtgagtgaggagagtggtgggtagggtgggggaaagacgaggcagggtctactgtgggactcattttccttgccttggctatgccagaggagctcactgacctaaggagtagctgtccagaaagcccacccagccagcacagccaccctggcggtgcaaaggctgggctgaccggacttctgtgccccccacattcccagactggacgtataaaaacacacactagttagcattagtgtttgtagcgccactttactgccaatagctgacattgccctgggttaggggagaataaataaaatctgtggcatcagacaggtattaccgaggcgaagagtggactgggctttcgtgggcacttaccctgggaagggggtatgaggtggctggagaagtgttcatggagagtgtctctctcctgcccccaaggccacggaatcttctattccttctttgtacccaaagggcaaagtggaggccagggtctctttgctaaggagctaagtaggggaaagaggcagggggagctcccagcaggaccaaagggagaccaaggtttggaccccagaacagagcaggaacccagagtcctgtgcagtcacaggatgacgcagggaggacggctgttggtgatcttttctagggtttctccattactggctcttcggatggcctcaatgagctagaggagtggaatgacaggatgatgcactgttggggtagggtgaccaagaggtcctcccaacgctgtaaatactcacatctttctcatagggaaagcccccattctccagcttggagaacaccagctgtccatttatctctatctcaaaggcacctggtaagaaatcaacagataaatggtacactgagaacataggcagaagtcaggagttcctccaaaggggtcccccgccttcaagtcccccatcaatcccactggagacccatttgtagctccttaagcaattccccaaccctgggtcaactccagggaacctgagggaggcctcgcctgtgtgcccctcgcaacactcaataaaggactccctcccctccaaccctacacgattgcagtctaataggtttttccccacaggcctctgtgacaccccctgacctatggaagggaactcatgttggccggacattttaccatgtgccaggcactgcgggcactttacataaagcagccaatgtcagaactagaaagcgggagagctgggattcagagcacagactgacccagcaggtgttctgcgagcctcacctgtgcccccgaggcgcgactcgatctcgatgcccggatactgctccttcacagcactggccagctccaggtaggtcgcctcgaagccgcagggttcactggggagtcaagagatggggctgggctggggattcgggggtggggcctcccgtggacccacctccgtccggcccgcgggaccagggtgcgggtcctccagccggggccgctcaccagtactccaccacgatgcggaccccactgcccggctcgacctcctcgggagggggcgctacggacgtctgccccggctccccgctcatcgcggccggctccgctcgggcccctgcttccgggtgtgacgcgaaccgcgggcacgtgacggggcggggcctctggagcggggaggggccgagggtggcgttcgggcgccccctgcgggtctccgccactgctacgttttgacctcgtagggcagctccggagctcgctccccgggcaggggctgggtccggtccagaccctccttccctggcccggtctcccggagtgccgggcttccccactccccactcccggtgtccgctggacttcatggcttcatttactctaatggactatcttagactgcaaagcgcttttcagtttacaaaagaaagagaaagtggtggggcaagcatcctggggatgggggtgggtgtggctgatgcatgaaatagttgacattttctcgctaacatgccgatggcattttttttttttttttttttgagacggagtttcgctcttgttgcccaggctggagtgcaatggcgcgatctcggttcactgcaacctctgcctcccgggttcaagcgattcttctgcctcagcttcccgagtagctgggactacaggcgcgtgccaccgcacccggttaattttgtattcttagtagagacagggtttcatcatgttggtcaggctggtctcgaactcttgacctcaggtgatccaccagcctcggcctcctaaagtgctggaattacagacatgagccaccgcgcctggcccagttttttgtttgtttgtttgtttgttttagtagagacagggtttcaccatgttcgccagactggtctcgaactcctgacctcaaatgatctgcctgccttggcctcccaaagtgctgggattacaggcgtgagccaccacgcccggtgctgatggcatttggaaccaccctgtagttacatacacaagtgtttctgatcccaaagctctaaactgctttttccagtcttttgcagctgcttcttgcctgcactggaaaacagtagatgctcttcaggctctgtgcccccaacagtttctgcgcatcccttctcatccagcctctcactggggggctggcgtcattattcccattttgcagctctggaaatggagtctgcacaagtcctcgctgccttttccctgcctacagtaccactatggtatcctaacacgccacccactctagtgtccctttaggctatttatttatttatttatttattttgagatggagtctcactctgtcacccaagcttgagtgcagtggcgcgatcttggctcactgcaacctccacctcctgggttcaggcgattctcctgcctcagtctccctagtagctgagatcataggtgccagccaccacgcccagctaacttttgtattactattattattatttttttgagacagagtcttgctctgttggccaggctggagtgcaatggtgcgatctcggcttactgcaacctctgccttccggcctcaagtgagtctcctgtctcagcctcctgagcagctgggattacaggtgcccaccaccaagccagctaatttttctatttttagtacagatggggtttcaccatgttggccaggctggtctcgaactcctgaagttgtgatctgcccatcttggcctcccaaagtgctgggattacaggtgtgaaccactgcacccgggctcattttttttttttttaaaccaggcaggtcgtagtggctcacacctgtaatcccagcgttttgggaggccaaggtgggcggatcacttgacgccaggagttcaagaccagcctggccaactcgacaaaaccctgtctctactaaaaatacaaaaattagctgggtgtggtggcgcaccagctactccagaggctgaggcaggagaatcgcttgaacctgggaggtggaggttgcagtgagctgagatctcaccactgcactccagcctgggtgacagagtgagactgtgttccaaaaaaaaaagaaaagaaaagaaaagaaagaaaatgcagtgatttgtactgttgcctaaccatcactacaatccagttacagaatgtttccgtcaacctgataagtccttcccacctgtttctggtcaatccagctcccaattccagtcctgtgcaaccactgatctgctttctgtctctaactttgccttttctggatgtttcatataaacagaataatacactatgtggccttttgcttctggttctttcattcaatatgttttttgaaatgcgttcatcctgtagcgtctagagtagtttgttccttttcattgctgagtcgtattccactgtgtggttatgccacatttttttcttaattcaccagctgatggatatttagggttccagttttttttgtcttttttgaataatgctgctacaaatgtttaggtgtctttgtataggtgtgtgttttcatttctcttgggtagattcctaagggtagaactgctgggtcctgtgtttaatttatgattatcttttttttttttgagacagggtctcgctctgttgcccacgctggaatgcagcagtgcaaacatggctcactgcagcctcgacctgctaaactcaagctatcctcttgcctcagcctcctgaatagctgggacgacagacacgcaccaccatgcccagctaatttttttttgtattttttgtagagacaaggttttgccattttgcccaggctagcatttaacattttaagaaatggccagactgtttttcaaagttttcccaccagcaatatatgaggatttgtctctccatatcctcaccaatacttgttttctgtctctttgattataaccatcctagtggacatgacatggtatgtaactgtggttttaattctcatttatctaatgactatgtcgtgtatcttttcatgtagttattagccattcatatacatattatttgaagaaacatctattcaagtcttttgcccatttttatttgtctctttattattgatttgtaaaagttctttatatattttggataccaaccaaaatatatacaaccatatatacaaccatatatagttgtatatgatttgcaactattttctcccagtcttcggctagttttttttcttttttctttctttctttctttttttgagacaggggtctcactgtgtcacccaggctggagtgcagtggcacaatcttggctcacttcaacctccacttcctgggttcaagagattcttgtgcctcagcctcccaagcagctgaaattacaggcgtgcaccaccatagcccagataattttttgtgtttttagtagcaatggccaggctgttttcgctatgttggcaaggctggtctggaactctggcctcaagtgatctggctacctcagcctcccaaagtgctgggatcacaggcatgagccacttcatctggcttcattttttctttcttttctttgagacagtgtctttctctgtcacccagactggagcgcagtagcacaatcacagctcactgcagccccaacttctcaggctcaagtgattgtcacacctcagccccaccaagtagctaggactataggcccgcaccaccatgcctggatagattttatatcttttgtagagatgaggtcttgccaggttgcctaggctggtctcaaactcctgggctcaagcgattcacctgcctcagcctcccaaaatgctgggattacaggtatgagccaccatgcctgaccccttctttttttttttttttttttttttttttttcgtatggagttttgctcttcttgcccaggctggagtgcaatggcaccatcttggctcactgcaacttccgcctcctgggtttaagcgattctcctgcctcagactcccgagtagctgggattacaggcatgcaccaccatgtctggctaattttgtattttttttttttttttttttttttttttagtagagatggggtttctccatgttggccaggctggtcttgaactcccgacctcaggtgacccatccgcctcggcctcccaaagtgctgggattacaggtgtgagccactgcgcgcggcctcctggcctcttattaatggtggcttttgaagtgcaaaaattttaaattttgacaaagtctaacatcaatttttttctcttgtcagttgtctttttgctgttatattcaagttctctgcctaacccaaggtcatgaagactatctcccatggtttcttctagaagttttatggttttagctcttacattcaggtatctgatctatttcaagttttttttttcttatgcatcctgtgagcaaaagatctaaattcaccttttggcatgtggctatccaattgatcacagcagcatttattgaatgcctatcctttcctccatgaaattgtcttggcaccttgtaaaatcaattgaccagaaatgtaagggtttctacttggactctggattctgttccattgacctataaacgcattcttatttattattattattattttcccccgagacggagtcttgctctgtcaccctggctggagtgcagtggcacgatctcagctcactgcaacccccgcctcctgggttcaagcaattctcctgcctcagcctcctgtgtagctggaattataggtgcacaccaccatgcccagctaatttttgcatttttagcagaggcggggtttcaccatgttggccaggctggtctcgaactcctgacctcatgatccacctgcctcggcctctcaaagtgttgggattacaggtgttagccaccgtacctggccttatagttgttgttgtttttaaattcagatacaacttatacacagtaaaattcatcctcttgagtgtacctttcttttttttttcttttcttgagatggagtctcgctcttgtctcccaggctggagtgcaatggctcgaactcagcacactgaaacctccgtctcgtgggttcaagagattctcctgcttcagcctcctgagtagctgagattacaggcgtacgccaccacgcccggctaatttttgtatttttagtagagacggggttttgccatgttggtcaggctggtcttgaactcctgacctcgtgatccacctgcctcagcctcccaaagtcctggaattacaggggtgaaccacgcacccagccttgagtgtgcctttctatgagtcctaagaaacacacacatttgtgcatccaaccccaaaaccaagatacagtatggtcccatcacctctcacaagtccctgtgccccctactgtggacccctctccctcctccccaaccccagacctggtttttgttcacacagttccacccgctccagaaagccatataagttgattcctacagcactccgccctctgactgtggctttgtttccatcccatccttcaatatccaggatgatctttccaaaatgtaaatgtgccctctcctctgtgcttctacttaagtctaaatacaacttgcagggtctggtctttgaccgctactcctgcccatctggacaaacaggatggatggctctcaaacctggtttgcagaacagccacctgagggcttgtcaataccacaccttcctgggtcttagccctagagactgagattcagttgctggagaggagcccaagaatctattttccacacaaggttagggaggtctagaggccacatttgcagaagcacagcttcctctctccacaccttccacacctgtccaggttcacccacgtggcctctgcttcctcccttctcctccaaccccactctctgtctccgcatgctgcatctcctcctgcccagagctctggcattgatttcctcactggggaaagtggcctccttccccaattcccatccaccgattccaacccccttcccatgtcagccagcttctcctctgctcagctgtcacctccactgagaagtctttcctgactccctatgtgagtcattttcccagcatagttgtctcctgtcatttcttatttgtgtgattctttggttaacatcaatcttcctgattggctgtgtgaggatgggcggggtctgtttttgttgtttacgcctgtatccccagcacaaaacatggggctggcatatggtaggtactaaacagatagttgaataaatgaatgagtgaattgtctactctgcctttgcacaagctgctccatcaccaaagagaccttgcctcctcccccacttctttgctgggcccactcataccggttttcctaggaaaactctggagaaaattgaggcaggagccactcattcgtgccccttccagggtggacctcttatcaccctaaggattgtttgttttcctgtcacccacatcaagctgggtggtggccgcagcctttgatctccacctcctaacccctctcccaagtaccctgtgtttgcccagcactgaatgagacagctaaagtgatccctgagagaactaaagtgttccctcaggccgggcgtggtggcttatgcctgtaatcctaacactttgggaggccgaggtgggcagatcacctgaggtcaggagttcaagaccaacttggttaacatggagaaaccccatctttactaaaaatacaaaaattagctgggtgtggtggcaggcgcctgtaatcccagctactccggaggctgaggtaggagaattgcttgaacctgggaggcagagtttgcagtgcgccaagatggcaccactacactccagcctgggtgacagagcgggactctggctcaaaaaaaaataaaataaagtgatccctctaagaggaatccccaggggcccaggccagagctttctccaggtcaccatggctcctcccactgtgccaccctgcctaaccccctcgattttaaaggagaagccaagactctggactttgctcagaaggtggggggcgggggagggagggcttaccctgggtacctctgaggggccagggcgcagccaccacggtaagggtgactgcagatcgaggggcaggccatgttgctggacaccaccctggctggcgtccctctcggcagggtgctctttgccccatggggtgggatccagagctgcagacaggcccccaggcttggccaatgaacagaccaggttcggggagggtgttggaaaagagtggatggggtggttccccttaccttgcagcccccaggccctcccccctccctcccaggtggtcgggactcttgatcttcgctcgtggtactgtctgttcggctgtcttccccgcctctccccaggcacctgcatcctcccttggcacctgctgccaggctaggaagggcaaaaacaatcccagttggcgtagtcagggagtctccgccctcctcccaggtttcctcctcccaggcgcctcccctggacccgcccccatctgcccaagataattttagtttccttgggcctggaatctggacacacagggctcccccccgcctctgacttctctgtccgaagtcgggacaccctcctaccacctgtagagaagcgggagtggatctgaaataaaatccaggaatctgggggttcctagacggagccagacttcggaacgggtgtcctgctactcctgctggggctcctccaggtaaggggaccgagatcggtctcagacgacagcctgccaggcaacccccagccgcaccagggccccaggctgtgccagtctccggctgaactggccggcggcccaggtgggaggattggagccacctggctctccccctcccccgctcggtgatgtcaggccaggggcgggggctggagggggacaggtagttaagggcctggcgtctccctccctgaagacgtggtcccagccgggtgtcctgacgctcggggttcaggtaagaacccaagcgggcatttatcctttgggggcaggcacggccggtctggaggccggtagggaaaggctgggtctcctgatgggttgcttggcctcccacttttctcttttctgtccatttcccaccctgccccctcctccccacccgccctcttttcgtccccatcctggtttccagcgctccttgttccctccctgtacacctccctgcaggcagcagctgagaatgggaaggaagacctgattctctcctccgacttggctttcccgctgaaactagcccctccccgcacacccggggagagccgccctcactctctggctcgcccagtttaccccagtttgggtttccccaagtctctaagacagacgtctctgcgggctgcggggagatgtggggagggccccctccactttggagggcagtgaaggagagggatcctctaaattgtcgaggcttcatctctccagattgtatgcccttctcagcaacaccgcctccggccctccgatgggaaagtggaggccgggtgagacggggtccctcctggcttcagcatgaaatgggcaggaaggctggaggggtgtatgaggggctctgcagtgcggtggggcctggggagagtggggtgggggatagcagatggtttcttctgcttgatgaggctagggagagacccaggttcccggtctgggtctccctggcagattgaggacagagaatgaatgcatctgccggcaaggtggaacgccccccaccccgccccccaactagccgcaccgccccccaggaatgccctcttttggtccgccggtcttggactctgctctcccctctcctgatatcctactgtatgcttggtggggggacctcatggaggcgggcagcctgtaatgattaactgcagagacactccagcattcttcccgaattaaactttaaaagagctgccccgccttctcccattgggtatttttcctgagtgagagtgggcggggcctcagagtcctgggtcctcccttatactaggagtcatccaggggtttctcaccttctcacctgggccctgcaccctaaaaaattataagcctctcccgtgggggcggggcgtggagtactgggcggacgggggctctcccgccacatccaggcccctggcccaggcctcagtcccgcaagcccttccccctgctctgggaagcagagttgttttctgttggccctgaacaccgggccccgccacctgcccttagggccagccaggtggggcgtgattcaggaagtaaacaaggaggttgggaggacgggaacgcgggtggggctggaaccactgggggaggaggcagctgggaagccacggacggagttacctcgttgaggggacaaactgattttgggggtcggtgtttccaaccgaagctttaccggggcctcagtttgaaaactccagatctctaagctgccaggcccacagccaggaccccttcctcctccctgctcaccccattggtcttgacgattccacccgcctccagccttagaagcttaagggcacggctggggggctctgaaggcaaaccccagccttggactggccctctctgatctctgaggccaggctctaatgtgatttgaatctacttctaaccccttccaagcactgccctcccgaattctctgctcctctccccaccccactgttggtctgtgatttcgaggcaggcgtggccccctgcagcctggaatgaagtcactggggctgtttggagaccggggctgtttggaggttagactggggtgggagtgggggattgtgttctggtattgaggtgctggtgtctcttgctagcgggtgatgggtgtgtcgtgcccctcctggcaggaccctgagccccctccctggcctttcatcctgtctgtcttcttgagtgttttccctttccactcctgctcctgtggtacccctctggccgggacacccaggagaatgtgtcaggaggaacttcatccacacagggcaggggctctgagcgatgctttgggtggggaggggcaccgccgggatgctggcttctctccaaatgggcctctgaatccaggccgggcattgcctctctccttcccaggcgagggactccctggcgaggaggtggtttgggactgggggtgagagcagatcgtaggtcccacctggcctggagctaggccgagggtggggaggaggaggtgatgtcaggagcctcaggcccacatcctcctcccccatcctgttcccagccccgtgcctcccccattccgctctggctagcagtgggttggggagttgggggaagggtggaggcagggctgtttttgtttctcctaagccaggaagttgtgtggatgagtcaaggttgaatggagagccctaggcagtgttgtcccgcccgccctgactcacctgtcccccaaatcccctgatgccctcactgaagggtcaggtgcctgctccctcctgaggggtcaatcccaggtgccccaggtggcctcatagtactggcccagtgtttggagaacaggctgggggctgggattgcaggttctcccaggtctcagcccggccaaaggggtctgctgggttcctgcggagaaggtgccagccccacctccacctctagtgctcgtctttgcctgctgtcctgtctttacttgtcttgagtgtctgtgcagcccctataagtgataagacatgggtgagattggccttgcctgggggtaccaggtgccctcagacaaatgggtggataggacaggtgcacagtaatggatgatgcggcccccgcacagtgctgagagagagtcattcagtctgaatgtggaaggccaggaaggcttctcagaggaggtggctctagcactggggcttcaggaaagagttgggcaggaggatggcctggggagggtacgcaaggtttgggggctgctggggccaggacccctaccccaggccctgctctcccccttgcactgcagcggagcccgctctcctgcctttctgactcccatccttccccacctccttctcccctctgcatcactcatcacttgggcaggccaaacctcgccaagtatgaacaggctctggcaactgggtctggcaacaaagtgctggaaaaacccggggcacagcccagcgcagtgagtgccccacacgtggaggcaaaggagtgggcctttgccctgaccctgagggctgagcctgagagtctgtgggttgtgaaatctgttgtgaccaccaggcttgtggtgggtggaccctcagctcttcctgtgagcaactttgtgctaaagaaagagcactggagccgggcgtggtggcttacgcctgtaatcccagcactttgggaggccaaggcgggcggatcaggagttcaagaccagcctggccaacatggtgaaaccctgtctctactaaaaatacaaaaattagacgggcgtggtggtgggcacctgtaatcccagttactcgggaggttaaggcacgagaattacttgaacccaggaggtggaggttgcagtgagtggagatgacgccgctgcaaaaaaaaaaaaaaaaaaggagaaaaaaaacagaaagagcactggacttggagtctaaacacaggttctactcccgactcacctgtgactgagggcaagaatgctttcttctcagagactcggtgtccccttttgtaaaatgaggctcattctgtccttccccaagggcttcagggaaactccagttagagcagtgaggtgctaggtaaactctgaggggcaccctaaccgccgtgtgaggtcaggaggtctgaattctctcatcccctctccccaggacaagggcacacaactggttccgttaagcccctctcttgctcagacgccatggagctggatctgtctccacctcatcttagcagctctccggaagacctttgcccagcccctgggacccctcctgggactccccggccccctgatacccctctgcctgaggaggtaaagaggtcccagcctctcctcatcccaaccaccggcaggtacgatggggcgtggggcttgggggaggtcagtgctggataatacacagaggcttgcaggccactgctcccttccccacacctctctccctttttcttcttgccacaggaaacttcgagaggaggagaggcgtgccacctccctcccctctatccccaaccccttccctgagctctgcagtcctccctcacagagcccaattctcgggggcccctccagtgcaagggggctgctcccccgcgatgccagccgcccccatgtgagttgtccctcagaagggaagggagggatgcacgggttctgggtctgtgggagatacacagccgcttccatggaggcaggggatcttggttaggagtccctgagggtctagcaggtgcggaaagggaatgaatcaccctttgcctcccctcaagtcgtgtgcaattcctggggcgcaggtagtaaaggtgtacagtgaggatggggcctgcaggtctgtggaggtggcagcaggtgccacagctcgccacgtgtgtgaaatgctggtgcagcgagctcacgccttgagcgacgagacctgggggctggtggagtgccacccccacctagcactgggtaagtcaggtgcatggaactatccgggctgggagatgatgccttgcatcttgggctaggcatgtggctcatccaggagatctggttgatctccaataacccctgctttttgcccttgtccccagagcggggtttggaggaccacgagtccgtggtggaagtgcaggctgcctggcccgtgggcggagatagccgcttcgtcttccggaaaaacttcgccaagtacgaactgttcaagagctccccagtgagtgcatgagggctgtctgggcgctgggatgccctgatcctcaacctggatgctggagccctgatccctgacacttgtctacccacagcactccctgttcccagaaaaaatggtctccagctgtctcgatgcacacactggtatatcccatgaagacctcatccaggtggggggaccccccatttcactgcagattcacgactccccagcattggccagtgcttctccacccttaagtcctgtgcctcccctctatgttgtagaaagagccaaatcacagtcctgtgtgactggggacagtcactttccctgcctgagcatcagtttcttctattaaatgggggcgagaaatgcatgtggagcatttccttgtaaaaacctgagggtgggctgggcacggtggctcatgcctataatcccagcactttgggaggctgaggcgggaggattacttaagcctagaagtttgagagtttgagaccagcctgggcaacataatgagacctcgtctctccaaaaaaaaaaaaaaaaaaaaaaaaaaggccaggaatggtggcatgagcctgtagtcccaggtgcttgggaggctgaggtgggaggatcacttgagctcgggaggtcgaggttgcagtgagctgtgatcgtgccaccgcactagcatgagaccctgtctcaaaaagaaaaagaaaaagagaaacatcctggtggtagaggggaagggaggaggtcagacctgtcactctcctctgctctcctctggctcagaacttcctgaatgctggcagctttcctgagatccagggctttctgcagctgcggggttcaggacggaagctttggaaacgctttttctgcttcttgcgccgatctggcctctattactccaccaagggcacctctaaggtaaggtcttgagggtaccagccccagcccctccagtccctggtccttttagaagttgccccttctctgctggaacctctgagcccttctccccctgggccccccaggccagccacctccagtttaccatctctccctacatccttgcctagctcacctgcccagggaggtagcaggagaaaagatgatcttagtttaagtcctggctctacttctatttgctgtgtgaccctgggtattcccctgcccctctctggtcctgaaatctccccacctggcttgtggggggaggtaatagtgggcgggatctacctgtaccaagtcctgctcactcatgctgcttaggatccgaggcacctgcagtacgtggcagatgtgaacgagtccaacgtgtacgtggtgacgcagggccgcaagctctacgggatgcccactgacttcggtttctgtgtcaaggtgaagacctggccaggcctggcccctggcctggggaagcaggaactgctcaggcccctggatcctgcccggggcttctgagccccaattcagacacctagactcctctccctgcaccctggcctgctggaaactcctggattcagctctgctatgtggagcaggggcagacatgtggtcctaaaggcagatatgggaccagtcaatttcctctctctgcagcccaacaagcttcgaaatggccacaaggggcttcggatcttctgcagtgaagatgagcagagccgcacctgctggctggctgccttccgcctcttcaaggtgagaccctgggagtggcatggggggctggcctggccagagggatccccagctctgccctcaggaagtctcaggaatgaggagggcatcacagccttgctctctgataacccccagtccaagcctgaagttataggaagtgcccatcgaaggcagaaacacagccctggtctgggcaagtcctggtctgaggggggcgtcacagccacgcccccaggacctctcgacctcaagctctctttctctccccacccccagtacggggtgcagctgtacaagaattaccagcaggcacagtctcgccatctgcatccatcttgtttgggctccccacccttggtgagtgtgcccaaggggatgggagggtgggtatgcaggccctgtcttacgggtacctgggccctgttctgacctctctcctctccttccatctccagagaagtgcctcagataataccctggtggccatggacttctctggccatgctgggcgtgtcattgagaacccccgggaggctctgagtgtggccctggaggaggcccaggcctggagggtgaggcctgctgtgtgtgtgtgtgtttgtgctggggacccactctctgggtgggatccctgaaataggagggaggaagagagggcggggggaggcccctggctgggaagaagtgctctaccttcctgaggtgctgggtaatgcccccaagcacgccccgactctcccgtatctcccactgctccacagaagaagacaaaccaccgcctcagcctgcccatgccagcctccggcacgagcctcagtgcaggtgggtgacggccccgagtcctggggcgggggctgcctcaacttctctttgtattcccagtggggagtagatggtataggggtcccctccccaaagtgaccgcccatgtccttccccaccacagccatccaccgcacccaactctggttccacgggcgcatttcccgtgaggagagccagcggcttattggacagcagggcttggtagacgggtaaggggcagggccgggcaacagacccagggataagagagactggggtccaggtggcagccatggtccttgggtagtaatgctgccccatctcctgtcttctggcagcctgttcctggtccgggagagtcagcggaacccccagggctttgtcctctctttgtgccacctgcagaaagtgaagcattatctcatcctgccggtgagcttccctgcgtccccggagtcctgcaatgagacacaggactcccagcaacctgtcctcctcaccaggcccctccagaggctccctggcccccagtgcgtctcccttttccctgcacaagaagtgggaggctgagtgcggtggctcacacctgtaatcccagcacttaggacggccaaggtgggagaatggcttgagcccaggagttcgagaccagcctgggcaacacagggagaccccatctctacaaataatttaaaaatgagccaggcatggtggtgcacacctgtagtccagctactcaggaggctgaggtgggagcattgcttgagcccagagggtcaaggctgcagtgagccatggtggcaccaccacactccagcctggatgacacagtgagaaaactgtctcaaaaaaaaaaaaagaaagaaaaagaaaaagaaaaaagaaaagaataaaaggaaatggtggggccctggcccaggagggagcttcccaagcctcgggcccctccctgaacttccaccccctttactgtaccccagagcgaggaggagggccgcctgtacttcagcatggatgatggccagacccgcttcactgacctgctgcagctcgtggagttccaccagctgaaccgcggcatcctgccgtgcttgctgcgccattgctgcacgcgggtggccctctgaccaggccgtggactggctcatgcctcagcccgccttcaggctgcccgccgcccctccacccatccagtggactctggggcgcggccacaggggacgggatgaggagcgggagggttccgccactccagttttctcctctgcttctttgcctccctcagatagaaaacagcccccactccagtccactcctgacccctctcctcaagggaaggccttgggtggccccctctccttctcctagctctggaggtgctgctctagggcagggaattatgggagaagtgggggcagcccaggcggtttcacgccccacactttgtacagaccgagaggccagttgatctgctctgttttatactagtgacaataaagattattttttgatacacctatgagttctgtctggcaaggcctggctggctgaatcaagaagggaaccagagctggacgtggtggctcatgcctgtaatcccagcactttgggaggccaaggtaggagaattgcttgagtccaggagtttgagaccagcctgggcaacatggcaagaccctgtccctacaaaaaataaaaaaatgagccgggcatggtggtgtgcacctgtagtcccagcttctcaggaggctgaggtgggaggatcccttgttccttgagcctgggatgtcaaggttgcagtgaactgagattgtgccgctgcactcagcctgagtgacagagtgagaccctgtctggaaaaaaaaagaggggagacctggagaggtgggcacctgtggaggccttggtggaagtgtcaaatggatcgaggccatgtctcagcctgcctggatgttcctcaagggcaggagtggttatctgagagtctccagtgcccaccatgcagcttgacacatagtaggcgcccagtcattgctaattaagtaagtgaatagacaagagaccatcatcccagagagattttctgacagtctaagtctagagaggtaattaacagggcctgggagttggagatgagtccgacagcatgcttgtcctccgctagtcctggactagctgacggatagttggccccagcatgcacacagttatgcatccagccccaccaccaagacacagaatggcctcatcacccccaacaagtccctgtgccccctactatcagccatgctccctcctacccaaactgaaacctcctttctgtcctagttctgccccttccagaaagccatataaatggagcctgctagcattcagccctctgcatctggcttccatctccaacacatccttcagcacccagagtgatcttttctcaaatataaattcaccactcccggcagggcactgtggctcacacctgtaatcccagcactttgggaggccgaggcgggcggatcacgaggtcaggagtttgagaccagcctggccaacatggcaaaaccccatctctactaaaaatacaaaaattagctgggcatggtggcgggcacctgtaatcccagctactagggaggctgaggcaggagaatagcttgaaccggggaggcagaggttgcagtgagccaagatcatgccattgcactccagcctgggcaacaagagcaagactcagtcttaaaaaaaaagacagatgtctggcctctgcccactgctcatgccagtctatgtttttgtcttagaggtttttttgttttgttttttgagatggagtctcactctgttgcgcaagctggaatgcagtggcacgatctcagctcactacaacctccttctcctgggttcaagcgattctcttgcctcatcctcccaagtaactgggattacaggcgcttgccaccacgcctggctaattttttgtatttgtggtagagacggggtttcaccatgttggccagcctggccttgaactcctgacctcaagtgatccactcaccttggcctcccaaagtgctgggattacacacccaagccactgcgcctggccttgtctaagagttttttagtttgagctcttacctgatgggagctctttaataaatatgtcagatcgactgcatctgaacttgctgcttaactcaggagacagaccctcctgcagacctgtgaaccccaactagtcattgtttttgtcaaaacaccaaacctgaatctgattccttggattcaacaactagtttacgggaaatacaagggaaacaatgacaaaaatccagattgggaaattctacagaacagataacccagtttcttcttcaacagcaacaaaattaccagaaaagatgggcaatctctagatttcaagaaatttagacatatatcaaccaaatgatgtgttgacctttgattcaaatgcaaactaactgtaaaaagcatttatgagcaattgggggaaatttgaattctgatcagatattcgatgatattaagggattatggctaactttctaaggtgtaataatggtattgcagttacggttttttctaaatctttatctttaagaaattcattatgaagtatttaaaggtgaaatcacatgatgtctcagctttgtttttattccttttcttttttttttttccaacttttattttagattcagggagtacatgtgcaggtttattacctgggtatattgagtaatgctgaagctttgtttttaaaataacccagaggtggccaggcacagtgggtcatgcctgtaatcccagtactttgggagctgaggtgggaggagtttgagaccagcctgggcaacatagtgaggccctctctacaaaaataaaaaataaaaaattagccaggtgtggtgacatgcatctgtggtcccagctacctgggaggctggggtgaaaggatcgtttgagcccaggaagtcaaggctggtgtgagccatgattgcatctctgcactccagcctgggccacagaacatgaccttgtctcaaaaaataaaaagaaaaaaatgaaatccagaggttaaaggagagggtgtgggcatagtcatggtgtggccatgagttgacactggctgttgatattggttgaagcttggtgacaggtactggctatgtggggatttgttaaattatcctctccacctttgtatatgcttggatattctattatatattgatatattttaatggagagccccttctcaaatctttgggactgactgggcaggaggtggtgagacgctgttttgtaggtgaggaaactgacggcccagtgggcagcctggccccagatcacagtgggagagccaagattccaacccaggtctgaggaccaggtctgggcatgttctgcttcccctgtctggctgacgtccaggtggcattcctcagccacagtgacagcaatagtggcctactggggtcctcccttagagagcccctcccttccctgcagccttggtctctggcctggagggttgtcctgaggtgaccttgagactgtgcagcctctgcaatcagcccctgggctgggtctggcagccctggcagccactcccgaccaaggcacccccatccttggctaactccaggctgggaagctgggaccaggtccagcagacagaggtgggcagagaggtctcatgcacaccccagcctgggacctcctgggaatctgctggaagaacttactgcagcccaagggcaggaagggtggcagattttgcttctttttagcaggactggaggcaggacccagtgcaacctgctgcctgccacctgccacggttcccagagccatccccaccacaggctgtggctcgagcaccgaacagggcagtgtcagctgtgtggctggccatgggtgcccagggccacctccgaggtgtgggtgccagagttccaggctggagtgagagtaaaggggtcaagatgagtcacctcttcagcatgtccaggggttcagactgtaaaaaaagaggacccagtgtcccttcacagcctgaggcactgggcagagacaaagcctctctgtcaatcagctaattggagactgtgagacagatgtccttcccactttacaaatgggaaactgaggctcagggaaagacagggactcacctgcgacaggggtcgcagagggagttcgggacagaggccagactcagcccactggacaggtggtgaaatgcagccctgccctgctctagcctttgttctctgccccctcccttctcagtgctggccacagtgagggacctaggctgccgagagcccttagagggggcagcatttggccctgatctggccacctgagaccagcagcagcccattcttggtgagtgtctgagatttctggctttttggagacgtagctgctaagagtttgggggcacagggaccctctcagggccagctcacagtggaacccctgggtaagatcccccagctctgaggatgtgggaaggatgctgctctacctcagagactgcagcatgacctacagtggtcagacagcagaaaggactgccaaggacggctgcagtgctagatcggggaggcttgtggttctgagaaaatctgggctggtgggaggggaagcaggggcttctctgggggagagggtgggggctgggacctcagatactgtcttttcaaaattgatttattgggtttcattctaaaattatacgtacttattaaaaacatttcagaaaaaaacttgagggcaaaggggaaattcctcatcatctttccatgcagaggaggacccagtactgagagagggtgacagggcccacatctggggagctgacgcgaagtgctgcctgccatgcatcacacgttccagcttcccgggaccagcgtggccggtgggagccgggtgccagggcacattgctatccttggcagcaccatgggcctttagggtaggggttctgtggagggtgtggctacaatgttggcctccctgcctgctcaagtgtggaggggagggaggactgctgccaacgctctggactctgggatgggggtgggcatgattccaggggagcccacctccctgggcggggcatccagacaaagccctggccagttctgcaacatccaagttcacgggtggtggacaggcccaagggttcaacatcaggtcagggaccctgcctggctccttccttgggccccagtgccaggcaccctgatgagggatgaagagaggaaggacaggacacagacaggggagcccaaagccacttggaaggattctttcttccaaactatccacataagcagttttctaactccttcccagagcccaagggttctggcaggggcttgaggggcaggttggggtggtgatgggggatgcattgcctttctatctggaacttgagccttatggtatattcaggaaaaaggcttgaaccagtgaagtactgatctggtccaacagatagaaagagggcccagagaggtcagggcttggtccaactcgcacagtggtggggcgtctgcagactgctttcctgtcctgtgctgttggcagaacctcagctttgggacttgagggggagtatgcagtggcaattaggacaaacgactctgagctctcagttgagttgggggaggagagaaaagaaggagttagatcctgggggagttggatgttgcagactggactccagagcctgggggtgtgggcgatcctggggtgtggggagggcgggctgaggctgctccacaagcgttctcgaagttcaccatacaagaaggggcggtgtggggaaatggggatgaggcctgaaattcaatcccatgtgggttgagttatgatgtcatctgacaccctctcacacggctgcatctaccccaaggaaggggcaagtttttctttgatgggcacctgggggggctgtttagctggagttttttttgtttcgctttttttgtttttgtgttttttttgagacaagtttcgctctgtggcccaggctggagtgcaatggtgtgatctcggtttaccgcaacctccacctcctgggttcaagcaattctcctgcctcagcctcccaagtagctgggattacagacatgcaccaccacgcccagcaattttgtatttttagtagagatggggtttatccacgttggtgaagctcgtctcgaactcccgacttcatgtgatccgcccgcctcagcctcccaaagtgctgggattacaggtgtgagccaccgcgccgggcctggagctgcatttttgttgtaagcactttgttcttacttggattaggtttattttagggtggtttggggcagactgagggagattggaaggcagaaaccaccccctcaggacaaccacgtggatctccttagggtctgggtagtggaactgggccctgtgaccttggagttggaggggaagctgtaagcagggatggaacgggccacccgcaccctcacacagctgtgaccaacaggcacggtcatccgcattcacctgcccaactcccatgccctgagtcctgtcctccagggcattcctactggcactaccccaatttcccaaaagattccagggatctctctctcgctctctctttttttttttttacagtctcactctgttgcccaggctggagtgcagtggctgatctcagctcactgcaacctccaccccctgggttcaagcgattttcctgcctcagcctcttgagtagtttgggattacaggcgtgcgccaccacgcccagctaatttttgtatttttagtagacggggttttgccatgttggccagactgatctcaaactcctgacctcaagtgatcctcccgctttggcctcccaagggagggttccttcctcccaggctgaggcaccctgccccacacatctactggaggaacttagtgttggggccagggggtggctgggtaaggctggatcccacacttgtcaggccaggttggggtaggggaggatacacgggggacccgtctctcagccgttctgggccggtgcctgaggcgatctgccccgccgcccgcccttccgccaccacccaagtcgcatgcgcgcgccggggccgacgggcgccaggctccaccgagccaccctccgtcgtggcggcccctcgtgcctctgcggagggaaggccgccggcttcgccagggggcgcgcgtcggggtcgcggctctttgaactcggccccacgaggggacgcgccatcggtttcgtggcttgcgtggcgccgcagcaacgagccggtcgccccggggcgttgcttagtccgggcctcgctgcgagtctgtgggcgaggcgggaggtgcttccttggccaggcgggtggaggaaggtgtgggcgccgcatcccagcgtcgcggagcctccaggcgcgggcaggcgagactggcgtgcagcgcgacggcctagtcccggcgtcccaccgtcccccactcccgcaggcgccgagccgattcagccgcgcggctgcagtgacacccagcggccgtcgcgggaagtgcggtcgccgcggccaggcctccggggctcctgtctctcgaggttcccaccccggttacgcgcgggcaccccggaggagagcggccgcgcgctgcagatgcccgcgggggcacttcccctgcccctcccccgtttcctccccgcaggcgcccgagcgccgggagatcctgcgcagcggcagtgcccggaagggcggggcggggtgcagcagcggcgctgggctgtgacccgggcagtttcacttctggatcctgctcgggctgtgataggacagcgcgggggcagcgggggaacacgcgggcacgccgagatccggcgctcgggaccccgatgaggggaggcctttcactcctggggtgtcacgcgacccacgctttcctccatgtccactcccaccccccatgggttccactttgctgtcccccgagctgccgctcctccccagcagacaccgtctccgccggggctgccgacccccggagaggccccgagcggcgtgggcggcgggaggagggagctgtgaagccgcaggcagggggttaggctgcgggctgctgagacgccgagctgtttctcagaagtgcagctgcccctcccctcacacccccctcactcccaccgcgcgccgcacccctgccccctctccgccggcctccctttcctctcccaggcaccctagccgggaatctggggtctgggtccacgcagaattaagaggagaacctgagaaagggcgggggccgggggttcagacccagcctcagcgcgcgttattccgagcctcctataattccacaggtgaggggatcctgtcccctacccctggggtccaggattggaatttgatagaacagttaggaaaatgacatcttgagagagtcagggcccggccactattactctagctccagcgtccagtgaggagaggagagagagggaagacctggagcccggctggtgcagtgaggttgaggcctgtcttaggagtaccagctggaaggcccttcagagatccctgactctggggaaaatcaacgcccagaaggggaagtcaagtgtctgggctcatcccgagagggagagggctgggattggaaccaggactccaaatagttgcgggagtctgcgactgtcttttgcttgggacttcagagctttgctggattcactgactcagcctgctttccctcaacacacacaaacacacacacacgagacacgtgcacgcgcgcacacacacagatacacagacacacacagacagacatgcaaggagagagacaggcacacatggagacagacacgcacacgcaaagagacacacagctccccaggagtctagcggggcagctgaggtctgtgagtgagacattctcagtgagacactgagaatgcaattccagtgggggtgggatggggattgggcggtggaaggacaagcccgggggaggaggtggcatcgcccccctagttcccatccaccaccacccccagtgctgtggtttatttgcctaggcagctcttctgggccagggggccagggtactggggtggagaggcgaggtgatgggaaaggctgttctggggcttcctgccccctcactcctggggaaggggggtagctgccatcacccgcaggcctttccactgcagccctttccttgggtatgtgtgttattctgggggaagatctgttatttgcggagaagggaggcagctgcctacttcacaggtcaagacagagttaaaaacaaaaccacagcaaattcaacaccccgtgtccttcagggactttccatgacaccttccttcccccctctcccctaagccagggagcacctccccagagggcctccccaccccaggtgcagtggcttttggcttttatgcaaacaactgtctgatcccggaatgctccacagcccgaactgtggcctgggccgaatgtgcccctccaccatcccttgggccagtgtttctggtcttcctggagttgtgacctccactcttcctcagaccctggattctgagggacaggagatgagggcaggaagctaggtcctttccccctgcctgccctcgggtggcagttgcctgcaggtggagggtttgggcacagcaacctaagtgaatggtccggggttttgagtgatgggggaggggaagaaggagggtgcaggtgtggggtggcctccactgccaggcccaccaccctctagggcattgaattagctcccaagatcaggaaggaaaactcttctcaggctgggagtccattcaaccccaacgccagtgtggacctccggtcctgctcactggcaaagggggtcaggatctccctgtctccctctcttctgcctgagctgcttctgctttggggagggatttggggatggggaaggccatataatcttctctccagggctgaaaaccagctactgaggggccgtttttgaatgtattcagtgctaaaatgcaaaggcagggtgccatgccattcctttctcctcctcagcttgagcaagactgggaaacctgtaggagaccctcagccagtttgaacattttggagtgctgatgggagggagatgatgctgatcatggagccagaggacgctggtgccagcctagccccacatttgttagtcttaaaacttcagacaatctttctcatgcctcttccacagaagacggaaaatggagggtgctttagatgaggctgagcagaaggccagactctctctctactttctctaacgttttctaagagagaacacaatgatgatggaaagaaagcagcctcatccctatgccattctcctaggacttttccccctaacaccttcggtttgggtctccaggtatctaaaaactgtatttaaatatggtcgagtttaaggactgcaactcaagtttcccaatgtggatgtctgtgagcccccacacatgaaaaagtcagaacttgactgtattttaagaagaatctctgttgagggaggaaggcagagcagtgacttggaataggggtgcaccatgctgaatgtgctgatcatgctaagtccaggtcctcaacctcctccagtttccttagtgaactaaggaccagtggaaccaggaaccctatcttgtgggttacaggggccagcagcaggatcacagtggtaggctcagcaaggcgtcaggtgagaacctttatttcagtgataattcatttttcttgataactggactttaagaaatagaggggcaaaattaagaaagtattccttggggcgggatgaaacccttctacatcctgacaccagcagacacaaatcataagtgataaggatgcacaaggactaatttcaaacataccaggatttttttatttttcagtgtaaaaatcaaacatgataaacctagaaaactatcagcagggctatttcttacagggttccagcaagggttagcattgttacatttcagaagctgactttctttaaaccatctttacagaggagtaaacttcacagttccacacatggctgggctccaggtagaactccataggagtgacgagggaaagtcaccactgggcagggagggcatttctgagaaatgcagatgagaggagaggctgtgagcacaggctgtgtcaaaacccagggcaagggctccctcccgccttccctcccagtgggaaggccaccctgagccccaaaccacattctgttccttcctcgtcattctgcagacaatggtcatccacagaccacacgtgtggtggctttggcaaccagaaatttaaaataagctatggtttttccagtagccaaaatgatcctgcaccaaagctcatagactgagaacctgagcatgcaaaaccacagtctgggtgaagggatgtctgctttgtaaatgacctgctaattctttgcaacccacagtaatttggtttctgtgaacccacagaagcaggcccaccaaaaagggccttgtctgctagcctggagtatacatgagtcactggcggtgggatcagtcattttttaggctgccccattttcctaacatgttaaaatgtgtgttctcagtcttttcaagagaggaagaagcaaagcggcacttacagagtgtgagatagacacagatctgtggcgagggattggggaaggtgggtggcatcttgggactctctccaggctttctggagtggggtcagtggagagatgaacagtgagaaacatttgaaataactcaagttttggagcagcggggggtggggtactaatggctgaggactcacagacagtgagggagcaaagcgctttgacttccctgggtgcgacaccatgaagtgtctatagcacgtggttagctcacgctggttccaagggtcagcagatcctctgcccttgtgcattaaaacaacatgaaggaaactgttagagatcagttacctccataattcatttgtaaaggaattgctattatgatctagtatgatcttgggatatttttcatgtctttaaatttaggacacggtacattttccactgaaaatttacaatcatccaacataatgcacaccacccctcaaaggtaacattagctcatatacaaaatcatggaaaacctcacaacatccttggaaggtagatattgttatatccttacaaaaatttaatacacccattaacattcctatttcaaatagctcaatcgatatcaacacataagacagcccacaattgtgatacagtattaagaagaaactcaggccagccgcggtgcctcacgcctgtaaccccaacactttgggaggctgaggtgggcagattacttgagcccaggagttcaggaccagcctgggcaacatggtgagaccctgtctctacaaaaagtacaaaaattagctgggtgtggtgacccacgcctgtagtctcagctagttgggaggctaagacgggaggatggctcgttgcttgagcccaggaggttgaggcggcaagtaagccttgattgtgccactgcactcagcctggggaaacagagcgagactttgtctcaaaaagaaaaaaaaaaagaggaaacttgtatccaatttattcaaactgcaaaaccctgtgtatcttcataacaatggtggggcaaagactatctacagctggggcaagggagaggcacagtcttgtgttactttacaagctctcagaagtttaaagcccacaattgtccttcaggctcttctgagtccatggtcctaaagggtcaggagtcctgaaccctggcttattctcagaaccattcagtcgtgctgccttggagaacagagtccttttcctgaggtggcccaggtccagctgctggtttcagatcaaaattgacctccttcatcggcacttatatctcaaatcattctccttgtctgaactctggatatagaggttttttgaactatactttctgtgtgaacacaaaaatagcttcccattctctaaaagatgaggtatcactatatatcgggtttttttcttctgttcctggtgctaacttttaggacaaagtttcaccactcccttttctcttcttgagctcacaagtcccgatgctgactctttgagtcctcagatagccaggctctttcacatcttgagtgtcccagagtttccaaatctctgctagagtccaacatacctcttctcagtggggtactctttaaagtgaggacttaaacatttccattgtggtcttatcacctgggattatatgtaacagtactatttttttccttaaaacattctttttttttttttttttgagatggagtctcactctgttgtccaggctggattgcaatggcgcgatctcggctcactgcaacctccacctcccaggttcaagcaattctcctgcgtcagcctcccgagtagctgggattacaggtgtgcaccaccacacccagctaatttttgtattttttttttcgagatggagtctcactctgtcacccaggctggagtgcaatggcacgatctcggctcaccacaacctcctcctcctgggttcaagcgattctcctgcctcagcctcctaagtagctgggattacaggcatgtgccaccacgcctggctaattttgtatttttagtagagacagggtttctccatgttggtcaggctggtctcgaactcccaaactcaggtgatccgcccgccttggcctcccaaagtgctgggattacaggcgtgagccaccgcacctgaccctccttaaaacattctaaacctcacattcagtagggcttggggaggtgggggtggtacaggaaataggagaataatagtgatacagatgctacctggaaaaactttgttctgtctgttcctcacgaaacaaagccgaaaagaaaaactttatgtggatgtgagatttgatagtaacacagtgtttcacctgagcaaaattttgtgtttttaaacatttctgtttgccaaagaaatctgaggttgtggctgggcgcagtggctcttgcctgtagttccagcactttgggaggctgaggtgggcagattgcttgagcccaggattttgagactagcctgggcagtatggcgaaacgccatctctgcagaaaaatacaaaaaaaattagctgtgcatggtggtgtgcctatagtcccagctacttgggaggctgaggtaggaggattgtttgagcctaggagatcaaaatctgaggtcattttatatctggccgattttgagtatgggcctaacaaaatgttaagcactgcatttaaaaggtgagaaattttgtcactgacaaagtcagaagctgtgtcaggaacagctcacagtgggtcataaagcataagattagctggcttatctgtgccaaggcgaatgtctttttgggagaataacttgaggaaactaaagactgatgagttcattttctctcttttttttttctggtggtagtggtgggggctcacgggagagacacttctatttagttttctttccgtaggaagtaccgatgcaacacttcaggtagtgacagaaaacatttggagagctgggcattgtttgtgcatgcctgtaatcccagctacttgggaggctgaggcaggattgcttgagcacaggagtttgagtctggcctaggcaacatagtgagaccctggtcctctaaaatatacatacatatatatacatatacaaaaaaaataaaaataaattaaaaaattaaaaaacacctggagcactggttctgtttcttttccaccctcagcccagttctgtcaccttggctgcaaggaaactttgcctgggtttttttgtttgtttgtttgtttttgttttagacagagtttcgctcttgttgccgaggctggagtgcagtggtgccatctcggctcaccgcaacctccgcctcccgggttcaagcgattctcctgcctcagcctcctgagtagctgggattacaggcatgtgccatcacgcccggctaattttgtatttttagtagagatgggggtttctccatgttggtcaggcaggtctcgaactcccaacctcaggtgatctgcctgccccagcctcccaaagtgctggcattacaggcgtgagctatcgcgcccggccctttgcatgggtttggttgttcctcagaccgtggcctcctgggtgtatggtggaaagcccgcctgataagaggctggtgggaaatgaaggagaggggcctacaaggctcttgttcagagggagtctgcatgagaaagtacaggtactatctgaagctgctccagggcttcagtgcccagcagtggcagatgcaagtcctgactctgcccttctgctaagattctccttcaccctcacctccccagccctggcaaggggtttgttaattagtacagcataaggggtatgtacagaaggcagcgtttatctgtgtgatggtaaccactgcatatctggttcaacttcaagacttaaggatgcagagtttccacacataaattttttctggaattgatgggccccaatctaggctcagaatgccacaaagaaagtgcctttgtgagtggtcaccttactcagaaaactaacctcagaagaatagaaatcatgcagcaaattcattagtcacaggaaaaaggaggatcatatctataaaaagagtccccaggctggtggaatgggccttggtttcacaatcttgagatgcaaaaggtggtctcaggctgggtgcggtagctcatgcctgtaatcccagcactgtgggaggccaaggcgggcagatcacctgaggtcaggagtttgagactggcctggccaacatggtgaaaccttgtctctactaaaaatacaaaaattagccgggcttggtggtgagcacctgtaatcccagctacttgggaggctgaggcaggagaattgcttgaacccgggaggcggaggttgccgtgagccgagatcgcgccactgcactccagcctgggcaacagagcgagagactgtctcaaaacaaaagaaaacaaaaaaagttggtctcctctgcaaagacttgaacactaatctggtggaaaggcttcctttccctcgttttctcttctactaatccctgcttccaaattctctttctcttgtcccttgaagaaccaacaggatgtgcgatatttcaagaacgtaatgagcaactcctctttcacaaagggaataagcaatctggcatagcttggagtctagtattacggaaatacagtgatatactgaagactacacaccaaaatacatccattcctttagctgaagtctcaaacatgttgggactgttgccatggaatttcataaaaccttttttcctgagacagacgccatgccacaaagaaggataagccatttgtgcagtctgaggtggaacattttaattactggcagcacatagacgagttgagttggagccgaatgcataagccccttagaaataaaacactaatctaccaggaatttgggattcttggctctggtagaaatgttacaaattaagctgactcttaatttgtaaataggctccatgaagttgtccctggaagcagaatttattttccctaacataatttcttaaaaagtaaaaaaaaaaagaaggctttggcaaacagctgcatgtgccaatttgtgtgtatgctttgtggcaagatcaaaatacctttctgttttttgttcctctccaccaccttcttcacattcacaactcagtggttaaaggaaaaacttaacacaccattttcataccaaaggaatgtgaaacatgtattcatataaatactcttctgcttaatatccatacattaggaggtttaaaaaataccttgtggttactgcataatcacatatgaattaaagctagaagggacctaagagaacattgaaatctaattcctattttatggatgaggaaactgagttttttttgtttttgtttgtttgtttttgttttgttttgtttgagacagggtctcactctgtcgcccagactggagtgcagtagtgtgatctccactcaccgcaacctcaacctcccaggcttaagcgatttttctgcctcagcctccggagtagctgggattacaggcatgtgccactactgcccagctaatttttgtatttttagtagagacagggtttcaccatgtgggtcaggctggtctcgaactcctgacctcaaatgatgcgcctgcctcggcttcccaaagtgttgggattacaggtgtgagccaccgagcctggccggaaactgagttttaagagttaaataaggctgggtgtggtggctcacacctgtaatcccagcactttaggaggctgaggcgggctgattgcttgagcccaggagttcaagaccagcatgggcaacatagtgagacccctatctctacaaaaagaacaaaatgtagccagacatggtggtgtgcacttgttgtcccagtactcaagaggctgaggtgggaggatcacctgagcctggggaggtcgaggctgcactgagccatgattgcaccactgcactccagcctgggcaacagagtgagatcctgtctcaaaaaaaaaaaaaaaaaaaaagttaaacgatttctcaaagtcacatagctaattagccagcattttgtgacctcctattccagtgctaattttaccatgataacagcactcctcctgatagtatgtacatattatgagtgacaaggatgacttatacatctgcagaaccgtgatcagactttcaggaattttcatggaatacagcagttccatttaaatgggaaaaaaagggccgaagcctgcctgatcaaggagaacctctcaatagaggtgtccctcctcaccccattccggagctcaactccgatctaaacacacatgccatctatctccaattcctctcctgtggggagggggaggctgagccatactttttggactttttttgtggaaaatatcattggcaaatttgctttgggtctgtatcaccaattctccatgaactctttcaagaagttttaggtagctgttttttgtttgtttgttttctgttggtgctgccaaacaatttccccctttatacccttgctctgccaaccttgaccaaaggaaagcgatgtcatcatccacagtggataaatttctggagtttcgatgatggtctatatttaaaaccatgagttcttctggcatagattttcttctatagacaactggtttagcccaaagcagctcagcttttcactggagatgggaaggtaaaggacagaagcagaagtgccatcagatgacattttttaaaaatgttgtgataggaaatggatctgatgcttggagaatggggtcttcagttactcgtaacagatacttattttatggctgttcttttacttactcttagactgtcatttagattagggagattagatcttaacccttcagcctgtgaagggcagaagggtgaggcttcccagcaaggtcagctggtcagctcttcctctttgtggatttgcatgtatgactgaaaggcttttccacgtgtggttgatatatctcagaaagaatgtttcatatagcacatctccgggaccactcattccactgctgtagaagataatgaccaaatacctttttggcttttaaattccataaaattcaagtccctgatgggaaaacaaaggtttcacaaaagtaataatatgctagacctgcgaataatttctgaaggaagacagtgtttccctggctacccctgtgaacacagctaaaaatggtatgaaaagaagtttggaactgagtatgttttgagagcaatctgttaggcgaggtcattggtttttagaaacgatgctgaatacataggagcaatccctgagaccagatattcacttcagcagggctctgtgttctcctctggctatgtgagacgagaactcataccgatcatggcttcgatatccacacatgttacactcgaaagggtcacggaagccgtggcagcccatgtgaatcgtgaacatcacatagtccaggaagaggacgcggcagtggtcacaccgatacacatccatcacctccccttccttgttgatcactttgacggagtctcttgggcagatgggcgggggcttgaggagttcgtaagagcggggaacctccttcagaagtggcatcccattgcgggcccgagacaggaccatgtgattttgctgatagatgtgattctggcgttcttcatggttgctgtcagtgtccgtggagtcgtggccactattgttgggagagaggcctctctcagaaggcacgctcttctctggaaggtggatgcttttcttttccagctcttgaggggcaccgtttgacatctcagcccgggtgagggctatgggatacatgctgctgataactggaaccatctccgaggtgggagcaggcggtgtctggaccaaggggcgcagggcttcggcgccaagatagctgatggcgttattgatggcttggtccatcatgcgggtctgtatgagctcactctctttctcatacatgtaacttgaattatagttgacatcaaagcagtggcgcttctcacctggaacaagtgacagaaagggttacaaagggaacactgccaaggcagagagtttgtaaatattttctagagacctcaaaaagggaggagagttaagttgcctgctgctcaagaagaccaagcctggcagaatggtttcccatggtgctgtctcaggggacactggtcggcagcaacgtgtttggatggttaaaataaagccagcaggcagaagagaggggcagagatgtggttcagttgaggccacatggtaaggtatgcccactgtgcatgttagaggagagccctcaagaaaggagggaaagaagcaggacactaggatggggctagagggacaagggagccaccagcccacaggagcctgggacttctgctatagttcatgatctcttaagacacagtcggctcccaactcttattttgcttttgcttgttattttctgcttgcaatattaggtagccagggggacagaagtgctgcaaagagtggggacactcggtgcctcacctcggcagctttttaaatagctacagagatagagaaaatagccccccagactccaactggctactccccaaactcacccgtcctggctgactgagactgaagtgaaagagcttcaaatgtagaaagtttgagaaaagttttcttgagaagagatcatggtctttgtccctttcctaacgtgtgtttctcttcctttgcttggcaagtgtatctctgatacacatgtgatcattagggcctatctcacacttaactgaaaaaatatacttgtggtcaccctctcctacttctcatgtcaaactgctgagaagttttgaaaacagagtttagccaccttcagagtgtgtgggtgttgtgtgttagaaaacagaggctctctggtcacagggaaggcagggatggggactgcagtgagggcagatgtgctcagtggtgagtggtggggagaggggagagaaagcgaggaagtggagccgagtgctggaggtgaggctgaggtcactgttgagcctctccattctgtcagcttggatcctggagggatttgctaaaccatatccttctataatgtttcctagtcatgttgagattccaaaatttgtcactgccctacagtaaagggttcagcaatgaaaataaagaagaagaagaaaaaatgccatgagaaaacaaaaggattggaagaaccagttcctgttcttgaggtgtctccaacctagtggatgagaaataagacctatatatatatagaactcgagaaaaagtataagttaaaagttggccgggcgcggtggctcaggcctgtaatcctagcactttgggaggctgaggagggaggatcacttgagcccaggagttcgagaccagcccgggcaacatggaggaaccttgtctctacaaaaaaatacaaaaattagccaggcatctgtagtcccagctactcaggaggctgaggtgggaggatcacctgagcctgggaggcagagattgtagtgagctgagatggcaccactgcactccagcctgggtggcagagtaagaccttgtctcaaaaaaaaaagttgtaaaaggactgctttgctctatggaggtctttgcttttattctaaatgcccacatttgaggcatttaggcagggaagtaacgtgttctttaaaaagaataataaggtaacatacaggcatcggtgagacaatttggtataaattgtatatttaggcattaagggaatgcagaaacttcagaagtacttggggaagggaaagcattcttggaaaatctaaattttgagaagggtcttgaactggaagaatttagattttcagagaagcgggagaggacatcctagttgagggggagtgcaggaatgaaggcagagaggtgggactacacgggacgtgtgcagaaagcgagtctggctgaaacgcgatcaagaagtatgaaatacagtatttctcaggcttcactcttccttcacattctgcaatatccacacaccagggcagtgtggtggttgagagaataaactctggtgtcagatgggctgggtttgatgctggctccattggtcaccagttttgtgaccttgggcaagtcacttaacctatgttccgtgtcctcatgtaaagtgaagataattgtatgtacctcacagggtcactggaaagcacttagaacagggcctgccacatggaaaacacttggtaaatgcttgggtttttttcctctgtttgatttggttcacattttctttctttttttctttttctaaaataaatgtggtttttaaggaaactttatatcactaacataaacggaaaaccagaatcactttccacaagtagaaggtaactatgaaaaataaagacaatgaaacagagcatttcattaaattttgatcggatactactgtgagtacttggagactaagatcccttccccctttgttaaaaacagagattaccaagtgtgagattagtgttaaagacaactggcatcaaattaagtctaaatttttctccttagtatgatccaggagactgaaagagaactggaaagaaaataattatcctgctgtgtggacccaggtttttaaatgctccatgtgcttgctggcaatttgcatcctacatttggggaaacactgaaaaaagataatgcatggtaggaccgaatggtgggcattccgaatggcccactgtagggtgtgaatccgaaccaagagccaaggctacctgcccttgagaaagacaggtttgtggttaacgtaacagcaatgtgtaaggcagaccagaacagtgagaaattggagccagaagaaccagctaaaagatctattcccatgagatgaatttgtctttgcatccccacaagcagctgaccttaaggccaacctgatagtttccagagaaatacctgagagagaaaaaaaatatgcaaacgaaaataccctgtcttggaaactcaatgagaagcaacagcagagtagaccttggccaaagtaatcaatgttttttattttcagtttccagattggatatatctttggtcaaggccatctggaagactgagaacatgagagccagctaaggtcacagacattcattccctagaatgtgacacagaaatgatgaacttcggtttcttggcctttttaaggttattggttattttccactgtggccacctctattcatctccctaaataccaggggtccttgagaaactttttctcttttcacccaacagagaggctccagaaggtttctgggtggggtaggcacatcacaaactctgattttatcctttctcctaagagtttgctttacttaacaaggcctacaatttcacaatctataccacctgcagcatatgtcagaaaacagctgagtgctaaaattgtaaaaggcaaaacattaagaggaagataaacccctggatgagtggaaatatgtgactgaattctgtagttaacacagaccattgttcattgttaaggagatggggcagcctcagatgttcacgtgcatgcaacttgcaatcatcagatcccctcgtctctgagttacggtaacttgagcagtgcagatgattatcagtcacctgtagacacgatgactcaatgtgtatgaaacccagaaagggtaaactacagtaattgaaaagccaacagctcacgtttctttagtaacacactcataaaaaaggttagtcaaaccacaaaagtgtaactgcttccaaacctgcacggagcatctggtccagcttctagtcaaaatcacaccacgcctttgaatgattcatgataccagcttcaggctgaattagaggtcttcttccaacaaaaatacacacggcaacagcaagtcctaagtttagaaactaaggctgcctggttgggccattccctacctgtggttctttttaaaggtgtcaatgtcttatatcttggctttgttaactctaaactaagaaaccacctgacctgaactgatgcaatgtggtgaggacatatggttgttggcttctaagtgccaacttggaagtacagaatcacaggctagagctaaaagggcccttaactgagcaagtggattcagaactctgtctgcagggttgagggggaagacccaccaccctaatatgtttacttctggtctttatatttcacagtaccttgcactgtgccttatatacaataatcccaataatgataagtactatttattgagcccctgctgtatccaccgtgccatcctagatactttgcatactgtctcattttaccagcccattaggggttgatactttttttttttttttgagacagagtcttgctctgtcacccaggatggagtgcaatggtacgatctcgactcactgcaacctccgtctcctgggttcaagtgattctcttgcctcagcctcccaagtgtctgggactacaggcacgtgccactatgcctggctaatttttgtatgataccttttaaggtatgaattatcatctcttagatgaagaacctaaagcacaaacagtttgattcactttccaagattgcccagttggtgaacagagaaccaggatgtaatccaagagcccacatatcccagtatatgtttgagtgttaactgatgtttcctggctgctaccttgcccatggctgcacagccccaccaccagcagtgacttcaggttttctgctgtgatggttcccatagcagagggaaagggggcttagtggcagcaactgctttttccacatggaccagcacatgcactcaagaagtatatgctgtgcagagttgttatgatatctataaagtgcttagcagtgccaggcatgtgtaagcactctattcccattatttgcttagcaccatggttaggtgatttgaggaatacaacaaaattgcaatccactagaggagatgcagcatgtacatcatttcatgacaaatcagtatccttaatgctacatggtagaacaaaacatagagtagccaagagagtggaaagagaaaactgaattacttctcaaatatgccacacttaatatggggcaaagattcatctattctttaaagtctccttgaaatcagaggtggtggtagtgacggtggtggagacagtcatatctataataagaagcagactagtaaactcgcctggagtgcagagggaggatggagcagagagagaacacaggggtgtgggaatgtggacaatgtgtgcttctttttattttttatttttgagacaaggtctcactctgttgctcaggtgggattgcagtggcgtgatcacagctcactgcagcctcaacctcctgggctcaagtgatactcccacctcagccccctaagtagctgggaccacaggcccatgccaccacacctggctaggtttttgatttttttttttttttcagagacagagtttcactatgttgcttgggccggtctcaaattcctgagctcaagtgatcctcccaccttggtctcctaaagtgctgggattacaggcatgaggcactgtgcctggcctacaatgtgtattttaagggcagatgtgagggaggccattcagacaagagtgagatattacacagaagagggaggaggagttcattgtggctgaagtaaaggactggttggctgaaatgataaaattagaagaggtaagttgaagacagattgtggagggctcagaaggcctgactgaatggtttagatttgattccactgggagccattgaaaggtttttttgaagaggggggcaaaatgatcgaacctttagaaaaataacagaaatccaatatttagagtcaccatgatggggtaaggtgaaatattcaggtcttaagtcttaaagttcttcaagtcacttaaatgtgtttgctgctgcgtcatataatttcccacaagtgttatccctcactcttactatcagcacacatccaaaagcaaatgaacaaaaaaggcaggaaaatagaatatccaaccatcatcatggctctgatctcaacctaagtgaaactaacacttcttgcaggaggtggaaaacagaggggagccagagaacaagaagaaacaggaaggaggaaagaacagagagagctgtgggggtggcactggggaaagctgagctggagaccacatttggttgctgcagaagtctttgtcctctgtgagacactgggaagtgctgtgtggatgtcatctgttctcatggagtcaccagggaagactgttcttttctaaagagaatcacccttgagggagaacaattgcccttcttcaagggtttttttcctcctatcaattttcttttttgtttttgaaacagagtcttgctctgttgcccaagctggtgcgatctcggcttactgcaacttctgcttcctgggttcaagtgattcttgtgcctcagcctcccaaatagttgggattacaggcacccaccaccacacctggctaatttttgtatttttagtagagatagggtttcaccatattggcccggctggtcttgaactcctgacctcaagtgatccacctgcttaggactcccaaagtggggaattacaggtgtgagccactgcacctggcctctcccaccaactttcaatgaccagactccttgctgtccaaagccccgcgcatgacatgcactgctcttggtcacctcctggggaaggaagggcctggactgcagtgccttataggccgaggtctggcgctgctctgtcacctgccagctgtgtcactccacctctctgatcctccttccttccatggtaaaagagcctcactggtggttcctaatagcccaaaaatactatgacattgtaatgcttacaggattatggacatcaggcctttgggaaggggttggaaaaatacttttttttctcttagaaacaggtattaaaactgcttcctgttgctgttaaccaaagcaggcaatttctcattagttacttcacagggagatccgatggtttgttgaagtgtcaaaacctcattaacatgtttaccacaggtgagtgagatctttttttcatgttcttttcgttatgaaaacttcctttaataaagtaatacataaaacttttaaaataaggagatgctatggtaaccactttggtctgaataacatctgtttttttgggaaagaataaaaatcaggagaaatatgcagaaatgtagtcatttttcttctgcatccaagagagaaatccattttgagccaagtatttgaggatggcctagtttgaagtgtagtcaaacaagtttataacaggagaacaagattcagagaaaggaaatcccctaaaggacagtatgtgcaaaggaaggtcttcttgtcctttgaaaagaacaacttaaacagaattattctgacaatgtaaagatggtgattcctgatggacgtgtgtccatttttttttttcccatttgaaacaaagacatacaaaatttcttggagaattagaaaaaaaaatatttttctccaacttgagagcatgtttgtgtctcaaaatacatttagacttgatccaatctgtccctcttccccagttcatctctaatggatgcaaaatgctccctactggtaattatcgccagcccgcctgagatagcagcgggctgacctgatggtctattttcacctttaccctcacagttcaagaggtcagggaagtcaaggctggtctgagtgctgtgcaactgtcagcaaggattaaagggaatgactcactcttccttcacaccttacccattgccattaccctggcagctgaatcttcaaaaaacagtgccttggagaggaaatataggagaaaggagagaagaggagaagagaagggaggagaggagggaagaggaggggagggaacaagaggacaagagaggagaggtgaggtgaggcgaggcaaggcgaggggagatggagagaaaacagtagccccatgttttacatcacttcatctcatacactgcacagtgtcacaaataatgttcctttctccctccgttgacattactattttctatcacaaaggttgattcaattaaataatttaaggggtttcttttatttttaatttttaaaaacctttcaaacaaaagtttaggatataagttaatgcaagaagattagaacagtgcccaaaacaagaataccatatatatgacaggaactcttaaccttctgtatgatgaatgaatggacaaaaaagtgagtgaacaagtagtactgccctaagtaaaacacatgaatgtcgggctaatgcgactgtgttttagattctcagatttataccatcttcctaaaacaaaaaagactctaaaaacctaggatatggtttatagcataaacaccacatctgtatagccttgagaaaaaggctatctgaagttacgcacatgggctttctaaacacacagtggtatcaataattgctgccttttatttcttttctaattaatctcacagacttgtacatgggaggagacttcctggtcacttcatcacctattcagtctcctcatttcacagatgagtaaagagaggcccagaaaggttctgtgattggtctaaacacacagttaagaaatgacagagctaggatcagaacctgggtcttttagcttctaatccagtactcttcttattgcactacaacacaacttacgaaaaaaaaaaaaaattcccccagttattctgggccctgaagccctgaagttgctacctcaatcaagagctaactctactaggtttctgattccagcacagagagaatgtgatggttcagaagatgagagaaatcaacacctacaagatcagcatctctcacaagtctggaagtagtgaagtgaaaatcctctggttgcaattgtagcaaacaaacgaaatagatccccgaggcaacaggcaaaatggcatgaatttgcacatatgaaacatgctatatttttgaacccatgaaataccaaagcaacttttattatattaagtagggctttagttcaactataggtttagggcaaccgaaaatactagggactgtctctcaaattttagttgtcttacaccaaaatgcattgaccacaactggattgaaattaagtcacagctgggcgcagtggctcacgcctgtaatcccagcactttgggaggccaaggcgggtggatcacctgaggtcgggagttcaagaccagcctgaccaacatggagaaaccctgtctctactaaaaatacaaaattagccaggcatggtggtgcatgcctgtaatcccagctactcaggaggctgaggcaggaaaatcgcttgaacccaggaggcagaggttgcggtgagccgagatcgcgccattgcaccccagcctgggcgacaagagtgaaactctgtctcaaaaaaaaaaaaaaaagaaagaaagaaagaaatgaagtcgctttacatttttttcttgcccagctctccctatgatgtccctcctcttgtcggcttcagccatttctagagtcaaagctttctccagaccagcctgggcaacatgaggagactctatctctacaaaaagtttaaaaattagctgagcctggtggtgcgtgcccatagttccagctacttgggaggctggggtaggaggatttcttgagcccaggtgtttgaggctgtgattgcaccacagcacgccagcctaggcagtacagtgagaccccgtctcaaaacaaaccaacaaacaaaacccataactttctccaaactaaaatacactcagaataataaggcaagctttcttttgtactccagtcagaacctcttcacataagtaaagcccaaaagatatatgggaatatttgtagacaatgtcttaaactcaccatttgtttactgtgcctaaactctaaatggaagtcactacatgctcccctgacatgtctcaccaaggggagggaggacagcaaggaggaggggatctccctaaactgaaatataccaacttttctctgacacaatttgttcttaaagtgactaaaagtgcacaaaaacctttcagctagtcaaaataaaataagtaggcagaaataccaaattaggtaattttgaaatatatgggttctttcaatatacctctataattcacatagactgtttgcttgtcaaaacattatctataccagaatcaaatttagtcagatttaaaaaccaggcaggcaacttattatctgtaagagctattgagaagaataaatacaaaaggactgaaataaaaaatcaacagcggcaagcagctttggaaaaagaggctgagacaggtttctaaaatattactgatgttgagggaggtctattttcatgtgataactatttttgttcaatatcaccaactttcaatttatagcaaaactgatacattcaatttcagctgtctacttcacaaatacaaatctatttcaaatatcatggtcacatttatgtaaacatctgggagagttcagcaaaatgtctctgccatttggaagtcctaacacttcaatgaacataattatttcatacccatctcattctgctgtattttttgacaatgtgaaaaccaatggcataaaaatgaactccagtaagacaaatgattaaatcaaaccttgttatttaaatctatgtttgcccaaccactttcccttaaagccaattctcaaattcaagaaaatatggcaatatgttttagagcatgaaaaaagtttgagcatgctaacgaaccaacttgtaaaatataattacaaaagattacaaaaatgctatcttgaacatcttactggtataaattgcataaactctctcatgcaacatatgtcattcagagtaaagaggaaggaacaggattttaaacatcacatccatttaggaaattggatatcaactactcccatctcctgtcatgatgatgctttagttaatatcttttattctattttccagagctatcagaatgaaccatgaagaataaaagtacacaatgaaaaactaattattttaacagaggttaagctaggaaaggccttgtgtagcaagcatcctatgttatttcattcaaactatctgctaacaacagcaggaaaaaggtttgtattcttaccaatgaatttctgaggcattgagctttttcgttttgccacattgcttgctaatctgtccagtacgagagctctttcacttcccatctctgctttgatgtgtcttgcctccgcacttgctagtttggaaaaatgtaaaaagaagagagaaaagaacacattggtacatggggagaaaaggaaataaactggaaggagaagtgtccgaagttggatgcacactctattgttgttacctgttataactgctcagattcttgcctggggtacctgctgtggtcagtgaagccgacaccagggcacattcaaatcttgcagtcttatgccgagatgggaaagctcgacccatccccaaccagtaccttcattagcaagaggaagtattaaataaacagcctggacgtggttggttgcaaaaagatagatagatggagatctaacccccgatcagccttctttctgattctgagtaactgcgtgtgacacctgcagactgatataattcttaacaactttgaaaaaaaagcatggtgccccagatttactgctctgtttatgttaacagcacttttgaaaataggtacactcacacagatagcaagacatctactcagtgatttgtgtattgaaattctgagtggtttctttctttttctttttctttttttttttcagcacgctcctctcagttcctatctttcatattctgtttctctgtgctctgtattatctgtttcatatgctcttcacatttcaaaatagtctcaattaaaatttccctaagcaacacttctgccttgaaattaaagaacaatttgtataatgcatctgtattgaatttctaataaaaatgtgaataaaaactgcctatgggctgggtgcggtggctcatgcctgtaatcccagcactttgggaggtggaggtgggcagatcacctgaggtcggagttcgagaccagcctgaccaacttggagaaaccctgtctctactaaaaatacaaaattagcctggtgtgatggtgcatgcctgtaatcccagctactcgggaggctgaggcaggagaatcacttgaacctgggaggcagaggttgcagtgagccgagatggcgccattgcactcctgcctgggcaacaagggcaaaattccgtctcaaaaaacaaagaaacaaacaaaacacaaaaaaacctgcctatgaatgtgggcccatccacaaatagacctgtgagtggtgtaggcctgtggttctcagacctggctgcacattagactcacctgaatagcaggtaagaaatacctatgcccaggccccccttcagatcaattaaatcaggatttctggtataggggcctaggcaagaatattttcaaagctccccagatgattttaaaatgcagccagaattgagaactactagaagagtatataaatagtggcaatatctaatcaactaaaatagtaaactgtaatgaatataatttacctcaattcagcaggcagtgcccaaatttatgtctaaagttcaaagaaggccaggcacggtggctcacgtctataatcccagcactttgcaaggccgaggcgggcagatcacctgaggtcgggagttcaagaccagcctgaccaacatggagaaaccccatctctactaaaaatataaataattagctgggtgtggtggcgaatgcctgtaatcttagctctcgggaggctgaggccggagaatcgcttgaacccaggaggcagaggttgtggtgagccgagattgagccattgcactccagcctgggcaataagagcaaaactccatctccaaaaaataaataaattaattaaataaatttcaaagagataccagcttctctaaatacaaggcttgacattttaacacatgatgctagcctgaaccagggatcagcaaacttttgtctgtaaagggccagacagtaaattttaaaaatttgccagacacatatagtctctatgttatattctttgttttttgttttttttttttctgttccacggccttttaaaaacgtaaaaatccctgtacacaaacaggccactggctgcacttgcctagagcgccacagtttgccctcacctgccctgggcaaacatattgtgatgctgtaaacatttttctctgttttctcataaacacttcgggagatccaaactaaaatgaactatccatacatttctattatgtctaaggaagaataaattgaaattagtttaagggattagagtaaaaagcaagtagtggctggcacagtggctcacccctgtaatcccagtgctttgggagactgaggcaggaagattgcttgaggccaggagttgagaccaacctgggcaatatagcaagatcctgttcctacaaaaagtaattttaaaaaattagctgggcatgttggcatgcgcctgtagtcctagctacttgggagactgaggtgggagggttccttgagcccaggggtttgaggttacggtgaactattaaggtaactgcaaagaccacaattacttttgcaccaacctattagtgccagtgcactccagcctgcgtgacagagtgagactctgtctaaaaaaaaaaaaaaaagccccaaagtattaaatatttctaattttattagtggccttaaaaaactgtatgttagtcattacacaatacattataaagctcagttttcattatttagttaatttatttacttatttttgaaacagggtctcaactctgttacccagggtggagtgcagtggcatgatcacagctcactgcaggctcaacctcctgggctcaagtaatccttctacctcaggttccaaagttgctgggactacagtctaaagccaccatgcctggctaattaaaaaaaaaaattattagtctcaatatattgctcagtctggtctccaactcttggcctcaggcagtcctcccacttcagcctcccaaagtgttgggattacaggcatgagccactgcactcagccaaagctcagcttttttttttttcctggaataacataaaatctggctctgccaggtgtggtggcactagcccatagtcccagctactcaggaggctgaggtgagaggatggcttgagcctaggagttcaagttcagcttgggcaacacagtgagatcccatctcttaaaaagaaaaagaaatccagctccaaaaatgaaaaagaagaggatgataataatgtgataataatgacaatatttactagacagtgagtttcttgtcaaaaataattctaggctctaaaggaataaatcatagccttcagtgaagctattaacaactatttgtgtaaatgaaaacagtaagggtcagaatagggggcctgagtggcttttgggctagtgcaaaagtactcgactgactctggctgaccagcagttgtaaataacgggcacttcagccacaagacactgctattgagtgaagagggtcaaattctgtccagcacagggataggtttaaatgaccaaacaggaaattatttatatatattatttcctttcacacaaaaccaccaccagatgtggcactacccaaagccccaagagcagagagatgaaagacaaagcttggaatttgcagtaagttcctggggctgttaggagacttttttcttagaatcaggggagaggtagctaagtttgcactttgactaggaacattcatcctggttccagcaattttgagaagattaaatccaagtaagcctcccctcaaccctgtagttatcaacaaaaagatttatagggaaaaaaagaatgaaaaacagtattctgggaatgtttaccttttatgcccattttaccattgttcttattagtctattgtggtccctcctctcactgccaaatcattacccaggaattaccccaagcacggtgctacccatctagttttcccatttgtttctcagcagtcgctgtctacattttactgaagtcaatgtcaattaaaacaagcagctttctgaggacacgtaatcaacatcctctacatttgggaggatgctgaagtgtggacacattgacctaaataactgtaattagggcaggtcactaaatggcaaacttttgagataacatcaccttttattcctcgttacccaccaaactggtctttagagtcatttccagataaacattattctgtaaatcagtgaccaaatgcctgacatttaaaaacataaaattctgcagtgttcatggatggacatattttgaggcatgggtggagactttcccatttccacaactccgattagattgaaagaaatcctctgaaacgaatctagaggactcctgttcacccacaccctctttctgggtcattcactcaaaatattaactacaagagctccactctcattgtacatgtgaacacactcctactgattcagttgatcttcactgaattaaccttgttttctagttgataagttaggcaaaggctagttttcaattgaagatggcactcattttctttcctaaactgctagtcttttgcctcacacttgttggatagctgatgcacaataccatgaaatgagtgccctttgaaacacaaagagccaggttccatggtttgcgcctgtaatccagcactttgggaggctgaggtgggaggattgcttgagcccagggagctatgatcttgccactgtactccagtgtgaggaacacagtgagccctgtctctaaacaacaacaacaacaacaacacacacacacacacacatatcacacatacacaaagaaatgctttgtaactggacaagctctttgggattactgagtggtttaggcagtgcactgaaaagaaaaaaaagaggactattggcttttggtccttttctccaactttaggacccaactgtctatttatacgaacagtctagacttgttatcttgccacttcatatctcagaaatgtaagtggagggaaaccagtttggcaagatagtaagggaacaagataatgggtttaaatgacgaaataggaaatccgttcctgggtggtgtttggcggtgtaatgctgcaagtggtgggtgtggggaatatgggatggtggcaaggaacaatttgcacattcagctcatgagtgagaacagaatgagtagaactgtcattgtggatcaatttcccttcacattgcttgcctactaaatagtagacatactaattttcattagaaaagttattttaaagacgtgctgaaaaaataataaaatgtagtacaaagtcacatttacagattaggttactactacctttattccctgtataagtcttaatatttggttttagttaactatttccatgatacaatttctacctcaaagtcattggaggtttaactatgtaattgtgttgtgcttttgtttttgttcaaaatccttcattagatcttgaagtgttaagtggagcttaaataagaggtattgcttcctgtctcttctatggtgtagtcagtcagtaactaatggagagtggaacaaagtggtgttattatgcaatagaaattgtctaacaagagattggtatcaaagacagaggcaggttctaacaaaaaagtttcataaaactgttgcctttttgaacaagtaaaatgaatactacctgtgagatagcattttttattttttgagatggagtctcgctctgttgcctaggctggagtgcagtggcatgatcttggctcaccacaacctctgcctcccgggttcaagcaattctcctgcctcagcctcctgagtagctgggactatcagtgcatgctatcgtgcctggctaatttttgtatttttagtagagatggggtttcactatgttggccaggctgttctggaactcctgacctcgcgatccgcccacctcagcatcctaaagtgctgggattacaggcgtgagccaccgcgcccggccagtattgatttttaaaaagaataggttggggccaagtgtggtggcttacgcccataatcacaataatttgggaggccaaggtgggcagattacctgagatcaggagtttgagatgcctggccaacatggtgaaaccccgtctctactaaaaacacaaaaattagctgggcatggtggcaggcacctgtaatcccagctactcagtaggctgaggcaggagaattgcttgaacccagaaggcggaggttgcggtgagctgagatcgtgccactgcactccagcctgggtgacagagtgagactctgtctcaaaacaaaaaacaaaaaacaaaacaaaaaaaaataggttgggaaaacaaacttaaaaatttttaaacattttctttggtctgctaagttggtaaaaatgtaagtttattctgaagccctcatgcttgtattagcttgaagaactattgaagatgaaaagtttggagtcttagattcataaatagatgtgattattcaattatttaaaaatattattattgctagaactcattgttacataaaatatttcctgctccaagtattcataatctgtgtgaatgaggctaaatgaatctctataccggctgttagtctctttctgaaataagaatcaagctaatgggaaaatgcagtccatgttcttctgtatttttccttcttttcatatatactccattaagacagaattggaatattctgatggtgtcacttgtgatgcctgatgtagaaacttggactaaagtagcaatatcactagtgtctttttttttttttgagatggagtcttgctctgttgccaggctagagtacagcggcatgatctcagctcactgcaacctccacctcctggattcaagcaattctcctgcctcagcctcctgagtagctgggactacaggtgagcaccaccacacctagctaatttttgtatttttagtagagacggggtttcaacatgttggccaagatggtctccatctcttgaccttgtgatccgcccgcctcggcctcccaaagtgtcaggattacaggcgcgacccaccgcgcccggccaggattgtaaatccttaaagtgtaggggcttaaccttaactcatctttacaaacagctttgatacagagcctggcacatagagaactcaacaaatgctatctggataaaagaaatgattagcaaggccagaagtcctgttgcccaatacctgcatttttttgcaggctggtcttcactccaaggcctttttatccatctgcttgcttctagaaagtcctgcttccccttgcaggcaggtttgtccacaggcttggctctcacactacgctgcacttcaacttacaataagcacttgaagaatgagtgctgcaggcacaacagcaatggagcatcatctctttacaagtgacggatgaggcataagatgtactatactgctcaggctcagaatagaaccccatgtccacaatggactcccaattctaagaaggaaacagaaatggaaaccacacatggaagggtgcaaaatagttaaaggattggcttatgttgggttaaatattctgtaaattttggcctcaggaaaaattataggaactatttgaaatataaaagagtaatgtgtgaactgagatgcagtaacttgattaagctgtgaatttacacatttataacctgaaaccaccattacaacatatttgtttgaaaaaaaaatcaaaacttgctgacttagttaaccctttatctttttttgctgagacttaaagtatggtgcacgcatccaccaaaccaccctatgaaatgcaaattaactcaacctctgtatttcagcatttcctgaatcacctaatatcactgagaatagctaaaatattacttttgatacttttccttatttgaaattcctaaaaaaggttgtgagaatgggaagtaaggtggtgaccttacttcaaaatcaataattttgaacttactgtttatagagtgtagttttctgatttttccccctccttccaggagaatcaggacacacatatatgtatatacatgtgtgtctattagtatgtgtgttactatatttcttttgcaaaccagataatatataacctttaagaaatatagctaatcaagccaaaaagtggaaaaggtgtaaaagactcaaatgtccattagctgatgaatggataaatggaaagtgccatatccaaacaatggaatattattcagccacaaaaaggaatgaagtcctgataaatgcttcagcatacataaatgcctcagaaacattatgctaagtaaaaggagccgacacaaaaggccacatattgtatgattccatttatgtgaaatgtccagaacaggcaaatccatagagacagaaagtagattggtggctgccaggagctagaggaagggggaatagggagtgactgctaatgagcacagcactgcttttgcggatggtgataatgttctgaaataagatagtggtgatggttgtacaactttgtgaatatactaaaattattgaaatgtgcactttaaaaaggtaaattttatagcatgtgagttatatctcaagtttttgaaaattaaaaaatatgactaatcacaaaaacaactaaagttctggtgaattttaagtaggtcactgaattttgggcgagtctcagtcttgtcacctctaaaatgaagaagtagggtcagatgctctctttcattctagctttaaatattagtgattctacttggaatatgatagatttcatagcttgggaatctcttacagtgagagctttgcctattgtctgaaatacagaactgcaagtagagatgcctacattccgtccttgagcgagtactgcctgactgccatgaagcatgccacttaagatgtcaaaatctttcctagcaagcagactcagataaaagcaaaacaaagagaagatgtcaaaacccaaatattaggtttttctttttattttattattattgttttagagatggtgtcttgctttgttgcccaggttgggcttgagctcctgggctcaagcaatcctcttgcctcagcctcctcagcagctaggactacaggtgtgtaccactgtgtatgacctgtttgttttttataagggggtaaacatttctttttatttggataagctttatccaaataagttggatttcctttatcaaattagaaatccaactccttgataaaaccaaagatgccattaggataaaaagcagaagcactgcaagccatcagaattcagttggccagctcctaacatcatgcaataggttttatctaaaataaaagtttcctctcactcaaaatgagggcagtttaggtagtcatttctactccatttttcctgagtttcacattatttctgtcatctttttgtaacttttctgttttagcctattcaaactactcaactgcaacaattgctgtcaaacactaaatcccatgagggtttgtacctattctaaataagcaattggttcaagttaccaaataaaaatgtcagacaacccaagctgcagaaccaggctgacagccaactcaatgggacaaaggacagctgaagagatgtgacacaaaaaagtttcaggctgttccaacaaagaattaaaaggaaataaaaccacaattgagatatagaagaacatctagtgtttcaaccaattgccagtaggcatctaattcaaatcactgaataaaacaaggaatccccaaagccaaatagaagcatcacaataaatcatatgagtagacaaggatataaattgggccctgtgcaaagaaaatccttgtagttttaattgcctcttccctagccactccccaacctcctctaccctcaatttttgccattttttgtaaacgacaactccactcttcatcaatctgttaggaaatcttgttgactctacctttaaatatacagagaattagaatacttctcaccacctctaccactaacaagacataattttctcttgcttgaattattgcaatggcctcctaactggacccccaatttccaaccttgccccaaatacaatctcttctcaaaagcaagtagagtgattctttcaaatgagaagaccaatgatgtcacctctttgtacaaaaccctctaaagatttttaatttcactcagagtaaaagccaaagcctttacaatggcctgcaaggcctgagaagatctggtttcccatttcctctctggcttcaggtcccattactcactgtgttccagacacacagaactacgtacacttcttcaaatttgtgccccagggcctttgctcttgctgttccctagttatctgcagggcttactcaccctgttaagaagtctgttaaaatgttacctcgttgaagccttccctgattctcaccctcactcctcagcaactgcttcatttttctcaatagcacttaccacccgctaaccttccaacttacagtttgctcatttactttctttataatctgtctgcccccagtaaaatataaactccacgagtctttttacttactattgtatctcaccacctaggacagcagatgctcactaaacgtgtgttgcgtgaactcaccagtgtcccctgggtcagtgctctgaagaaatgtacggcagcgctccttgtgctcctcaagggaacttctctgcttgtaactccttccacaaaactcacatttgtagggtttctccactagaaggagaacataaggggcactcagtgaccctcaggggttccacacaggtcaggtattggggctctgtgacaactgttcactagaaatgagactgctgagtgaagccagagtatttggatacttttgaatctatattttaaatttggtaagcttaaataaggttatggtctatgattaattattacgtcagagtattcttcaaaaggatcgcctcctatcacaaatggaagaatttggatttagtgattaccatttcgcatactgttttggctccaggtcaaattttgttttctttgggaaaaagaaaatagggcccttttattcttcaaggaggttaatgtggtataagcaatgaaataggaaaggattctttattttggacatccatctggctgtaagtaaagattgctgtagtttgtgggagttagccattcggctagaaactgatggccttttcagaacattgacatatttgggtaaatttagctcatccttgccacgtggctatagcaaagtctaggctaaaacaataaaaactgagctaattaactacggatttttttgtttttttgtttttgagacagggtctcactctatcacccaggcttgggtgcagtggtgaaatcacagctcgctacagccccaatttcataggctcaggtgaagtctgggcctcccaaaggccaccttggcctcccaaagtgagaggcttacaggtgtgagccattgcacccggccaggatatttttgaataatagaaataaaaataggccgggcgcagtggctgacacctgtaatcccagcactttgggaggccgaagtgggaggatcacctgaggtcaggagttcgagaccagcctgcctaacatggcaaaaccccatctctactaaaaatacaaaaattagccaggcacagtggctcacgcctgtaatctcagcactttcggaggccgaggcaggcggatcacgaggtgaggagttcgagaccagcctggccaatgtggtgaaaccccatctctactaaaaatacaaaaattagccaggcgtgatggcgtgaccctttagtcccagctactcaggaggctgaggcagaagaatcgcttgaacctgggaggtggaggttgcagtgggctgagattgcaccactgcatcccagcctgggcggcagagtgagactccatctcaaacaaacaaacaaaattagccgggcgtcgtggtaggcatctataatcccagctactagggaggctgaggcaggagaatcgcttgaacctgggaggtagaggttgcagtgagctgagatggcgccgctgtactccagcctgggtgacagagtgagacaccatctcaaacaaacaaacaaacaaacaaaattagctgggcgttgtggtaggcatctataatcccagctactagggaggctgaggcaggagaatcgcttgaacctgggaggcggaggttgcagtgagccaagatcacgccactgcaacagcctaggcaacagagcaagactccgtctcaaaaaaaaaaaaaaaaagagagaaataaaaatgaattgtaaaaatgacttcgtctaaatgtctaagatgaaggaaaggtttcacccatacaattcatgcaaactttattctgccaactccccaaatgctttattgcttgaaatatgtaagtaataacttcaactatctgtgcaaggctggtctttctgattgttgatagaatatactcaatgaatttgtcagttttaggggctaaaatttttattttctaactcttgctctgtttaaaacagaggctttgggatttaaagcactaaaagatccttatggaatcctaaattaaaacaaatgcaggtttgctagggctaaaaatgttacgtttctgcataaattgggttctctggaatctgtctttaaaaagcctactattgtttcttacttgaaaaaggcaacagtagagaactattctaatttttttcgaaccaaactcatccttaattcactactttgaaaaatgagctgtaaaagagagaaacccttcaattgccaattatgatctctcatggtgggttttgttggggctgacttgtttaatcctagtggctgaattataacaagttttgagtttggggctaggttttaatcaaagcagtagatgtgaactgacataaaaacaagcctttttttccaattaaaattttgccagataacatcaagaacatgaggtcccaaatttgaaaataaactcagtcttatttttctaggacggaaattctaaatcttgaaaaaaaagtattatcttggtcaaaataaggagtaaaaacatcacgacagcacataacttttacaaatctttaccgttgttcaatcttttagagatttaaaataagtaggctggctgggcatggtggctcctgcctgtaatcccagcactttgggaggtcaaagtgggaggaatgcctgagctcagaagtttgagaccagcctgagcaacatagtgagacctcatgtttatttaaaaaaaaaaaaaaaagtgggccaatcaagaggaaagttggatttaataaatttatcccaaatggccaaaaagtagcccccaaacaatgatttatatccagatcacagtttttcataatttacaaactgtacatcatttgcttgtctcgtcttttgaatggaaagagtgtgtgtgttgggaaaataatcttctaataaagtttaccagaagaaaatactgatggctataattttctcacaaaaattaaaaggacattttttatagggtgggctcttcctatctgactgtgttgttctccatgggtgcaaggatggtgaggagatgatcatctccactgaggcagacggagagcaattagtgccttaatggtcgtgtaattagccctagaggtctctgctgttgtaacccttcagaacaagaatgacagattgaaaccttcctacttaactctttctagtttccacactgggctctgaggaatgcacttcctagacaaggaatgctcatttctctcacttaccagaatgtgtcctaagatgccccgtgagcgcatctcttctttggcatgcatagttgcagaggtgacacttaaaaggtttttcccctgtgtgcagtttaatgtggcggaggaggttacctttctgagtaaaagatgccccacactgattacactggaatgggcgttcacctttaaaaaggacaaaaaaggagatttctggtcacaggcaagtggagaaacatatgcacagattagatgcctaggggaaaagctcatcttttagacaattactgttcacattgggatcagttgggagctgcatttcaaggcaagcctaagacttacttatgaaatctcctctgtagaagagaaaaagcacccactagcaaggctattttaggtatcatattgaatcagagcaaagaaacaagagcagctctagaagtgctttctagatctaagtttttatattactatattacttggtactcccttttttttttttttttttttttagacagggtcttcttgctctgttgctcaggctggagtgcaatggtcccatcatggctcactgaaaccttgacctcctgggttcaagtgagcctgtcacctcagccttcagaatagctgggactaccagtgtttgccattatgcctggctaattttttagtattccttttgaatataatctcctttgaaaaaagagccagaaactaaagtccttacaaggtgttgagggctagaaattctcctttttaaagtcttcatatgagatatgggatggaatcgactggctcaagtgcgatggttgtgtttgtatgcatttctatagactacctgtttattgtctgaagatacattattttaagctggaaataaaaactatgtcctttcatttaccaaatttgaacccaatacaataagaagatctgctcttattaaaaatgttatgcaaaaatatacaaaagatggctaagaagcaaatcacacaattcaactcctacttagaaactgaagaaaaagtatttggctgacctagaacactgtgctctctacagtctttttttattcatagcatttgcaatatgtttgccaaatgcatggtgaggcaggaataaaaagcactgagtgaacagcaatgcagagagagagatacatcagcattatagcaaaaatcaatgaaagtaaccaaaagttccaaattccaccacttcatttctcacgtggctgcattaggagagttttcagaagaatgaaaaaagcagactatttaccagtatggcttcgcttatgaaccattaagacattgaagctgatgcaggataatccacacacatcgcagttcatctttccactggttggcctgctactatcgaatgagacaacatgtctctccaacttaatgttttcatattcattatattctcttgaatagctgtaagggatttcaggctcttctgcatttcccatgggttctgactttaaaacattctcatctctttcactgtattcatctttcactttcattgaatcatctgcagggaagaaaatgcaagaaatgaacaacgactatacttgaagctatcaaagcagctcaaacagcagagacccacaactgacaattaaataccaatcgaagctaacaaaacactgtacatctacaaaacaagaaagcaccattagcgtgaccgcacgttatttaaattcagaaccacagtcagaggaaaacacacatacttacacacataaaaatagacgatagtgttttaggctatccagaaaattacagataatagattttagctaagtttgctcaaagtggccatgaaacaaacattgagcaactcttctccagtactaggggagaggaagggttctcagatctagtactgtttttggtggctgcagttaaaaaggcaaggtgatgtactcttaggtttcaaggagaaaatattgtttgaatccttcagatgcatccagtgtaagccattaagattaagagttgactagttaacatagtttttctaattttaagccatgcattgcctcttccccttccacgtatatgaattgctaaaacacatcttatctctgtctctcttggagctgataaaggcacaacattgactgtagaggaagttgtcagtactaatgaaaaagtgttgagaaagacaaaaggaaaagtaattctttcatataacctaaggagtcactttcatcgacacaggtaagtggggctcaatctaaataaggggaaggaccattaggtcccaagttagggagaactaaactcaaggactcaaggattgtgtaataggactggataggagaggagggactggctcaagtgagttggctgaccaagtactatcttaagaactgcaatgtaaatgaatgaaatttaaaagaagagctgtaatactcttcatgaagagcataagaacatatgaagaacgtgggaaaaatatgaagaacataagaaacaaagaaggcaaatttatgtacttgcactgacactagtaaaacctaaaaatttgcctgatgtaagaataataaacatttgtaagggattttgcatatataaaatatgctatataaatgcttactttttcaaccattggtccttagaaatcaaaagttgtacctccccatgaggaatcacaaatcaatggagtgtagggctggaagggaatttaaaggtcatctaatccaaccctcttgtttctcagatgaggaaatctgggagcagagatgtttttggtcatttgtcgaaggttacacatccagttactggcagaggtgtgattagaatgcaaaacttaagcttgaactatcaattacttggatttgacctcatgcactagacatataaggcctaagtgggttcttaccaactgtattacacaccctcccatcaatggtgtaaatgttaaaacccaaaacagtctgaaaaaagatattttaaaaaactacatcccttccaaaaaacatcagtaagtgttgctcctcttgctgcataggaggaagtacaactgcagctgtgcctggcttgctaccttcaacccaagtttcaattttcacttctatcaaggttacctttcatctatattaactgtgtttgcttaatagagcaagacagggcctaaccaccatcagaggagccagggctgccacacagttccactgcttcctaccacagttcatggttcacaacttttcactctttgactagcaaagatgtagggctgtaggataagtccaacatgtttcaaatttgcccaccctatggatctggattatataagaaatgatatctgtttcctacttggaaagaggtttacttctttctctggataggtcttccctgctttcaagtggaatttgtttgcttaagtgtttattttttatttttttaagagaaggatgcacctgaggcttgtacttgcctcccttcctccatcactccagctgtgggtaatatcccaccaaagcttgagtgctcttcagtttgcatgtaggcgtttaaaagaacctcaacggaaaatttcagctacttaaaaccaaaaacagcagatagaaaaggccagcagaaaaggatcctttccattttggttagaaaatgtgaacatgaccagactcaggccactccatggtcactgaactttaaaatgtagtaagatcaatgtgttgagtctttctgaaaacagaggacataagagagctgctcctttccctcaggattttggctttagttggcctgacctggaattcaatacgacaccatcctggctcaagagcagatcttagctttagtcctttaggagtcagctatagagcaaggaagacagtatttgagacccagggacataaggacacagggacagggcattagagaagtcctttgggcttacatagttgctggtttgcctttggagtcttaccagttttagatgaatgacctggatgacctctctgcatggttactggggattagcaacttatttttattttattctattttattttttgagacatagtcttgctctgttgcccagcctggagtgtagtggcacgatcagctcactgccacctctgcttcccaggttcaagtgattctcctgcctcagcctcccgagtagctgggattacaggcatgcaccacaatgcctggctgatttttgtgtttttagtaaagacggggtttcgccatgttggccaggctggtctcgaactcctgacctcaagtgatccaccctccttggcctcccaaagtgctgggattacaggcctgagccaccgtgtccaaccagattctaatttattctaatattcaactctgttaccttctcaaggtaagccataataaattgctggctgggcatagtggctcatgcctgtaatctcagcactttgggaggccaaggcaggtggatcacttgaggtcaggagtttgagaccagcctggtcaacatagcaaaaccccgtctccactaaaaatatagaaaattagctgggcatggtggctcccagctactggggaggctgaggcaggataatcgcttcaacctgggaggtggaggttgcagtgacccgagatcgtaccactgcactccagcctgggcgacagagcgagacgccatctcaaaaaagataaaataaaataaaataaattagaatttaaggtatgaatgagattcctgagagatattaggcttagtactcagcctccaaacacagtccaccaaaaccaggaaaggcattagcctgctctaatgaagagattcatcccattccctggaagacttattgaagcagagaaaaggggtgttctacttagaaaaattctattagaaaatactaatgaacatgtctaaaatcaaacttgtcatctttgaacccaaacttgcttctaatttatgacttatttatgttgacaaatggcatcacccttcttccagtctccaagccatcaaactgtggaaccttttctctttcaatttctacatcaagtcagtctccaagatctatcaactctatgtcttcaggctctctaggtgccaactcctcttttcctttccttttgcaatttggtttcacctttcatcacatcatacctaaattcatcctctctcaacattcctttcttttttttttttttttgagtcagagtctcactctgttgcccaggctggagagcagtggtgtgatctcggctcactgcaacctctgcctccctggttcaagcgattctcctgcctcagcctcctgagtagctgggattacaggtgcccaccaccacacctggctatttttttaattttttttttttagtagagacggggtttcaccatcttggccaggctggtcttgaactcctgacctcgtgatccacccacctcggcctcccaaactgctgggattacaggagtgagccactgcgctcggcctcaacattcctttctagacagatttaagacacaggtggtccaggagcggtggctcacacctgtaattccagcactttgggaggccgaggcgggtggatcatgaggtcaggagatcgagaccatcctgactaacatggtgaaaccccatctctactaaaaatacaaaaaaattagccaggcgtggtggtgtgcgcctatagtcccagctactcaagaggctgaggcaggagaatcgcttgaacctgggaagtggaggttgcagtgagctgagatcccaccactgcactccagcttgggtgacaaagtgagactccgtctcaagaaaaaaaaaaaaagacataggtaagctatgcttactgcctctacagcctcaaaaaggactcagaattctctgtaatatggcttccgcctccacaattcacttaatctgctcccttgaatatcaccaaccataatctcctgattcctagattcagagcctttttgtatgccactctctccaacttctttgtaatcctcaacactactgaccactcaccattccttgttcttctgcactcctatgtcttttctttctttctttttttttttttttgagacagagtctcactctgttgcccaggctagagtacagtggtgcgatctcggctcactgcaacctctgcttcccaggtccaagcgattctcctgcctcagcctcccgagtagctgggactataggcacgtgccaccacacctggctaatttctgtatttttagtagagacagggttttaccatgttggccaggctggtctcgaactcctgacttcaggtgatccacctgtcttggcctcccaaagtgttgggattacaggcatgagccaccgtgcccggcccctgcactcctatttcttcaatgaaaatgtaccttctttccttgcctttctgattgcttccttcttgccccttttcttccctctgcatcctaaatactgtccttaaccttcttttttcttccctctacacccctcttgtatggcaatttcattcattcttaaggcttcgactaacatcttatatgattaatttccatatatataactccaggtgtaacctctctccctttctttagtcctctatttctgaaggcttcctaggtatcttcccagttactcaggctagaatccttagagtcatctttcctttctcctgattgggccccacattcaatcattcagtggttctatctgtgtatccaatctctaatctgtttctccactcctgtattttgcatgcccattacctaattctcagaccctatgactttcccacgatctacttattgctgtagcccccgcactgttctctttggctcccttctttctcctttccagcccgtcttgtttgttgctacaagattgctcttcctaaattctacctctggtcatgtcatagccctgtcaaaattcttcaatattttccactgccaacaaaataaagtccaaactcagaaacaaataatttaaaaggcctttcgggatctggccccaacctatctttggcatattaattttgactagttagatctttaactaaagagcttctaagtagtcttatttctactgcctaaaagatctttccccaatatggccacaggtccaagtcctacacatcctacgtattttttttttttttttgagacggagtctttctctgtctctcaggctggagtgcagtggtgcgatctctgctcactgcaacttctgcctcccgggttcatgccattctcttggctcagcctcctgagtagctgggactacaggcgcccaccaccatacccagctaattttttgtatttttagtagagacagggtttcactgtgttagccaggatggtctcaatctcctgacctcgtgatccgccggcctcggcctcccaaagtgctgggattacaggcatgagccactgcgcctggccactgtcctacacatttttaaaggtcaaactaatatgctgtctcctggctactatgccttctctgatcaacccagctggaaaatagcctgctccttcttcctgggttacttatgaactcacctcccctagtctccccaataaatatgtaaactagctgagggcagaagctatacagattgtgtgtgtgtgtgcgtgtgtgtgtgtgtgtgtgtgtgtttaactcagtattccctatgacactgcttaacctgtatctgtaagaccagaggttatgtggttttaaaatagaaaatttggggctcctaccatagatctactaatctgggggtggagactggaaatgttcatttaaaaccatgctctccagataaaccttatgcacaatggagtttgagagccactgcctcgagttagatgcagtgccctacataaagtagacatcccataaattcctggtgtatgaatatatcattgcattagcctcctaactggcccacggtacatgtgacctctgttatactgcatcctattgccagaataatcatgctgtagcaaagaaactcttatttaaaactttcaatgatttcatttgcttatagaataaagtccaaactccttaatgaggtattcaagcacctgtccagaacttgccccaggactacttaatcatctcatttctcagtcttcttgaatcacctttctctctatactagaactttactatgcaaagtgaggtccttggataagcagttctgcaaccgcctgggagcttgttagaaatacaggtgctcaggcctcaacctagacctactggaccagaatttgcattttaacaagatcctcaaggattcttatgcacattaaagtctgagaagcacagcagcaacatgactaatcacagttcttcaagcctcttctccagcctttcccacacctaaaatatccttctaccatttcaatagtgtattcaaacttccacatgcagtttaaatgccacttcttccatgaagtcttccttgatacccttaactagaaaaaaaattatgtttctttgttctcatacatccgtcttattctgctttatatttagtatgatataattacattgctacagatccgcttttatgtagttgatgtgttcataaaatgtttcatgcaaaaccaataacactgtcccgctgattaacattctacattcagaaatgtttattttgccctgatttcagttgtcagtgactggcaacacccgttcatttaataaaggcagaaaatcttaaagacctggcaacaaatacttgaatatatttggggaactgcctgatagtatcctgaagtcttttgtaaagtgaataaaccttttatagtatgaataatctcatgttttggttttgtaaattctaatcttcttataatatatatcaggtttcttagacatacatcttaagttgacacttagaagactatcaagaagcctcatagacactggtgaaagtttatttcttaagtcaggtggtgggtgtatggatgttttcttattattctttaatctatacatgtaattatacttgcctttttgtacatatgatctattttataataaaaaaagttaaaggcttcctgaataccttttttataactgaacttgtggagaaaagaatataccaaaccacaaattgctgataaaggtaattgctatacattcccagaggcagggaaaagatgtctaaattgaatctaacccataggaaattagattaaactaaactttctaaaggagctactctagggtacaattgctcccatctttgtctatgttttcaggcctcttaggaagatgacacacacgaacacacacacacaccccagagagaattttgtaggctgaagagaacaaaggtttggctcactggggctgatgcacatggtttcatttcctggggtgatggttatcacatgaaaggcttgtactccagagcagacatttttggtttcacctgagacactgcaaaaacaatgggtcctggaaaggatccaacatctaaatccttcaggggcaatagcagtctcagccaactgtgcctcagtttgtttttacaggcacataaaatgctcagttggagagaagaacctatcaaagatggcaaacagaatagacaacttgggtatcttggagagcatgttgatactaggaatttcccagtggaaaaaagagattctgaatttccaccttaaactatgagatctcagaatccaactctacgaaggacaaagttggaagtaatatcctcaggtctgccggagatattgtgagaagggacaaaacaagatagaggctgttagggaaggcacaaaagggtgatgttatttaagtgttttacaaggatcgggggtcataaccatgaaatcttcagcaaatgcaaaagtcaactggataacaaagaagcttaatcatcttaatgtggcattttaatgatgccactgatttgctatgccaattcagagataatgaggccctaatgctacagatgttcagccaggctaaaagaaagggggtgggggggggcttttctagcacgccattttctaactatccaattaaacaaattgtgaaagcatctaaatagtttaccaggttttgacagctgttaataggatttagaagcttgaagcactaaagagcaaaatgggaaatatatgtattgtaggtattcagtctacaaagtttgttactgtcgcccaatctagcacaaacagatgaactagaacagttttccttataaaattaatgtctatacttctctcccacaatgacctctttgtattaggaagaagaacactgaaacgatgggtcattttcattttctaatttacatttttgcatgtaaagtaatgagagagagaaaccgatgatatttttagaactaaagagtaaggaaagttttaatatttgctaaccagtaaaattataaagcttcaatgcaaactaaacttttggtcattgatttataaaatctattatgttttctttttttctcttttaaaatttaaaataatggacgtctgttaattttgaaaatgcctatttttaaattaggaaaaaactggaaaaggtaaatcaggctaacaagagatgaaatactggcagggcgcagtggttcacgcctgtaatcccagcactttgggaggctgaggcaggcggatcacgagatcaggagatcaagaccatcaagacatggtgaaaccctgtctctactaaaaatataaaaaattagccgggcatggtgacgggcacctgtagtcccagctactcgggaggctgaggcaggagaatgctgtgaacccgggaggcggagcttgcagtgagccaagatcgcaccactgcactccagcctgggtgacagagtgagactccatctcaaaaaaaaaaaaaaaaaaaaaaaaagagagatgaaatactgatatctcaatacaggtttggataaaattctatagatttaagttctcattgaaatacatttttggccaggtgcaatagcttacatctgtaactccagcacttcaggaggcagaggtgggaggatcgcttgggcccagaagtttgagaccagcctaggcaacaaagtaagaccctgtctctacaaaaaatcaaaaaattagccggatgtggtagtgtgtgcctgttgtcccagctacataggaggctaaggcaggagattcccttgaactcaggaggtcaaggctgcagtgagctgtgttcatgccattgcactctagcctgggagacagagcgagaccctgtctcaaaaaaaaaaaaaagaaaaaaaattaaagtcatgagaaaatagccaggtatggtagaatacctgggaatagctgggaatacagcatgcctgtagtcccaactactcaagaggctgagaagggaggatcacctgagcctggagaggtccaggctgcagtgagctgtgatcatgccactgtactccagccagcctgggcaacagaatgagacctgtctcaaaaaaaaaaaaaaaaaagaatctaaactggccatcagtaaatcacatcacttcaaacacaagagcattagcatgtaaaaagtttcatttgcaaaggaactaccctcaattttactaataacattaatttttgccttatctgactatcaaatagctcattcatgggcataataataaaaataattttgcttaataatttcagtgcaattctttgcttccccattagaagaagaggagatttactacttttacaacagaaatacactatacatcagcagtaggtaaggttccagctgctcagctgggctaagctcttcaaatgtcatggggccaggtataattctttatctagaattgtgaggactgaaggccatgatgtatgaaaggtctttctaaactataaagagtctacaagtatattgtttcatttctgcccattataacaattactttttctattgattattttcatctatgtattaaactcttttgtatttatatttttgagaaataactgctacccatcaaaaaacaatggatgaaatacatttaaagaggctgaagttttagatgttgcctaaacaagcatagactaaagtagttacctggtagaaacttcatttgtaaatccgaaagaaaaaaaacttcctttttcattcaaaattcccttgcatagaatattcactctatcttttttttttttttttgagacagagtttcgctcttgttgcccaggctggagtgcaatggcgcgatctcggctcacagcaacctccacctcccgggttcaagccattctcctgcctcagcctccggagtagctgggattacaggcatgtaccaccatgccctgctaattttgcatttttagtagaggcagggtttctccatgttggtcaggctggtctcgaactctggacctcagatgatccgcccacctcggcctcccaaagtgctaggattacaggcgtgagccaccgcgcccagccactctatcttttttaaaaacaggaatgaaaaagtttaaagcatgttaaaatacaattcttagtaaaattcaaaaactgtcatccaaatacaattggctaaaaaacattctgactgtcacaataccaaactcagggtcacaggtaaaggaaggaatgaaaaagtcttctatatccagagcataagtagttcttggtgtatatagcatgttttgtgttatatcacaattagtgtatttatctcccatatagactaggagtattttcaaggtggggaccaggtttaaataatatttgtgtccccagaacctaacaagggcctcgttactttagaaattgaatgaatgggccgggtgtggtggctcatgcctgtaatcccaacactccagcactttgggaggccaaggcgggcagattatttgaggccagcagttcgagaccagcctggctgacatggtgaatccctgtctctactaaaaatacaaaacattagctgggcatagtggcacgcgcctgtaatcccagctactcaggaggctgaggcaagagaatcgcttgaacccaggaggcagaggttgcagtgagccaagatagctccactgcactccagcctgggtgagagcgagactctgtctcaaaaaaaaaaaaaaaagaaattgaatgaatgaatgaatgaacttcttgggcagcctgaaccaatttagtgatgataactaggccaggcagagaagaagtagtagatcacaatagacccctaacttgtctacaagattctgatgctgtcatgcagtatgtagtttctcttaatgcatcagaataaggtccatggcccacagtgatagccagtcatctagttgacttctttgcccattgtggtctggcttctgcccttcctgctccaccattttgcaataggatgccactggccagtccctgctttttaaatctctttccttggcttattctttgctggtcctactcctacctcacttatttacttatatcctctgtttattcctctttctctatctcctagatgtgaattatttcctagggcctatttcttgaaacttttgccttttcactttacatactctgtctcctgatccaagtttttattgctgttgactctcaaatttttatttccggtagacctggaaagccatagacatatacttcctgacatgtacaatcacttcctgaatttccaacacttatctcacactcaacaagttgcaaacaagctccttatctctcccatttcttctccgcttttcctataatattccccgttgtcctctctacatagtggctgtttgatgtcaacgtctgtatattatgctgcttctatcaacatttagcactgatacagagctcagtgactacttaccaaacaaacaaggaagtaaggaaggaaagaagataagaaggaggaaaggaaagcgtgaacaactatactattatttgcttcaagtacaaaattagggttgacagtgtttttaaaaattgtacagattgcaattttgcctaaagctagcatattagccgaagacagagggaaaaaataaattgttatttctaactcaaggtataacaatcagacccaaagcgtataaaggattcttggatgagaaggaaatgagtataaggattaagaattagaagactcttgttctttttagcattacattaaaatacaaaataaaaattaacatttaccatctgtaacatattatttagacttttacccatctctggttcttcccttccttcttccctggttctcaaataatggaattagagcactgagaaataatagaagaaactcagcactgacttctcctgggtgaatgtacaacattaaaagcacacaagggaatgagctatcttgtcactggaacatgttcatccctggggataaagtgtaacaactgcttaacagctgcccagtaacatacttcaaggctgcaagcaaagatgcatcctagctctactggaaactgcagagggaatattgtctggcagaataaaactagaatagaatctggccaacaaactgcaatctatgtcctttctatttcaaacagcagcttctaatgatcacagagaggtttctactaacaatattcaagtaatattggatgggtattggtaattacagggaaggaacaatatggtatttaacttatttttttccactgaaaatagagttgaatgacttctttttttttaagtttctgataaaagagcatgggctttggagtaagacagaacccaggttcaagttgtactaactagctgtgtgacctcagcaagtaatttgacttccgtgaattttctcatttgtgttgcagtaatgataatatctatacctaatagggctgttacagtaatgaaattaagcaaaataatgtatatataggcgtagcatagtagctggcacataatatgttcatgaccttgagacaggcaaagatttcttagatacagcactgaaaacatgattcataaatgaaaatatcctgcaactcagtaagacaaataatccaattttaaaatgcacgaaagtagtctttagcttttctaaggtaataaataaaatttttaaaacgcacaaaagatgtgaattaacatttcaccaggaaattatatgaatggacaacagaccaatgaaaagatgctcatcatcctcagtcattagagaagtgtgaattaaaaccataatgagattccacttcacacctgctagaatggctactataaaaaagacacaataaagagcgctggcaaggatgtgaagaaaatggaaccctcatccgttgctggtgggagtgtaaaatgatacagtcattttggaaaacagtttggcagtatggtgggcagccttctaaaacggctcctagcattcacacccttgtgtaatattcccctccagtgtgggctggacctaggtgattgcttctaatgaaaaaaacatggaaaagtgatggaaggtgtctcttctgtgtttaggttataaaagactgtgacttccatctctctctctctttctctctgtggtgtttcttgcaagcttctcagatgaagtaagctggagagcaaggagctgaaggcagtgtctggccaacctccagtgaagaaacgaggccttcagtctaacagccttcaggaactgaatcctgacaacaaccacatgagtgagcttggaaactgatccttccctagtcaagtctttagatgagaccacagttcaggtcagtatcttgttagcagccttgggagagactgaagcagaggacccagatatgctgtgcctgtattcctgagataatatgttttaagttgctagggtttggggtcatttgtcacacagcaatcaataactaatataggggtagtttcttataaaattaaacataaatttaccatacaagccaacaattctaggtatctgctcaaaagcagtgataacctatgtccacataaagacttgtacataaatgttcatagaagctaaaaaatgcaaacaattgaatgtccaccaaacagtgaattgataatcaaaatgtactatataaatacaatgatattctttttttttttttttttgacagagtctcactgtcacccaggctggagtgcagcggcatgatcatggctcactaggcagcctcgacctcctaggctcaagcaatcctcccacctcagtctcctgagtagctgggactatttaaatttttttttttttttttttttttttgtagagacggggcctctatatgtttccagctactcgggcggctgaggtgggaggatcacttgagcccaggagtttgagaccagcctaggcaacacagtgagatcccatctcaaaaattttaagaaaaaagaaataaaagaaacaaactactgatacatgcagcaacatagatgaacttcaaaaacattatgctaagtaaaagaagccagaaacaaaatattacatatggtattattccatttatatgaaatacccagaaacagtaaatctttagagacagaaataattagtggttgcctgaggctgcaggcaagaatggggatcaactacaaacaagtacaaagggttttttagggtgatggaaatgttctaaaacatggtggtagttgtacagctctgtaaatttactagaaaagtcattgaattgaacatttaaagtatgtaaattataaccacattaaagctgttttaaaaagaaatctatacagataaacaaaacaaaataaaattgatagctctgatactgactctgatactgactctgtctcaaaatgggaatgtttagctacccattcaccaatgattacaagaagcatcatggtaagtatagtttctgagctatgattacttccatatgacaaatgctcagaagactatttttaactccttttgttcctgtacaactgatttcattccctttcaacaaaattaacaagaattagcttgttgaaaaacacaagggcacccgctacttgacagtaggaaaggaaggttaaaaaatcaagtataaaagagttggcctgattggacatttcccatacttagttattttattatcgatttcagacaaatacctaactactgatttttgctctttctaaattgggctaaaattcataaggatccagatacataaggatatattacttctttgttatattttgtgcttttatggaccatactgtctcactttctgttctgttaataatttagtgtgttttactaggctgtggttattaattagttaatgagcactatctctggactgcaaagcagcagtgatataaatgcacctggggaagttcactgagggttcattcaggaatgtgagttctctcgtaagacaaaataagaaaataaagaattatcttttctttacagtctgagagagagagagaactagtacaacctgaaggactagaaccggaaaatcaagctgatggtaagtaaggaataggtcatataaaaatgcaagagagagttctgggctccaagtaatgaaaagagtaataatggaccattaagtagtgtttgttcaaatgtcggtggatgggaggtatgaccacagcctaggctgacttaacagaagttaacaaagagcctttcctattttctcaagggctgctatgaaattacttaaggagtaagaaaggataacaaaggccctggctgagatttttgcttctgtagacgcaggtgcagaaaaggctggttctaacacatcttgtcaatgtctttaatgccaccagactgatgaatatagtgaaatatctatcgtgatcccatttttacttattcagttgacataattagcaaatctattaagggtaaggtcacaaattatttttagttattaaaccataggtctccatatgttactgtttagacagtatcacccagtgcagaatgtagttttcaagactgtcattcctgcaacctcaaatctagatccaaatgcagtcagttaaagcagatttcaaccaggcagctaaacgagaaaacatctggacctaccagtcaaaatgagaaaggtcacatgttaaacccagataatcttgtttattggtgtttgaaggttatacaccaagggctggattaccagggtgctcctttaggcctggctctgacatcttcattcacctgctgtgtgtgtgacgctttaaaatccaaagctttgaaagtactgtgttattagtcacttccaaatgtaattttcctaattctaagcctgaatactatgtcaacctattgctagactgctgattagatcctggaagaaaccgcaagacacaactgtcaggggcagatgatgtctattcttttaaaaactgttttccacatttccattcagcatttttctatggatgaagcacctgtaattttctccatcaaaattaagaaaagaaaaggcctctgaataagcaaggaataaaattaaaagattgacatagatttcaggatgatgatgaagaaagggagattgaatctttcattatttttcataattagtattattttatatacaaacaactgaaccaaaattgtttatgttggaagcaattccacatgccagtgcatatgaaactattatgaaaacagcaaagtcaagtttcttaagactttacatgctttggtcagatctttttaatcttttttaggttgtgaacatctttgagaactgtactctttgcccagaaaaaggtacacatgcccataaacacgaaatttcacatactattgattgatttctcaaaccctgagatctcaggttgagaatctctgcctcaggcctttaaataggctcaggcttaaagacacctctgtgttatattttgtaaacttcatataatagtggttggcatttttcaaattttttgctcaagcatcctcaaaagaattttgaaaaattatatatctctcttatacatagtggacattaagtacatactaagttgacatctataatttttcatcatgagtttaactatttttaaacaaaagaatacagtttgtgtattgtaaataatgatagtttaaaccattaccacaccctttcaaatgtatctacttaggaatatatacatatttgtgatttaatttactccatcatgaatttaaaaatacataagtaagcttttcaagaaagtcaggaaatttctctttgaacttctatttccatttcactacccccatggaattttctcctaatgtagtactcttgtatgcttgagtcatctattgttcatcccattatatgtatctgcagcaaaaaaaaaaaaaaaaacccaataaaatatagttacttttgttaacatgaagtgctatgtgtcaaaatgtgttttcttctggattgaattagcattacaattattaacatacaattgagtaaaacaatataggtatattataatttgatcaataattaccaaatacaaaaagtaaaatttattgggactgtatctcctaatgagaaggatagagaggaaataagttatgaaaatttgataaaagaaattatctaattgatcctttgtttggcatcttggaagtacttacaccttagaggtgggtgagaaatgttcttttcttttataaagtggagaaggaaggctgggcatggtggcttatgcctgtaatctcagcaatttgggagaccaaggcgagaagatcacttgagtctaggagttcaagaccagcctgggcaacacagtgagacccctctacaaaaagttaaaaaattagcagggcatggtggtgggtgcctgtagacctagttactcaggaggttgaggtggaagtattgcttgagcccacgaggtcaaggctacagtgaactgtgattacaccactgcactccagcctggacagcagagcaagaccctgtctgaaagaaagaaagaaagagagggagagaaagaaaaagagggagaaagggaggaaataaaaaaagagaaagagaaagagagaaggaaagaaagaaagaaagaaagaaagggaaagaaagacagaaagggaaagaaagaaggaaggaaggaaggaagaaaggacggaaggaagaaaggaaggaagaaaaggaaggaaggaaaggaaggaaggaagaaagaaagaaaggaagaaagaaaagaaaaagcaagcaagctcaatggcagcagtcttctaggcagatcagttttaggaagaagggcagagaatatactgaagttgcggacctggaaattgattctcttaaaattatcccatgcaatccttggaaagttttcccagcatttcaagaacactactaaaataaaagaccccaatgccaaaatgtactcacatgctgttcttcactttagttaatgaaccaataattatttagtgagcacttgtgaacactgcaggggataaatggatgaatggatggttggatggaaaggcagaaagaaaaatggataaacactgagcatttactatattcccagaactttggcacaaaagaacacaactataaaagactgttcttgccatgtctttgggacacaatcaagtacaataacaccctgccacaatacaatgtgtacaaatttggatgtaaaaggattgctgattgcctccagttgtctacccttgcccacttctcagacaagagcaagctaaagttcttatgggaatggataggaagtaattgcttcaagatcatttgggtcttttaaggtttacaattgtgtccagtttaaacttcactgtcattgctttgtgctttttgtaacagtatattaaaaacaaaacaaaacacaaaaccacctactatatttcatttacttgcaataatatgacccccatattttacaagataaaatttcgggatcccatctactatgttgtggagagagctcatgtactcttcttgtctccgacactattctctttcatgcaaactacaacacaaaaacaaaaacaaaacagaacacccaaaacccaaaatccctttgggctgacaaattacaaaaaatttgatagttctgatgagccaggacaggattttgttcagtcttcagtccagtggtgttctggtaattgcttaacaaccagctcaggatcggggaagggcttatttgtggcatttgctgatttcagtggtataaatactccaccatggccaatttcaagctaccatcatggagtcagccagcatacaaaattgttgaaaatttaacaagcagctatgagctgattctggcacaccactgggactcctcatttatccctcagcagggtaccttcctctagctatcaaatggcaccaaggtacacaatggctcgggtcaccgtgcctggtgccaaagtttatttgagaagcagaactcacttggcaagaaaagctgctatgaaagttagcaggcacataagggtgtttcatgcgttctcttaatccagctggaaggaggcaccaacactactgcttaacagacaaagaatgcaaaaagaggcagggcgaagtggctcacgcctgtaatcccagaactttgggaggccgaggtgggcaaatcacgaggtcaggagatcaagaccatcttggctaacacggtgaaaccccgtgtctactaaaaatacaaaaataaaattagccgggtgtggtggcgggcgcctgtagtcccagctactttagaggctgaggtggaagaatggcgtgaacccgggaggtggagcttgcagggagcccagttcgcaccactgcactccagcctgggcgacagggcaagactccatctcaaaaaataaataaataaataaataaataaataaataaaaagaatgcaaaaagaagggagaaaactctccagaggatccactaaggacagtgggcagccccatttttctgttaaccattgcaactgtctgtggctctttggcagatgtcaaatatcttcctacacattccttttagtttgctgtgctacgcagcttagttatgaaaaaaaaaaaaaagaagaaaagaaaatccagagatgttttctgttaaaaagtttcaagggccaggcacagtggctcacacctgtaatcccagcactttgggaagccaaggcaggaggattgattgagtccaaaagtttgagactagcctgggcaacatagcgagaccccgtatctacagaaaaaaaaaaattagccatgcatggtggcatgcaactgtagtcacagctactctggagtctcgggtgggaggatcacttgagcctgggaggttggggctgcagtgagccgagatcgtgccactgcactccagcctgggtgacagcgtgattaaaaaaaaaaaaagattcagggagagatgtcttggttttatcatcaacagaacttacccgtttgacacagtacaagctgtaaagctctgcccatggtaagcacttacagaaatcccctgtgagtgaacttctgcagcacagcactgctgattttgtaagataacccctgcatcccatgagtgacaggtcttgatctgggcttgagagatgtaatattttgataaaaaacggcacttccttttgaagcatatatttgcgtgtactaagcagtaccgcgggagcctcagcgagtgcctaagcgaggctgacgcggtctctcccagctcgctccagccacccttcttcacacatctaaatgtggcggtaattagcatccataaaccacacatgtggcttaattttttttcccctttcagaagcatcaaagtagtttgtacttcttctaagcaccaaagagttgtacacctcaaaagggaccgagactatgccatgggaagctactgaagatgggagttatttctcctaaggggaagaagaattatttttttcagcaagctttctaattaaagttcttatctttgatctaagcatctacactgcacaagatgtcacaatggagaaaatataaggcctttcaaaagtgatcaaattcaacttttctcttggaatcaggcaagacccatagcttgtacagaatggaagtaattaaatacatacaccgattgatcaccactgcacaattaattaaaaaagaaatctatttcatgatgggtattgggtctatttgatatttagttacagagccaggagatgaagggtgtactgtgttgaatagtgtccctcctaaattcatgtcctcctggaacctcagaatgtgactttatttggaaatatcgtcatagtagatgtaattagttaagatgaggtcacactggattagggtaggccctaaatccaatgactagtctccctagaggaggacagaaacaggagatgcccacagagatgaagcccacgtgacaatggaggcagagattagagttatgctgccatgaccaaggaacaccaggcattgctggaagtcaccagaagccagaaagaggcaaaaaagaactcttccctaggcccttcccatggtcctgctgacatcttaattttgaacttctaccctccagaatagtaaaaaatttctgttgctttgtgacaaactggtgttttgtcacccagtttgtggtaatttattatggaagccctggaaaactaagacagagggtaaatgtgcaactcaggcagggtaaacagctagtgttgatgggtatcgaggtatcgtgtgtactttttacccctacagcagctccagaacaaatggcttgtgtaaatagagatagtggatgatgggggctgctgaaaaatagggggccagtagagtgttaaatacagggggtcagtagcccaacttttattcctcagctattcaaagaggaaaaaatactatcggcaaatgcatcataccctcataacatatacatgctcatgacagaacctttccttctattttctaagtgggaaatggcaaagacgggaatccaatttcagaggaagaaggactgaaacaaaaagtcgcaagagttctatttcagtcgttcaggccttaaggccatgtcttttccactaatttaagcacctaattacattctctctgaaattgtttgtgcatgacaattgccttgctgggatgacattccaccatctcgagtcttatctctacctagttaatatccctcagtacactagcatgaaacacatcttccctctagccttgatactcagaggtttttattttttagttgctctgtgatcataggccaagatataagcaacaataatattctttctcatgatattttataaaattgttttaactcttgcttttgacatcacagtatcttgctgacattttagatccaagtagaaggtcccaaatcttttgtattcagtaaagtggctgtgatattcccagcactcattggatgctaaacaaaaataaagacttggggatctctgggttatttcctatggctcaagatcagtctgaagatagttacagttggtcactaagaggaagagaaataataattgttcataagagtgaatgagcaggctagaaaaagaactctgaatttcttcatttcttctgctttccaaactggttggattatatcacttcataggtaagtattcttagaaagatgtaaatataggttagggcttcttttttcaaaaagtttatgatataatggggtgaaaccttgtcatgcacaaacaatttcgaacagaatataattacgtgtttaaataagtactaactaaacatactcttaaaaattcagctctgagaccacactgtggaaggtgggatagtataaaaaggcctcctggaggaaataaacttgagttgatgtaaatatttgccagtgcttgttagatttaaattttcaggaataaaggagaaaaccaactaaatggtaacacaacatttagtctacatatggttttatttatgtctaattaatttatgtaaatagagctatatcaactatacatgcatgtgataaaaagctgttagtgatatatatttttctgatttttaaaataatagtattagaatcctcactgatgcccttttgaaatggttacacaaacactgttcctttcaagtgccaaatcttttcttaactcatcatacaataaatgtatacactaggttaggagtaagggaattatggcctgcaggtcaaatccaacccactgcctatttttgtaaataaagttttattggtacaaagccactcacattcatttatgtatcttctacagttgtcttaccttgcaatggcagagttgagaagatgcaacagagattgtatagcccacaaagcctaagatatttactatctggtcctttacagaaaaagtttgccaatacctgcactaggctcctgggaatatactgtaaaaaattaccacaatgtctgtgggatcacaagcaagcgtatttatgttcaaagttaatacttttgtttgttttgtttttgtttttttgagacagagtctcactccgtcgcccaggcttgagcacgatctcagctcattgctggaacctctgcctcccaggctcagaagattctcccacctcagcctcccgagtagctgggattacaggcatgcgccaccacgcccagctaatttttgtatttttagtagagacggggtttcaccatgttggccaggctggccttgaactcctaacctcaggcgatctgcctgcctgggcctcccaaagtgctgggattacaggcctgagccaccatgcctggccaatattaatagttttttaaagttttttccaagtatttttgttttgttttccaaacttactctagttgggtaaagccttttcccctagaaattagtctgtctttccgcaagagaaaaaataaagtgagtgtttccatcagggtgtgaaattttctacaaaacaattttctaagaactggaagcttataaagatgcacacgatatttcattttttaacatatacattaaacatgattgcaattattctgaattttaaacactccagacaagtctttggttcctaaaatctttcaaatgacattaaaaaataaatgctgccattaaacttaaacagaatagaattctctaacattttaaaataattattacattgtagctaaattcccctaattacctttaaaagtataattctaattctagtcttctttttttatagatggagtcttgctatattgcccaggctggagtgcactggctattcataggtgtaatcatgatgcacaacagcttcaaacgcctgggctcaagtgatcctcctgcctcagcctcttgagtagctgggactacagtcttgtgtcacagtaccgggcctaactctagtcttaaatgttttcctgtgctgcatatggcagtggtaccttattatgcagtaggtataacttctatcgggcaatgctgtttttacattctattacttttataatttagcatgtataatttatacatactgatcatattatatattttataaaagcagggtcctggtaaccaccttttccaaacatatatgacccagattaagtgccagtgttaatagtacagtagagtagtccccccttattcacagaggatactttccaagacctccagcggatgtctgaaattgcagatggtaccaaaccctatatacagtcacatgctccttaatgatgggatgcattctaagcagtggatcatcaggtgatttcatcattatgcaaacattatagagcacactgtatttatacaaacctagacagtatggcctactacaaacctcgggtatatggtacagcctattgctcttagactgtacagcatgttatgggtacagcatgttactgtactgaatactgtaggcaactgtaacacaatggtaagtatttgtatatctaaacttagaaaagatacagtaaaaataggtcttaacttatgagaccaccactgtttttgcagttcatcattgacccaaacattatgtggtatatgactgaatactacgttttttcctatacatacatacctatgataaagttttaatttataaatctggcatagtaagaaattagtaacaataacaataaaatagaacaattacaacactatactataataaaaggtacataattgttgactctctctcaaaatattttattgtactgaactcacctattttgggatcatggttgaccatggaactgaaactgcagaaagtgaaaccgcagagaagggggactactataatctgtttgcagattaatcacaaaataatggaatgatctttcaacgttaaaattagcctactcaggccaggagtggtgtaatcctagcacttcgggaggctgaggtgggcagatcacttgaggtcaggagtttgagaccagtctggccatctagtagagatggtaaaaccccgtctctcctaaaaatataaaaattagccaggcatgatggcacatgcctgtagtcccagctactcaggaggctgaggcacgagaatcacttgaaattaggaggcggagtttgcagtgagctgagctcgcaccaccgcactccagcctgggcaacagagcaacaacaaaaacaaaacaacaacaaaattagcgtattcatttctttctgaatgaagcttaaagtaaataactgtttcttttctctttcccaaattatttagagtgattgatcatatcttctctatcaagaactgcatgacactcctagacccctagcaactgagaaaaataatttatttacacaaacatcctattaacccattgacatgtagttggaggtaaggcgatactattgtatgggttcctaacaaggtgcttcaccacttgggtttttacaatatttattttaaattcctattgttgaatggaaattattggtttcttgtttatgtttgagtatttaatctgttttttttaccacaaactatctgaaaatataaaactcataggctacccctgaacccaaagtaaatttataacataaattataaattcccaaaccaacagtggcatagggatcactatttcaactacaaatttaatggtattacctaccagaactcagaaactgtaactcagaaaaaaaacaagccacaggcacagctatcatttgcctcattctgagtgagactccatggatgtcaccttcaagaagttgcacgaagctgatacaacatcatatgcctttcctcagcacaaatgaccacatcctgtgccaggcagcatttttctgtctctgtggttaaaaactggtacaaattaatgtatagctcagtacagctggaatgttagttgaagctgtgatttgaatctcagaagttttagacaaataactcaatttcttggtctcttaagaaatttaagacaaaagaaaaagactctgagaaatgattttcttttcttgaaaaggagtctcactctattgtccaggctggagtgcagtggtgcaatcttggctcactgcaacctctgcctcctgggctcaagtgatcctcccacctcagcctcccaagtagctgggactacaggcacacacaaagctaattaaaaaaaaattttttttttgtagagatggggttttaccatgttgcccaggctggtctcgaactcctgacctccagaaaaatccgcccaccttggcctctcaaagtattgggattacaggcgtgagccaagccactgcacccagcctattttcttttcttcctttaagaaactcatgtatacacacatataactgacctagggctttcatttagtcacttactcaacaaatatttattgcacacctaccacagtagggccaggtactgttctaggtactgtaaatatctagcaaggaaaaaaatagcccaagaaggctggaaggagagtagacactaaacaaaactccaaagttatctgtgttcagtgtcatgcgatgaattaaaacagggctgtgttaaaatagtgactgaattgtcaggaaaagcttttctgaagaaatgacatttaagatgagatctgagtaacagagtaacattcataaagcaaaagtgattagatttatcaacataaatatcactataaaatgtgagcaatattaatgtgaatataatgctcaaaactcacaaaaaagcctggaagtaagtactctgtaatgctattagagactatctttgggtggtaggatagaggtggggttttcttttttctttctatttcaatgaactttccaaactgtggtataatacaaaaacatatttggtctttgttcctgctcccaggatcaagcacagaacttctaagcccttggaatttcctaagtgataggagtattgttttgctttgttttgttttgttttgtttttctcactagatcctcctgcctcagcttctaagtagcaggggcaggagtgtcttttgtattcataacgagcccctttcaatagcaccttagattatgctaacgaggtagctgaggctggggccactagacagcctcaggatggagctgttcaccagaaggacctggtaattagagcgttggacctttcagccccacccagtgacctcagggaagaagagagaggaaagggagctggagattgagtcctataaacgttcttgaacaacaagattcagagagcttcaggagctgggggtgtggcatgcccagagaaagtatggaagctccacgtcaccccttccttgctctatgcctcccttccatttggctgttcctgagttgtatcttttataataaactggtaatgataagtaaagaaactttttgagctctgtgggtcattccagaaaattactaaacctgaggaaggatgtgggaacactcaaatttgcccaagttggaagaagtgtgggtcacctgagggcctggtacttgagactggtgtctgaagtaggggcggtctgtgggactgagcccttaacctgtgtggtctgtactaattctcagagttagtatcagaattgaattgaattgttggacacccaacaacggaatggcctagagatttggttgtggatggaaaacaccccagaattggagtgggatttgctagatcagcccaggctcacagaaacatatggtttggaaggataaaataaaagggtaggggatgaggaaattttgattcctgagtggccatatagtcacctaaggagcagcaaaggggctgtgatcagttactaaaggtaaaagttaccagtgaaatttaaagatgaacccaactcctggggagctggttcactgaatgcttaaggaaatgcaaactaataagaaaaaagtgaaatacacaatccaatggttattgttatctgcaacagctaaaatgaaagttaaaaagagtgttgggttggaccttgatgctgaaccacgctcagattctggtgggcctgaacttcggatgctagacccaaagctgcctctaatggaaaaaatatgtgggaaaaacagaaaatacctctaagatctctggtcaccaaaaagagagtccaggtaggggagggcaaaaccaagaaactactgaaaccagggggtatagtgtgaaagagttactttattttgtagatcagtaccatcagcttcctaaagaattttgactaaaatgaattgtaagaataaataatttaggggcagtatcttggcttttaaatgcttcagagtggaagagcatgtttgggtttatataggatccacagctcactatggaacaatcacagatggctacacatgatccagacacagagcaggtcattcctaagggaacagctgacctggtggaccagataagagccattataaggtctatttaccctgagaaagggaactatctgacttcccctttcaatgccaactggaataccccagatgaagcagctgatatgcttcatatgcaagccatgtggaactggctttgtgataatcaagattcacacattgaatatgcccattacccaggtgatatggtttggctgtgtccccacccaaatctcatcttgaattgtaagccccataatcccatgtcataggagggacccagtgggaggtaaatgaatcatggaggtggtttcccccatgctgttctcgtgacagtgagtgagttctcacaagatctgatggtttaatgagtatccgatatttcccctctggcactcactctctcttctgccaccctgtgaagaggtactttctgccatgattgtaagtttcctgaggcctccccagccatgcagaactgtgagtcaattaaacttcttttcttctttataaattacccagtcttgggtatttctttcttttttttttttttttttgagatggagtcttgctctgttgcccagcctggagtgcagtggcgcgatcttggctcactgcaagctccgcctcctggattcacaccattctcctgcctcagcctcctgagtagctggaactacaggtgcccaccaccacgcccagctaattttttgtatttttagtagagacagggtttcaccatgttagccaagatggtctcgatctcctgacctcatgatctgcctgcctcagcctcccaaagtgctgggattataggcatgagccaccgtgcccagctgggtatttcttcatagcagtgtgagagtggactaattcagtatattggcaccacagagagtggggtgctgctataaagatacccaaaaatgtggaagcaactttggaactgggtaaaagacagaggttggaacagtttggagggctcagaagaagacagaaaaatgtgggaaagtttggaacttcctagagacttggagggttcagaagacaggaagatgtgggaaagcttggaacttcctagagacttgttgaatggtttcgaccaaaatgctgacagtgatatggacaatgaagtccaggctgaggtggtctcagatggagatgaggaactgcttgggaactggagcaaaggtaacttttgctatgcttcagcaaagagactggcagtattttgcccctgccctagagatctatggaactttgaacttgagagagatgatttaaggtatctggtggaagaaatttctaagcagcaaagcgttcaagaggaagcagggcataaaagtttggaaaatttgcagcctgacaatgtgatagaaaagaaaaacccattttgaggagaaattcaaaccagctgcataaatttgcataagtaatgaggtgcctaatgttaattacaaagacaatggggaaaatggctccaaggcatatcagagaccttcacagcggcccctcccatcacaggcccaaaggtctaggaggcaaaaatggtttcctgggctgggtccagggtcaccctgttctgtgcaggctcaggacatggtgctctgtgtcccagctgctccagctgcatctaaaaggggcaaaggtacagctcaggctgttgcttcagagagtacaagccccaagccttggcagcttccatgtgatgttgagcctatgggtgcatagaagtcaagaattgaggtttgggaacctctgcttagatttcagaggatgtatgaaaacatcggatgtccagacagaagttcgctacaggggtggagccctcatggagaacctctgctagggcagtgcagaagggatatgtagggtaaaaccccccatgcagagtccccactggaacaccgtgtagtggagctgttagaagagggccaccatcctccagaccccagaagggtagatccattgacagcttgtgtcgtgcacctggaaaagctgcaagacactcaacgccagcccgtgaaagcagctgggaaggggactgtaccctgcaaagccacaggggcggagctgcccaaagccatgggagcccacctcttgcatcagcgtgacgtggatgtgagacatggagtcaaaggagatcattttggaactttaaggtttaatgactgccctattggattccggacttgcatggggcttgtagtccctttgttttggccaatatctcccatttggaatgggtatatttacccagtgcctgtacctccattgtatctgggaagtaactaacttgcttttgattttacagacttataggcagaaggggcttgccttgtctcagatgagactttggacttggacttttgggttgatgttggaatgagttaagactttgggggactgttagggaggcatgattgtgttttgaaatatgaggacatgcgatttgaatgggggccagggcagaatgatatggtttagctgcgtccctacccaaatctcatcttgaattgtaacccccattatccccacgtgttgtgagaaggacccggtgggattgaataatggggtaattgaattatggaggtggtttcccccatgttggtcttgtgatagtgagtgagttctcataagatctgatggcttttttttttttttccttttgagacggagtctcgctttgtcacccaggctggagtgcagtggcgtgatcttggctcactgcaagctctgcctcccaggttcacgcaattctcctgcctcagcctcccaagtagctgggactacaggtgcccaccaccacacctggctaattttttgtattttcagtagagacaggttttcaccatgttagccaggatgatctcgatctcctgacctcgtgatcctcccgcctcggcctcccaaagagctgggattacgggtgtgagccaccgcacctggccaagatctgatggtttcataagtgtctggcatttccctgctggcactcgttctctcctgccaccctgtgaaaagctgccttctgccatgattgtaagttttctgaggcttccccatccatttggaagtgtgagtcaattaaacctcttttctttataaattgcccaatcttgggtatttcttcatagcagcatgagaacagactaatacaccaggtcatggtaaatgccacggttaagtggtgtcttaagaatgtacatgtcagatatgatatggtaaagtcagtgtggacacaaagaaaattagaacaaggcccagaaagaagtttatcacattcacaggtcccagagaggtggttattatgtgctatgcaagatcacaggagaaagcaccagtgttggtcaggaggcagaaaagaggaatgaggaaaaaccttaggtcagagccttaattggggtttctgtggaaaaggcaaggcagggctgggtaaacagtttaggattggctagttttaataattctggtgggctctaaagcatagagatggtctctggttgactggtatctggccctgggatgacttagggtaggtgaaatataggcttggtgtgtgagaattgggtaatggcttatggcaaaaacctgtgagtactttccagcaatgacaacaattggattttggaccagagaatttccatttgaggggaaattattagcctgctattgaatattaattgaaattgctcttatgattgaaggacaaaaaaataattttaaaacctaaaatatcaacgaagtcttgggtgatgtcagagaagtgttctaatggggagagcattgcccagaagagttctataataacatagaaatagtttatagagaatcatggtaccttaggaatgaaaggatgatatactcaggggcagggatcctcttttcccctacaattgactttggaactatgtgaggagctgctggattctatcatcacttagacagtgccctataaagtagtctttgaccaacaaagagatgcttgatttgtggacggtagtttttttgtttgttgagacagggtctcattctatcatccagcctagagagcagtgacacgatcagggttcactacagcctcaacctcccaggctcaaacgatcctaccacctcagtcccccaagtagctgggaccacaggcatatgccaccatgcctagctaatttttaaatgttttgtagagacgaggtctcactatattgcccaggttggtcttgaactcctgagctcaagcaatcctcctgccttggcctcccaaagtgttaggattacaggcataagccaccatgcctggctgtggatggtagttttaaggtaaatggacaacatcctgtttggaacaccacaactgtaattaaagaaggtaaaaacaaatcagcttggtgagctgaataatctgctgttttcctagaagtgatggaagaactgaacagtgatacatgcccatatgtttcagtttctgattcatgggcaatggccaacagcctggccatgtggtaaggcaagagtgcaatggaaacttggcatattaaagggactctcatatgggacaaagccctgtggaaatcactatgggaatttgaggggtgcattaaagtaggacatgtcaatgctcggtaaaagaccccccttccagatttggaagctgatcagaaccaattagtaggtatcacagtgtgcgtgtttgaggtgagcacgtgggtccataaaatgagtagacaggatgggggatgctacagccactgcagaagatgggctgaatttggacatatttcccttggacctcctgaggcacaaaatagcaacaaactattatgtctgccaataagagagacagttactataggtgactatggggaagattccccagggggaagaccccacacatagttggcaagtggattgcattgaagagccaatgctggtagtcccaagggctacaaatcatttttgtttttgttctttttttgagatggagtcttactgtgtcacccaggctggagtgcagtggtgcaatcttggctcactgcaacttctgcctcccgagtccaagcaattctcctgcctcagcctccccagtagctgggattacacgtgagtaccgccacacctggctaatttttgtatttttagtagagatggggtttaaccagttggtcaggctggtctcgaactcccaacctcaaatgatctacctgcctcagcctctcaaagtgctgggattacaggtgtgagtcaccacggccggcctgttgttgttcttttgagacaggatctcactgtgttgcccaggctggagtgcagtagcaggatcacagctcactgcagcctcaacctcccaggctcaagtgatcctccagccttagcctcctgagtagctgggactacaggcacacaccaccacacctggctaatttatttgtattattataatttttttttatagagatgaggcctcaccatgttgcccaggctgggcccaaattcctgggctcaagagatcctcctgcttcagcctctcaaagtgctgggattacaggtgtgagccactgcacccaacctataaattgtttttgacggggataaacacagactctggaaggggctttgcttacctggttgtatacacaaatggtcagtaccacgaaagaaccagaacagaagatattgcaccaatttgaatggctgagccacatttctttagactaaggagcactctacttacagcccataatgtcaaacaatgggcaaagagctatcctcctcagagtagtagtttgatagatatctaaaatagggtaaggtataggtgtgaagggttggtttatgcatttgcacaagtgtgaggtcacattgaaatgagctaagggagtgttcccactaggtagattcctctgtttttctggtggattagggaagaggaggtgggggaggatgctgatatgactatacaattcttgccaaagaggaggatattggtgtgatgactattctttttttccttccctacattgtcacatcagctttctctttcctaccagatgcagtggttgcaataccagcactgtaattacaagtgccagaaacagagatgatttctaaagcaagaaagtgtaaccgtagctttaaacctttatgtcagaactcctaagggcctgatgaggcaggctgtgcctttaccccatctggcaaaattggggttaacattgaatgcagatgtattgcctagtggtagaaatagcccactagttccgtacctgtgtaaccctatcctgtatgtatgggagttgactgagggagaggtgcttgctagactagtattgctgcctacgatctagaccagtgcagtggtcaaacctaatattcctcccaaaggtgggaaagtttgggcataaacagtaagaaggaggaagagtagctgagagtaaaggaatgaataaatgagttatgtaacaagtcctgtgagtcatcctagcaaattattaaacatgtggaggggagtccccgattttgtagctaagtcagacaaaagtgcaggtaacctggggacctggtacttgagactgttgtctaaagtagggagagtactgtgcagtactgtgagactgagcctgtaacctgtgcggtctacgcaaacatcaggaattacaatcagaattgaattgaagtgggctgggtatggtggttcatgcctgtaatcccaggactttggaaggctgagtttggcaatcacttgaggtcaggagttcctggccagcctggccaacatggtaaaactccgtctctattaaaaaaaatacaaaaattagccgggcatggtggtgggcgcctgtaatctcggctatttgggagactgaggcaggagaatcactaaaacatgggaggcggaggttgcagtgagccgagattgcgccactgcactctggcctgggcgacaaagtgaaactccgtctcaaaaaaaaataataataataattgaattgaattgttggacaccaagtcattgtcggaaaaccagaaaattggtttgttggtgtcagaaaacaccccagacaaactttctacaataaacatgtattacttttataatggaaaatagtcaaacatcatgttttaagtgaagttaatataattggaacactggataagcaccttaaattctcaaaatttgctgataacctacaactatgaaatgcaaatatttgtgaaattaacaaaacagaatcactcctaactaaacctacaattgcaagttttccttggagagctgatttcttctctacactaagcctaagcaatatctacaggcatcagtgtttagtctgcacactacggctcacctcctatgtcttcatcttcattggctgggccttctccactgtccacattttccatttcatgagatttggttaaactgtagtcattcaaaaccgctgcactttctaaaagataaaaggaattttaagtatgtggttcaacgttaaaggatttttataaatatatattaagtagacccccatttaactttcagcttcacacaatcctttagtgacagatagtaccccttcacacatacccaaaagggatgtatacatgaaaactcttgaggtttagaaataagcccagggttcgcagtggctcacgcctgtaatcccagcactttgggaggccgagatgggcagatcacctgaggtcaggagttcgagaccagcctggccaacatggtgaaaccccatctctactaaaaatacaaaaattagttgggcatggcggtgcatgcctgtaatcccagctactcgggaggctgaggcaggagaatcacttgaactcgggaggtggaggttgcagtgagccaagatagcaccactgcactccagcctgggtgacagagtgagacttcgtctcaaacaaaaaaaaaagagaaaagaaatatgcccagggttcatgtaccctctgaatacacacaactttcttgaatatttctttcatctgagttaaagggcactcatgttccttctggagaaaaactatctctccattggtatatctcacgatattcagtaggatgccattgctatttatgacaaagtagtgaccagaaatactaagcgtgcaaacactggcataacctaatttgggaaagatgctttcctaggaggaagatctgtaagctttctgtatgccaaattctgtttttcccttctgttcacattataaatgtgattctgtggaaaacatattggaccccaagtttctttatttgtttgaacatttactgaatgttgacaaggctacagatatgaataagtcattatgtcttcaaggagctcatactttgagatatagataagagaagcccacaactctaacacatggtaggctcagacaaaggattaaataaaggaaatacaaagtgttattaaagttcataagtgaaagggagcagacataataaagacatgcttaaacaaacagcaaacttgttacaaaataagtttaagagaaatgtataataaatattgataatactagaagaaaaaggaacaatgcaactggaattattttcacatataggcatagtagcttaacaaaaagatgatagcagaagaaatgaactgaaaagttaccctctttttatctaactccttcccaatcttcaataaaatatttgctgagttcccattaatataaaaaatagtcaaagacactgaatcctgtggcactgaggctgggctgaagtagggaggtaactagaagctctgcagtggcactcctttcagctgagccatgaccaaacacacgcgggagcgaaagagaaacacgtttcacaaaacccatcactaagagcccctgaaaatgtggtcaccatggactcagtgtttgatttatgaatatctgaagtttctaatttctgcatattatgatgtatactctgtgaactctaagataccattctaaacaatggttcacttttctcaagcctgaaatgactaaaatatagtggacacctaaacaattaatatgagatttaggttcagttaaaagatgtgattggccgggtgcggtggctcatgcctgtaatcccagcactttgggaggccgaggcgggcggatcacctgaggttgggagttcgagaccagcctgaccaacgtggtgaaaccccgcctctactaaaaatacaccaggcatggtggtgcatgcctgtaatctcagctactcaggaggctgaggcaggagaatggcttgaacccgggaggctaaggttgtggtgagccgagatcacaccatcgtacttcagcctgggcaacaagagcgaaattccgtctcaaaaaaaaaagaaagaaagaaagatgtgattacaagttacagtaacacaaaaaggcatttcagtgataaattaaattttgtaatataatgtaagctttgattcacacagtgagttaatcaatggaggacacagaagttattttcaggaaataaattattgtaaatgtttataatttattctagagcagggatcagtaaactatggcctgaggtacaagtctgaccatagcctgcttctgtgtgggcccaagaggtaggaatggtttttacattttttaagggttgtaagaaatacaaaaaataatacgtgacagagaccatatgtggcctgcaaagtctaaatatttactatctggccctttacaaaaaagtttgcagaccactgttctacagtaaaaatcgcaagtcattcaaatacaagctactatattattcaacaaaaactgtcttcagagcaatgagctgaaaaatcaaaaacaaacaaacaaacaaacaaacagtgatcaacattaggtagtgtatgtttggccctaagatgctaaagaacttacatgatctaaatggatgagttattttttcatcagcaacagacaaccatatttaaaaaaaaacacacacacatttccatagcatttttactgcaaccagaataagcacattcctctctctttggtattttttttagtaaaggtatatttccagagaggaaagacctgatgttacctgcgggcacagactgctcctgagtgcttttcagttccgcatttgtttgtatatctgaaaagaaagaggttataaatattagctacttagggtacatttctacaggtttgagcattccaaatttaataagggataccatttcggaaaacttaacagcagaattcctctttcagagcaagattactctttctctatattctccctaaaagcctttcaaggagcatgaaaaaaaaatattgatgcagcaatgttactctaagaactttctgccagagatctacttacaccaagaacaatatgcaaaaagtgggttccattagaaataatttcatatattctttattcttccccaatattttattatgaacacatagaaaaaaagagttcaaagtggtatatatatatatatgtacatatatatgtacatatatataatgaaatactattcagcaattaaaaagaataaaatcatgtcatttgcagcaatatggatggagctggaagtcactatgttaagtgaaataagtcaggcacagaaagacaaatatcacatgttctcattcatatatgacagtaaacacgttgatctcatggaggtggaaagtagaatgatagacagggtgtgtgggtgggaatgggggatgaagagagattagttaatgggtaaaacatatagttacatagaaggcataagctctaatgtttgacagcagagtagggtgactatagttaacaacgacgtattatatatttcaaaatagctagaagagaggacttgaattgtttccaacacatagaaatgataaatactcaaggtgataaacattccaaattccctgacttgattattatatattctatgcatgtaacaaaatatcacatgtgccccataaatatgtaaaatattatgtatcaataaaaaattttaaaaaaagaactgcacagttgaacatccattactcaccctctggattctacaattaacattttgctatttttgctttctcacatatgtttccacccattcatctctcaatccattcatcgatccagctttttcaacgcattgcaaaataagttgcagatatcagtatacctcagtcctaacatttcagcatgattattattaactaaaattcaatatctgtttacaagattttaaaaagtaaattttacatacagtgatatgcatggatcttaagtgtaccattcaatgagtttttaaaaatgcatatcctcatgtaatgcaaacccctatcaagatacagaacattaccatcatcccagaaaagctccctcacatctcttcctagtcaattcccacccacatactccagagacaactactgttttgactttttccaccatagattagtttagcctattttagaacttcataaaaacagaatcacacagacatatggtataaattattttgcccgaggcttctttcactcaacataatgttttgagatacatccattctgtggtgtttatcagtagttcattcttttttattgctaagtagtattccatatgaatatcccagtttgtttatccattctcctattgatggacacctagactgtttccagtttgggctatttataagtcaaactactatgatattcctttttaaaataataaacttttaaattttagagtagttttaaatttatggaaaaattgcaaagatagcacagagagttcccatataccccacacccaatttcccctattattaacatcttatattagtatggtacatcagttataattaatgaatatatattcatacattattactatctaagtattcagatttccttagttttcatctaatgtcctttttctgttgcaggatcccttccaggatcccacattacatttagtcatcttgtctccttaggctcctcttggttgggacagtttctcagactttccttgttttgatgatcttgacagttttgagtactggtcaggtattttgtagaatgtccctcaactgggatgtgtttgtttttctcatgattagactggagcatgatcatccttgcacaagtatttctgtggtcatatgctttcatgtctcttgagtcaatacctaggtgtggaattactgggttatagggtaggaggcatatatctagtttcaacacagtgaaactagaacttgttcaaaagtgcttcttccctctactttgggcttaacttactctgcttctgccctcttaaggtgaaattttagtgactgactttattcctttcttcttttctaattgtaaacatttaaagctataagttttcctgtaagcattgctttagctgcatctcataaatgctgatgttttgattataattcagttctaatttccctcgagtcttctgtgatccactggttatttataagtgtttaatttccagatatttgggggaattcgggaattctttagctaacttgttattgaagtcaaattccattgcactacagtcagagaacacagtctgtgtgactgtagtccttttaaaagtattaagactggtgttcttggtgaatgtgccatgtgtagttgagacatatgtatgttctggtttttgttggttttctttgtttgttttgttttgctttgcagatctggctgaggctttattttggaggaaaaaaaaatgatgtaattgttttgtagctggaggcatgggcaaggggggtatcccaggcagtaaactccccatgggtgggctgagggttagggctgagcctcaggtgggtctcctgttccctatactcccctgcacagtggcctcctccacaggctctggagaagccatgggagggggtaggctgggaggggctgctatggcctttcacctgggcaggacatcagaggactgggacaccagcttcccatcgtggtcttgatcttcttcacaaccacagccctagagaagcaggcacagccaaaggagctggagcccccgccagagccaaagctggatcccaagccatagctgaggccagggcttgtaaggcccctgtaggctgagctcagcccacctgagtagcccctggtggtcttcatatggatactcatgctctgcatcccagacttcagctggctctccttgccctccagcaacttcctgtaggtggcgatctcaatgtccagggccagcttgatggtcatcagctcctggtacttgagcagctgacgcgccacgtcctgcttggcccactgtagggcggcctccagcttggaccccctggcattggcatccttaatggaccgctccccacacatacacaatggcggcctccagggaagccctctggcctttgaggccctctgtctcagactggagccggctgatgttccagtttatcttggagatctccgtctttgtacaacgcaggtcatcctgtgcttcccaggcagggtctgcagctcctcatacttgatctggtgcatgctgtcagccttggcctggctgcggttggcgatcttctcatactgggcctcgacctcagcaatgatgccgtccgtgtccagggagcagctgttatgcgtggacagccccacagatgtgtccaagatctgggactggagctcccagatctcctcttcatacagctgcctgaggaagctgatcttgtaagcttgccatccaggtaagactccatccagctccaccctattcatgtatgcctcatccacatccttcttgatgaggacaattttattctccatctctgtatgcttactgatctcatcctcgtacttgttcttgaagtcctccaccagcccctgcatgttgccaagatctgcctccagtttcagcttctcctggcctagagtgtccagctgccacggaggtttgttgatgtagctcttggacatgttgtccatgctgctccaagctgtcttctgctgccgcaggaggctctacttggtctccagcatcttgttctgctgcttcaggaaccgcgatgaagggggcaaacttgttgagggtcttaatctgctccttctcctgagtgcacacggcctggatgttggggtccacctccagcttaagggggctcagcaggctctggttgaccatgatggctgtgatgcctcctataaccaccagctcggccatagcctccacccagacccatgctggcacccaggacaccctggacactgctgctgctgcccacttgggagaagctcgaggaactgacgcaggcaccaggcctactcatgttggagtggctgctgaaggtccggggccagaggtggacaccctgtagaacttctgggtcaccctgatggacatggtggaggcgggagtggaggcaggtgggcagaaacagggggagattcaataagtagtggagaaactgcttctaggtattctgcagttctcaagtgtactgtttaataaatgttaattaaatcaaggtagttgacaatgtcattcagatctatggatatactaatttttgactagttgtttagttgctgaaaaaggagtattaaaatctccaaatatgactgttgatttgtctatttctctctgttctagggactataaaatatatctttaattttccaggcttcttagagttaaaattatacacttcacataaaatgtaaaaagcttgcaaccatttaggcccatttcctaccctccaacctttatactatagttgtcatatgtatcacatctgcatatactttaaaccttaccatacaatgctaattcttgctttgaatagtcatattgtattttaaagattaaaatgaaaaaatagtactttctaattacccacatatttaacatttctggtgccttttttttctttttttgagatagggtctcactgtgttgccaggctggagtgcagtggcacaatcatggttcactgcagcctcgacctcctgggctcaagcaatcctcccacctcagcctcccaagtaactaggactacagaagcaccaccatgcctggctaatttaaaaaaaattcttttgtagggacgggggtctcactgtgttgcccaggttggtctcaaactcctgggctcaaatgatcctcccacctcagcctcccaaagtgttaggattacaggtgtgagccactgtgcctggcctggtgcttttcattttttcataaagatttgagttctgatctggtatcacgtccctacagtctaaagaactttagcatttttaatagtgcaattatctgagggacttttcttgttttcaattatttgcaaatgtctttactttgtcttcaatcttataggatatttttactagatatagaattctgagtttacagggtttttttcttaaaactttttttttttttttagagacagggtcttgctttgttgccaaggctgatctcaaactcctggcctcaagccatcctctcacctcagcctcccaaaatgggattagaggataaaccaccacacctggcccagtttttttttccttccagctcttttaagatggcattccactgtcttctgtcttctattgtttctttttcttttttttttttgagacggagtctcactgtgttgcccaggctgaagtgcagtggtgcaatcttggctcactgcaagctctgcctcccaggttcatgccattctcctgcctcagcctcccgagtagctgggactacaggcgcccaccaccatgcctggctaatttttgtattttttttttagtagagacggggtttcaccttgttagccaggatggtctcggtcttctgacctcataaactgcctgcctcagcctcccaaagtgctgggattacaggcgtgagccaccacgcctggcctgtcttctattgtttctgatgagaagtcagtgatatcttgtgttgttgttttcctataggtaatgtgttccttttctctaagtgctttcaagatttttctctttacttttggctttcagcagtttgaccataatattcctagctgtaattttatttgcatatatcccacttgggttcatggaacttcttaaatctgtacagttacgtttttcaccaaacttaagaaattttcagccattatttcttcaaatattttttctgttccattctcctccccttttccttctataagttcaattatatgtgtgttagatcttttcatattttcccacagttccctgagacattgttgttttatctccccacaatgcttttttctctgatattcagaaggaataatttctattttcatatcttcaagttcatttactctttcttctgtcatcttaatttgctgttaagcctatctaatgagttttctttttcagatattgtaatttttagttctagaatttccatttagttcattttaatttctctgctgaggttttctatttgtttattaaaagcatattttcctttatatccttttcatttttctctaaatgctttcaaatattttttctgttccattctcccacgcttttccttctataacttcaattacagaagtgtaattactatagtttatacaagttcttgtctgccagttccattatgtatgccatcttgaggtcagttaccattgatttccttttctcttgagtatgggtcatattttcctgcttcttcatatgaccacataattttggattgtatgctggaccttgtgaatgatatattacataaattgtgaattctatatgttcctctgaagcatgtaggaatctttgttttactttttttttaagagataggattttgctctgtggcccaggcttgagtgcagtggcatgatcatagctcactgtaaccttaaactcctgggctcaagcagtcctcctgcctgagtctactgagtacctaggactacaggtgtgtgccaccacatctggctcttaaagttttttgtagtgacagagtctcactatgttgcccaggcttgtcttgaactcctggcctcaaggaatcctcttgccttagcttcccaaagagctgggattataggcatgagccaccatgcccagtcctttttgttttaatttttcttctttttttttttcgtattttttgaaatgaaaggtctcatatatttattactgaatgcagtcaaccaacacgttcataagagattcagagagaaaaaatatattcccaataaaacatgttcaactctccagacagtggtgacattttcagcttgatatggtaacatgattgtgaccttgagacagcataaatatgtgtgccatctcatgtgcaattccttacagactcagcttggttcttttccaatgtctccttttggagttgtacctgattttattaccagttttcatctaaatccactgcggaatgggaagattttccttttgtttcttggccaggaatcacttaatcctgaaagtcttgtgagaagacatggtgagaagtggaggcaagcacacaccacgatggcggagaaaggaagagaggactgtttctttatttttattttttttagacagggtctgactctgttgcccaggctggagtgcagtggtatgatttgagccctcttcatcccaggctcaagcaatcctcccacttctgcctcctgagtagccgggactataggtgcaatcacagctcactgcaaccttgacctccctgggctcaggtgatcctcccaccttagcctctcgagtagctgggactacaggtaggtgtcaccatgtccagctaatttttctattttctgtagagtgggggtctcgccatgttgcccaggctggtctcaaactcctggccttaaggtaatcttcccgccttggcctcccaaagtgctagggttacagacttgagccacaatgcctgaccagactttttactttttaaaccttgcaactaacttgccttggcttaaactcaaactccgtctcacctgttgtgggcagcagctggggtgaccaaatgtcccaatatgcctggattgaggggtttcctagaacacagaactttcagagtcccaaagaaactgggatgagttagtcacctttgcagaagtataaatctgtttagttattttagcctcagttgggctatttagagtgtaactctacacattagtggatcagccagagaatttatatccaaaaaagccctctctggctttctccactgcagaatgtctcccttcacttcccagttgctgtggttgttatggtttgtcaaaactgtggattttctatccactctgaggctgaaatggggcctgcccttgtataaaaggccataaaacaggctgcttttggtcatttttccagtgctttcaggtgataatttttttaatattttgtccagaatctatcattcttatccgtggaaaggttggttcaataggaggtactattccattacagaaattaaaactctcctttgttctttattttgactgtgatcatttactcaaaactatttagaaaagtactgatttaaaatggtctataatcaggtcatattccaatttttagtttaaaaaatacagtcactatagtcatattgtattctaatttaaaacttttaatatgttagccattagaggttagcaacaaagcataaaggcaggggaaatacacatagtttaaaaatacgcaaaggagcagcttggcatgggatgtcaaaatccaagctggatgagaaaaatgtccatgcaatgaataggggtagcccagggtgggctgctggagaccagccagcatgaagagtgtgtccatgcagggtaggcagtgtgaatgaggtaaggagggtttcaggccaggtgtggtggctcatgcctgtagtcccaacattttgggaggccaaggtgggcaggttgcttgagcccaggagttcaagaccagcctgggcaacatggcgaaaccccatctctacgaaaaatacaaaaattagccaggcatgttggcatgagcctgtagtcccagtcactcgggaggctgaggtgggaggatcacttgagccctggaagtcgaggctgcagtgagatgagacagtgccactgcagtccagcctgggcaacagagagattctgtctggaacaaaaaaaaaaaggcaagtttccacatggagggacagacagcatgaaaagtcagagctcaaacagtataagaggacatgcagggaggaggactgcctggcctggactgctggagcctgagagggaatgaagaggggaatgaagagggaatgaagtggctggcagcccccactagaggctaaatggaatgaggagaacttcaatgccaggagtagtccagtgcaaagtaccaaaactcgagtggggtgaagagggcatctacattttaggggcagtcctgcatggggctgtcagagctcaagcagttgagaagaatgtccacacagagtggaggccacagtacgggattatcaaaaccaaatgagtcaagcagagcaactgtgctgagtaggagatgccaagtgccaatgggagactggttgtattacatagtggaggaatggtcaaataagtaaatataataaggataatgagagccaggtttttctgtgagagaagggagttacaaatatggaagcctgtggtcctgtattggaagtggatgtactggcatgaactcatggcttctactatatataaaaagataggccaggcgaggtgactcatgcctgtaatcccagcactttgggaggccaaggcaggaggattgcttgataccaggagttcaagactagcctgggcaacatagtgagaccctgtctctacaaaaaaatattaaaattagaagggtgtggtgaagtgtgcctgtagtcctagctactcaggaggctgaagcaggagaatcacttgaactcacaagttcaaggctacagtgagctatgaaggtgccactgcactccagcctggatgacaacaaagcaaaaaaaaaaaaaaaaaaaaaaaaccagataaaatatagatgtaaatgtgtgtatatgggtatacataaatacagtccctttccccgttcactgagagcacctaggaacagtgaaactacaatagcgtctagatattaacttctaaatattattctccatttaaaggaatgaggctccctgaagaaatggtttactccaagatgggcatagtggctcactcctataatcccaacactttgggaggctgaggcaggtggatcatttgaggcccgcctcagcctcaagtgtttgagacaagactggccaacatggcgaaaccccatctctaccagaaatacaaaaattagccaggcatggtggcgcatgcctgtagtactagctactggggtggctaaggcatgagaattgaaagtataagtcgggaacattttgctgtgccagaaagcaaggaagtgctcacagaatgaagtggatatcttaaaagtatagagcagtcatcctgaaggggtttccattggccaaatctgggacaagggagcataaaataataatagtattagactataactcattgggaaaaaaacagaaattcatgagtacattctgagtacattattcatgagtacattattcatgtacaaattcatgagtatattattaacattctgatgttaataaatgaataaattaaaagtgtggtgacagatgggatatttatatagtttcaaagtgcttctctccaaaaatacttattaattacaaggttgaaagaaaagagcacctatataatggaaaagcctgttcgatatcactgtaactgagcaaagttacatgtggtcatcatcagtaatgggacaaacaaaaattatgtgccttctgatagtgagtagaacacagcatcacttctgtgatattcctgccaaatatgcaaaacacaaatcaaaccataaagaaacaaccaaactcgaatttgcagggatagtttacaaagcagctggcttataatcctcaaaagtttcaaggtcatgaaagactgaagaactgttccagactgaaggagaggaaagagacatgacaacgaaaagcaatgtgtgatcctgaaccgaaatatcttgtggtaaagaacatcacagaagcaactggagaaacttgaatggggtctgaggattgaatggtagtaatgttgatttcctggttttgatgattttattgtgaaggcagggcacatactctaaagcataggacagggatagagcaccgtgtcagcaacttactttaaaaacttgcagaaaaaaagtttttttgtgctgtattgcaacttttctgtaagttcgatagtgttttttaaaaacgctaactatgaaactttcaactgcatgctgaaaagattcttaacggagggaaaaaaaaaaagaaagaacgaaaactagctcaaagctttcacatgagcaaccttcatgtgggaacatcttttagtcactacacagaaagatggcttttgatttggtgaactaaaggcaaaaggtcttggtcccctgaatattttaaaccctctgacatttaaatagctctcaatatttttaaagtgtcctttgtgtactgtaaatagcaccagaagtaactgagtgtagtttcgaagagaaaaatgagattctgactaccttagcattcataacaggaaaatcgcttgaacacggggggcagaggttacagtgagccgagatggcaccactgcactccagcctgggcgacagagtgagactccgtcttttaaaaaaaaaaaaaaaaagagataggaaaaccatctgtgatcaggtcacatgaatgttcttattagctactaaattaaaacacaacaacaagatagattgaagtgtatttcccccctaaacttcaaggtatttataagaacatgaagcccattcaaagacaggagtggacagatggtgaaggaactcccaaatgaagaccagaaacttgttaaatatttctaaatgcagcaaaaacatcttagtttttaattaatcattttgtaacttctttacacttcagtcccccctaacaaatccacaaaaagtttccatttgatggggtctactgtggtctttttaatgtgtaggcagtcaacatagctttgaaatattttccaaaagaatgctctacaaagttaagtaggaagagtccctatattgcttttgatagaaatatagtttcctgtactgatgtttatacatatctggggcaaatgatggaagaatcttggagtgggttaattttgttgaaatataaatctcatcaattgtctacatttctcctgttatttgaacagggaaagcatgctcctgcctcaaggcctttgcatttacccttccccctgactataatgctttcctcttagaagccacttggctcaatttctcttttcattcaagtatctgcttaaaagtcacctattcaaacaaggtttacctaattaccctacataaaatgtcatcttccattgtcattttctttcctcttacctgctttatttttctttataaaattttttcattatcaccatcattcatttttttgggggggacagagtcttgtttttttattttttatttttttgctcttgttgcccaggctggagtgcaatggtgcgatctcggttcacggcaacctccgcctgcccagttcaagcgattctcctgccttagcctcccaagtagctgggattacaggcatgcgacaccatgctcaactaattttgtatttttagtagagatggggtttctccatgttggtcaggctggtctcgaactcctgacctcaggtaatccgcctgcctcaggctcccagatcaccatcactcatttttttaaatctgtcttttcccacaagaatgtaagctccatgagaacagtgatgttgtctgttttgtattgctgtatcttcagcccctacactagtgtctgctcatgatggacactgaataaatacttgttgaatgaacaagtgaagttttatatctctattgttgatccctatgaacgcactagatggttttgcaaactatggctcactgcctgttattgtactgcctgtgaactaagaatggtttttacatctttaaatggtttttaaaaatcagaagaatacacttgaacattttacaaaattcaaattgcagtgttcatcaataaagttttattggaggccaggcacggtggctcatgcctgtaatcccagcacttcggaaggctgaggcaggtggatcacttagtcaggaggtcgagaccagcctggtcaacatggcaaaaccccgtctttataaaaaaatacaaaaaaaaattagccaggcttggtagcaggtgcctataatccagctactcaggagggggaggcaggagaatcacttgaacctgggaggcagaggtttcaatgagctgagattgccccgttgcactccagcctgggcaacaggccaaggctctgtctccaaaaaagaaaaaaaaaaaaaaaggttttattggaacacagctaaacccattcatttgtatattgtctatggctgcttttgtactccatcagccaactaagtagttgtgacagagaccatatgacctgcaaagcctaaaacattcactatctggtcctttacagaaaaagcttatggagccctgttctaggtctattactaatacttctatgtttactttcaaaaccctgcaattggaatttcaagagaaagttgcggttttcactgacgcagtaatcaaagaaataaaacatttagacagcacctttcatacaaagcactttacaaatgtcactgattgaaaaattaatgcgacttttcagagggtaaaaatatcgaccacaggatatccaaatatccagataaaatatttttaaatgaacatacatgtatgtatacaaatatatacttagcatcatgttttcatcaggatttttgggtatcattagataaaaccattttcttatttcatttaaaagccagagttgtaatctagcagaaaactctagttaatacctatttcatttgtctttttgctctttccacaactaaataaccaatctcctgatatgttttaaggtttaattaaaacataagtgttttccattaacaccttatctcttaaataacacatcttctaaaggacacaactagtctactactgagatactgacatatatattagactgtaaaagttaaagcttatttcttttgcagtgttccacagcactctcccattcatagctactcatagccattctagcaatctcaaattgttttctaccagtatagaaaacaagacttcatcacatgcttactaagagatgataatttcaaattcgtttttggctttttagattctcttttcattgacgatgacactatataaattttctcaccggttagtttttttaagataccaaggtttttttttttttttttttcagagtttctaacatttcatgtgctgtaaaacgaaagggggcagattataaataaaatttaaacttggaaatggcaggagtctagttaattgagatttcatggaagttcacatatgaatgctttacctattagttcaagtataaattagctatgaagaaaatcaaatatttacattagcaacaaaaatgtacaatcatgtttttaattctaatggttataaacttgcctttatttctaatactgtactattaaataattaccattgaattaagaatattagctaacaaaattttcctcttaatttcagagatcatatttctactccatggtctgttttcccagtaggaagtataagcactaaaggaaagcaaaatgtcaaatctcagaaagaatcctgtattgagtttgccagctgtcaggcaccagaggtgcctggcagctgccagaaagctatctctgaatgttgatattccattccttctttataatagtaaatggagtcctttatacccatacctcttttttaaaaagaaaaagtttatcttatctaaaatgttcacttttactttataattaaaagttttagaaattgaggcactgattataagaatgttttcagaattgcaacattaacacctgggactgtaaatgtggcagagaagcgttcgctgtcatttctgcaaaatcctttaccagttctccgtatcaccatcatatataatcattcctcaaattccatcagtacaagaacagttctgtaggatgaaaaatgatccctataaccgatgaaattagcatattagaatcgaaattattatcataactagcttacctctccttcctctgccatctgatgtttgaatgtcctctaatatccccctacttgggttatacagcctctgcttgaacacttcgaataatacagaagttattcctttccatttcagaaaaactctagtagttaaaagcattctttcttaaatgtagctgaactcaaatttactgaaatgtctatttcaggtcctagttcagctttctgggaacatacaggataagttatagctcagatgttaccacccagtttcctgaccatggtgagagctgtcttctgaacccgtttttgtttgcctgtggctctccaaaaacgtggcatcaagcactcagcctaatagtgcaatgagatttctttttttctcataacaattctggaagataaataggggcaatggcatttattattttccccattttacagacaaaatccaagatacaaataatgacaaaaaacataaaggccagtaatcgcccaagggcacaaagtcagtgacacattaagaagagaagcaggatttgtctcttgagttttactgttgcttcagagaatttaaatcgtgttttaaatgccttcctatacagattacagattttagaaggccagaactagaagaaattttagatccaattaatttcaaacaccctaactgactgtgcattattgctgattgaggggaaaggaagataacaaaaacaaagacatgcattaaagtgagagtaatccctccaatcatgaaatacttccttccctatttccttgggctaaggtaaatgttaagaaacatcaagactgcttgcttaaaaacaccagatcaaatacaaccaagttactgttccagttcttcctaccctccccctttaaaaaaaaataaagcattccattttttctcctagattaagtgtttaatgaggaaactgtagaccgtggggcacaggtgaactgctgacaactgttgttaaaacaacaaagtcagtgtctagtgttattttccttcaaaggtcagttacccttaagttgtagacaaaaacatacattccaattttaccttgtatatcacatgctaccaaatgaacatgcagagagaaaaggaaaaatgggcatttcatgtcattgctactttaaaaagatgtttctggtaaaatgattgaatctaacatattgaaatgaagacttgttttataactgtaaaatgcctagttttataactgtaaaatagctggagccaaaaatagaatcattaatttgaagtgggtaacagagctaaatatgaaagttgaaacaatcaaacttctagaggaaaacagaatattctcatgaccctggagtaggtaaagatttatttttctttttttcttagagacagggtctcactctgttgcacaggctggaatgcagtgacatgacgtagctcactgcagcccggaactcctgggcttaagcaatctgcccacctcagcttcctgagtagctgagactacaggtgtgcatcactacactcagctaatttttaaaaaaatgtttggagagatggggtctcattatgttgcccaggctggttttaaactcttggccttgaatgatcctcccgctttaccctcccaaagtggtaggattacaggtgggagccaacgtgcctggcaaagaattctttagcaagatataagcagcacttagtcacaaaaaagaagctgataaattaatcttcattaaaattaagaattctattcatcaaatagattaagaaaaataaacaagttacagactgggataaagtatttgtattacacatctgacaaagtacacattactggctgggtgcagtggctcaagcctgtaatcccagcactttgggaggccaaggcagacaaaccacctgaggtcaggagtttgagaccagcctggccaacatgctaaaaccctgtctctactaaaacaatacaaaaattagccaggtgtgatagcacctggaaaaaaaaaaaaaaagcccacaaaatcagtatgaaaaaagacaacccaattaaaaaaaaaaaatccagccaggcgtggtggctcatgcctgtaatcccagcactttgggaggccaaggcaggcggatcacctgaggtcaggagtttgagaccagcctggccaacatggtgaaactccacctctactaaaaacacaaaaattagccaggtggggcggtagtcacctgtaatcccagctactcaggaggctgaggcaggagaatcgctgggaggtggaggttgcagtaagccgagattgcaccactgaacttcaacctgggcaacagagcgagactccgtctcaggaaaaaaaacaaaacaaacaaacaaaaaaacgtgaatgaccagaaaaccttagacgcttcaggaaagaggatccaaaatggccgataaacataagaaaagacactcaatgtaattactcatcaggaaaatgcaaattaaattaaaaccacaatgaaataccactcactacacacccaaaagaatggtaaaaattaaaaagactgataatagcaagtgttaacaaaaagatgtggaacaagtataactctcagacattgctagtgggagggtaaactgatccaaccactttggaaactctttggcaatatgtatcaaacctaaacatacacctatattagaacccagaaatggtattcctgggggtgtgtgtgtgtgtgtgtatatatataatatatagtatattatatatgtatatatactatatgcatatatactatatagcatattatatatgtatatatactatatgtatatatactatatagcatattatatatgtatatatactatatgtatatatactatatagcatattatgtatgtatatatactatataacatattatgtatgtatatataatatatagtatatacaatatatagcatattatgtatgtatatataatatatagtatatacaatatatagcatattatacatgtacatataatatatagcatattatacatgtacatataatatatagcatattatatatgtatatataatatatagcatattgtatgtatatataatatatagcatattgtatgtatatataatatatagtataaatatatagcatattatacatgtacatataatatatagcatattatacatgtacatataatatatagcatattatacatattatacatgtacatattatagcatattatacatgtacatatagtatatagcatattatacatgtacatataatatatagcctattatatatgtatatataatatatagcataaataacatatagtatatatactatatatgtatatgtatatatacacatattatatatacattatatataatacattatatatatacatatataataggctatatagtatatatactatatattatatataatatatagtatatatacatatctaatatgctatatagtatatatacatatataatatgctatatagtatatataatatataatatgctctatagtatatatacatatataatatactctatagtatatattatatacgtatattatatatacatatattatatatacgtgtatatattatatacacgtatattatatacgtgtatatattatatatgtgtatattatatacatgtatatattatatacacgtatgttatatacacgtatatattatatatactatgtgtatatatatatatagagagagagggagggtcttgctctgcaactcaggctggagtgcagtagtgtgatcatggctcattgcagacttgacctcccagtattgggactacaggagcacatgactaggcctggctgatttttgtactttttcttgtagagatggggtttcaccatgttgctcagggtggtcttgaactcctgggctcaagtgatctgcccgcctcggtctcccaaagtgctggaattacaggcgtgagccagcgtgcctggccacctaggtatatattcaagagacatgaatacatataggcccaccaaaagacatgcaaaagaatgtctgtaatacagccaaacactggaaacaatcaattgtccatcaacatcagaaggtataaattgtggtatatccatactattcgatcataaaacagagtgaactactaataaatataacaacttggatggatctcaaaaatctattgaggaaaagaagctagaccccagaaaagcatatattgtaaaattaatttatatgaaattcaacaacagggaaactatctatgaggatacaagtctgaatagtgattaatttggggcaaagggggaaattaacaataaatggacagaaggaaaccttctaaggtgatgcaagtgttccatatattgatctggaaggttgtataaaggtgaaaaataatcaagctatatacaaaagatatgtgcactttaattatatgttattccttaatttaaagaaaatccattgaatactcacacatctccaaatatctaaatcctaaacctaagaaatgcaattataacagtatcttcttgcttttgaaaaaaactttgaatctcaagagtttctcatgattttgctacagaatttttataagttgcatctacaccaaccactcactgaatgggctccatatatagcttaaaactcacgtggtacagaaatttatttacatgtcatgcataaactaaatatgaagatattttcagtgatcactaatttcccaaacttccctgcaaattgggatttcaaaatgtttcaatattggcatttttctctcaataaacttacactacagatagtgtaaatgtcactcatctttgaaaaacaaaacaaacacaaaacctctcttaatccacatttccctccagcaacatcccactgatttctcttcttcaccctcatagctaaacttctggaaaaactggtctgtaatcaacgtttctacttcttctactcccattcccactctacccacttcgatttggtttccatccccaccactccacagaaaccacttttgtcaaggtcactagcaagtgttatgttgccaaaaccaaccacactctttgtccttatcttgcttgatttctcagccacattcaacatagctgaccacccactccttcatgaaatactcccctttcttgaattccgttacaccacactctgctggttttcttcctgtctcactgactgctctttctcttttgctggcttctcctctacctgaccaaatgaggtatgtctccaggcactatcctgagagcccttctctcaatatattctctgtttaggtgatcccattcattcccttggctttaaatatcactggctgggcgcagtggctcacacccatagtctccagcactttgggaggccggggcggacagatcaagaggtcaggagttcgagaccagcctgaccaacaaggtgaaaccctgttctctacgaaaaatacaaaaactagccaggcatggtggtgcgtgcctataatctcagctactcaggaggctgagggaggagaatcgcttgaaccccagaggcagaggttgcagtgagccaagatcacaccactgcactccagcctgggtgacagagtgagactacatctcaaaaaaaacaaaatatcatccatgtgctgaagaaaacagccaaagccacattcctatcactagccagacctcttctttagaggagaggtccctgaccctgcctccttccattactctccaaattagcattctttttatttccttcatagcacttagcataaatttaattatttcaattgttattacttgttctttggtctgtcttccttaccttaccaaattccataagggccaaagctttgtctgccttttttaccactgtattgccagtattttgcatatgtgacacaaaaaaggtattcaataaatagttttagaacgaagaatgaagatttctgacttttgaattatattgtataataaatgtattacaagattcatcaaaattaaactttataaaactgtcgttcttcaactatcttttaaaatcttttaaacaataaaaaacatacgttaagtacatatgtgaagatgacccaccactgatgcaatgtatgctatcagagtgatgataggttttgctgatactgtttaaactgtaggcaatgcttgtcaaaattttttttattttaaaaaaataacaggccaggagcggtggttcacacctgtaattccagcactttgggaggccaaggcaggtggatcacctgaggtcaggagttcaagactagcctgaccatcatggagaaactctgtctctactaaaaatacaaaattagccaggcgtggtggcacatgcctgtaaccccagctactcgggaggctgaggtaggagaatcgcttggacctgagaggtgaaggttgtagtgagccaagatcgcaccattccactccagcctggcaacaagagcgaaactccgtctaaaaaaaaaaaaaaggaagaacacggtggctcacgcctgtaatcccagcactttgggaggccgaggaaggtggatcacgaggtctggagttggagaccagcctgaccaatatggtgaaacctgtctctactaaaaatacaaaattagctgggcgtggtggcacatgcctgtaatcccagctactcaggaggctgaggcaggagaatcacttgaacctgggaggcggaggttgcagtgagccgagatcacgccactgcattccggcctgggtgacagagcaagactccgtctcaaacaaaaaaacaaagtcccaattgtaatataaaggtgaaataaatgacagtaaataatattctatatttcaaaatgtaaatgcaccagcacaattattccagaagacagaataaggtagatagacgtatttgtagaatcaccatgaatgcaacagctaaatgcagaaggatgcatgctgcatcaatttaaaaaaaaaaacaagcaaggaaataaaatttaaaaaacaaggaaataaagccatggatcaaatgaaaaacagtaataataatggtaaaagtggctaagctctaaactaaacaaaaaaaatcatcctctctcaatgtaggtggtaattccaatcctagataaatttgagtgtactaaaaccatgcaaaaatgcttcatgtttgaacataaaatggagttacagtctagaagtcattagacagcaaaaaatgtcactacgtttcagaaaaggaaggtattcctcttagaatgagggatggcttcctaaaggagatggcatttaggatagaccataatggatgagtgaggatttcagttggcatgattgtggtgctattaacagtgttgggaagtcaggagaagttggtttggattggagagaaaattagttcatttttggacttgttgagttggaagaacagcattagaaaaatggggagtgagggaaagcaatgcctgaacagggaacactaagcagcagtccagagtcacattacaggacagaagataccactggaaaggtactgaagctgtgttgtggagtatcttaaatgtccaaccaaaaaatatttaaaatggtgtctgagtaggagaataactttatgttttaggaagatcattctggcagcaatcctcaaaacagattaaaagaggcaagtctagatacagggttactagtaggaaaaacatgtaacggtctaaatcagtcattttcaaaatgtgttttatggaatccagggttgcagagggctgccacagggctgatctatggcaagaggaagataggcttagcagtggtctcttgctccttctccaatctctcatttggaacattacacttgcatctgatcccacataagattttggtataaacggtgtcctgttgcaaaaaaaacaagtttttgtcttgtttttgtgtctaatcctaact

SEQ ID NO: 50 - DNA, 170189 bp, Homo sapiens
gcttggtgagaagagggctctctggtatctaagagaaagcagataagagttgctttaatgtcctggtgattaatcactggggtgccaaaacactttgaccactggatttctctcatatctcttatctcaaaaaattagtactccaaggctgagagaaagagactgatactgagtttgtctttcataccctctaagtgggtagtttgttagtggaccattctcaatttgcaaccttcagctacagcatacttctgtggaataagaaggtatagccatgaaataaatttacttagacccaggttctctaggacctgtaaatggatggactttttgatatcttgctctggcatgtttgtaaactacagatagtattgacagctctaaaggaatgaagggcattttatccaggccaaaccaaccctgagggaggcagcatgaagaaacctttaagaagtccaccatatagcagtcagagctaagtaaagaacaaagtctgagtcttggaggatgtcttttctctacctaaggggcctatctgatggactctctaggaggggatccttctccctcctcagtctcagaactacaatagtgcctaatgagggacacccttggtgaggatcagcttgtagatgaccctcctcaccaaggctaatgcaattttgaatgcatttggacctggagaaaacaggctgaattcaaagacctaaagaaagcttagtagcctggtcccttttttaaagtctggaactttttagtttggccttatactagtgttaatatttataatttctgttaggggaccaaaagtctcagaaaatgaagcaatataagaggtggaaataagggtaagaagggagaactagaagagtctggtagctgggctgcagaaagagacttggggtataattccttatttttatttatttatttatttatttatttatttatttatttatttttgagatggacttgctcttcttggagtgcagtggtgtgatctcggctcactgcagcctccacctcccaggttccagcaattctcctgtctcagcctcccaagtagctgggattacaggtgcgtgccaccatgcccagctaattttttgtatttttagtagtgacagggtttcaccatgctggccaggctggtcttgaactcctgaccttgtgatccacccgcctcggcctcccaaagtgctcggcctcccaaagtgagccaccgcgcccagcttggatataattgcttataaagaagagagggatacaggatggaaggaaaaattatggttgagttagtgaaatttataggataattttcttagagattcacagttcatttcaggaagaccccattaaagcaccaatactgagtaaagaattccccttaattacagtagtcttacctttagggttggaggatgggccaagaacccctaggatactatgaagacattttctgtagggaaactagaaaagatgggcaaatatgttaagcaatatgtaaggacatttacttaacactgttatctacatagttcaagagagtaattcaagaataaggaggaatgacatggatgcatcacattaaacagttatttgtattgtttgaatttcaaaactcctgcaagtggttttaggtatgctaagtcaacctagagactagtagtattcctctgccactcattttagatccaaatgatggcagtgcatagaagaacaaacgagaatatgcgaattagagtcacagaatgttagagctacaaaagaagattagtttgtttggttcagtaccatctttaaccagtaaaaaatgcccagaaaggccgaggaacatgtatggtgttgcgagaaagaagggagagaaagggaactaacattgttgggtacctgctatgtgtcaggcgctgcctaagtgctttgtttttatcttgattgattagcaccttgaggctaagggatagaatgaataaatggcaaaccccggctacctgggagcggtggctcacgcctgtaatcccagcactttgggaggccaaggtgggtggatcacgaggtcaggagatcgagaccattctggcttacacggtgaaaccccatctctactaaaaatacaaaaaattagccaggcgtggtggcacaagcctgtagtcccagcttcccgggaggctgaggcaggagaatttgcttgaacccaggaggtggaggttgcagtgagtgaagattgcgccacttcactccagcctaggcgacagaatgagactccatctcaaataaatacatacatacatacatacatacatacatacatacatacatacatacataaggctagtatcctgagcaatatgtaggagataaaagggagtggtagaccacgtttttctctctaaccacacagggctaaactagaggaagtaaagagtcagcatttgagagtgaggttaatctaaggaagtatttgccaaactgttgaaagcgactcataaataacttctccattcctagagaccttccaaaacatgttgataagagttaggactgatagggaccaagattactcttggctctggaattgattttcattttggaaaatcaagtcatgacctgagaatgtgggattaattgtacaaataggaaacaaaatggagcttctcatcctaaaatgtcttcaaagagaatagtatttatctaccatgaatgaaggagataaattcctttggtgactgtacttgtttttttgttttgttttgtaacactttgaagtcatgaaactgaatttgtaatcttggggagattcagtgccaagttcaaggcaggtggcaatttgaaaattgacagaataagattgtgttcctcatggttgtttgatataatatcccaatagttataccatgagggctgcttcagtggggagcattaatatcattagcagaggcatgtcctgtgtacagacaggacaacctctgaggaagaagactgggggagggtcccaccttcaggaagcttctgggtcttgtgagagaggtcagtcttacagctggtggagagtggggaatctgtaagtcaacatatcaatgcaggttgtaatataaaactattataataagaggaaaccaaaggaaagaaataatcggagaaagtggacttattcagaaacaattatttgaaaataaagaagataggggacatagaacagaagaggaaggtgagcagtgggaggaatctcatggaagagggctcatgtatgttttgtgcagaggctgtgaattggctgaccagaatggtacaggaaaggagtattaggaaatgaagttggaggagcaatctcattggcttgaatgaggaatttgagttgttaagcagtagcagggaacagagcatgatgagatgaaaatcacattgaggacttttgtagcagtacttggtcaaggaagcaggaaagttcactaaaatattattgttcttgccaagacatgaagcactgagagtttacagtagagtaagacaaggagaatcagaggaaagaaagtgggtccataggaattagcaaggcttggtcacagcttggatgtgaggagagggataaaagcctcaggatgatgatcccaagacacatttgtgctgttggtggtgatgaaagcttgataagagggaactgctttgtttttaagtaggaagtgttttgtcttattaaccaattgataggatgtgtcaatgttcagtattgcagagtctaggagggggcactgcccctggaggatagtggagcatgcaccatgtgtccagatgataacctgcatgcaccctgcccttttcaggttgaagaaccaggcaagagggagtctgttgctagggtgtgcccatagacttcaagaatgctatcctactctggatctgggaaagaaaatagtatttttgccagtttcttcccctttaatgctttgaaaatgggatatgactagcctgtggcagcatgtgcctgtggatgcacaattctctagcttgattcttggaaggcctttttctgtccctccctagggatcatttgtatctctgattcctgctcccagagccataaagtgggagcccccatttattaattgggctgggactggggcgggggtcggcgggggactctttagtgcggcaggcgggggtcttcccgaatgagcccattagccagccccaacggcagctgaaacggggcctcagccaagtcctctctgtttcaaaaaccctccattccctgcagcagatcagaacaaggcctgcgggagcccttagcttctgattgcagctgagaggaaggacaaaacaatttataggaagccaagtagctcctgtctcactgtgtcttcctttccaactttggggaaggggaagactgggatatggtgtcgcctcccaccatggcttgttacaggcttaaagtaggggagaatgagagtatatggacattgattgaacacttatgtcaatgctgtggatgtgtttacacatgtccctgctttcttcttcccatctacacacagttgagttggattagcagctactacttatggggggctccctaggtgtgtgctaagtctggggggtggggaggtatgcttatcatactccttcctgccccatacctgctctcagtctcccatttgctttatcaaaattcagggttagagttagactgcctcaacttcttttcctcttaatgggaggagtttgagtttggctctttttttttttttttttttttttgagacagagtctcgctctgtcacccaggctggagtgcagtggcgcgatctcggctcactgcaagctccgcctcctgggttcatgccattctgcctcagcctcccaagtagctgggactacaggcacccgccaccatgcctggctaatttttttgtatttttagtagagacagggtttcaccatgttagccaggatgatctcgatctccagacctcgtgatcagcctcccaaagtgctgggattacaggcgtgagccaccgcatccggccccgagtttggctcttaaaggaaggcctccttctgaaacatacttgtccctttggttaagccagcaagggaaaggtaggcatctataggggagtttctctgcagtggcccagagagaagctgtaaagggcaggaatgaatgtatcacttcctgatggaatgacacgtcttctcccttagggaatcatagattgccagggctaggaaagaggtcaggtaatctaacctctccctttacagagcaggaaactgaggcttaaggaaggaaagtgccttgcccacgcagtcgcacagcgagttaatggcagccagccagaactagatccaagaggccagaatcttgacttctgcgagtagagtgcccccaactttaagatgaccctttcctgagagccctgagcttcttcaggaaaggaaggatggactgtgagatttgaggagggagagagagattgagggggaaaggtagatctagaaagactgggaaattatatatacatatatatatgtgtgtgtgtgtgtatcttaaagaataatctttttttttttttgagacggagtttcgctcttgtcactcaggctggagtgcaatggcgcgatctcggctcactgcaacctccaccttctgggttcaagcgattctcctgcctcagcctcccgagtaactaatggctaatttttttgtattatgtagcctggctaatttttttgtatttttagtagagacggggtttcaccatgttggccagtctgatctcaaactcctgacctcaggtgatctgcctgcctcggcctcccaaagtgctgggattacaggcgtgagccaccgcgcccagcctcttattttctttttctttttcttttctttttttttgaaacggcgtttcattcttgttgcccaggctggagtgcaatggtacgatcttggctcaccacaacctctggcctcccgggtttgagcaactctcctgcctcagcctcccaagtagctgggattacaggcatgtgccaccatgcccggctaattttgtatttttagtagagatggggtttcaccatgttggtcaggctggtcttgaactcctgacctcaggtgatccacccacctgagcctcccaaagtgctgagattacaggcgtgagccactgcacccagtctaagaataatctttcaatgacatgcagattatacaagtgtaatttttatttaaagtcaagaggctggttcattgggaagcagatggcagccacagccaaagatcctgatgccctcagagttaacccaaacttcaaagagcattttgcaactatctctggaggttggatagcaggaaaagatccttagaggcaatgtgaggaattcaccctaaatctcaactgaagctcttttgctatattgaaaagaaaaagggaatggagaaagaaaacacatcggctagaaaactatggtggcggaagggggtccctgaatgatagatgagatgatagaactcagcaaaaagaggtatgctctgagattacaggaaaatggtaaggggaccttctcctctcctttattttagtttttaaagttttgagttgtttgatattctcctttgatgaggcagaaggaaggtggtatgtggtgatccacagtggcctaaataccctaaatagtgtgttcagttggctgacacgcattgctggttctgtaagtcatctcagtctggtgccaagatgcctttccctctttagacccctcctggatgtatctacagtcccttccagtgtttgctttctctgagcatatgagtctgggagccactgatgagcagagagtggaatactggagcatgcctaggctggaagcagaatggtgaagggaggagggcatcattgggcagattagaaagagttaatgggtctaggggagaggtactggggatctgcaaagtgaatattgtctgctgctgatgaagaaatagatcccagtacatatcctttacgttttgttcatcaactttgatagacagcatagaggaaatgtggaactggtctccatgtaaatttgtctctagggaatgtatgatagacctacttgtccagattacattaagtttgctgtcctgcaaacctcctttctcacagtcaggatccttttttgccttagagtccttcctgaaggagctgttatggatgagagagccacaagtccaacctcatgatctgatctaaaactgggtggcctcctcccagtcaccttcttttattagccttatattaaccattaaccttcattgatctttatgattctgggtttcacagcttctgtttctgttgaattccctaactttaagaaccatgtttttgcttttatcagcctgggagctaggtccctggagacaagaattttagaacagttatgactctctctgggagtgtactaaggttagtctgaatccttctggggaattcaggtttgaaggagttagaagagtgctaacatcaccgtcactgttacctaccaatggatgcttcctgggtgcaagaccaaagatgttctttggtgtctagtcccttgtctcatgtctaatgtaacctgccattttcctttacaggtaggagcaacggtgggaatgccctctgaggaatgcagtgatgtccatcagtcacctctcacccagagcctggcaaattcagtctctttcacagaacctaaagccaagccaggtaggggcctaaagccaatcagaggtcactggcctgcttttgtgtgggatgaccctactcccatcccaccccaccccacccctggtcttagagaagtttctttcttttttttttcttttttaatttttattttttgagacagagtctcactctgccgcccaagctggagtgcagtggcgcaatctcagctcacttcaacctgcgcctccggggttcaagtgattctcgtgcctcagcctcttgagtagctgggtaacaggcgatcttttttttttttttttttttttttatggagttttgctcttgttgcccaggccggagtgcagtggcatgatctcggctcaccgcaacctccgcctcccggggttcaagcgattctcctgccttagcctcctgagtagctgcggttacaggcatgcaccaccacacccggctcattttgtatttttagtagagatggggtttctccatgttggtcaggctggtctccaactcccgacctcaggtaatccgcccgcctcagcctcccaaagtgctgggattacaggcgtgagccaccgcaccaggctaacaggtgatctcagggaagtttcttattccgaaagatctccagaggagtttccttagctttttatttgaccctatattctgatgttctgccttctgattaatagattctcccttccagctagagcaggtaaccccctttcttggcattcctgttctttcctcttgtccagctgtgctaatggatgttcctctacagtgggttgctgatgtcagttagtgggttactctcagccctctcctccagggcagctagccctctagcccacaaccccatctatatacacagccttgcagggtctcactcctgttgcccaggctgtagtgcaatggcattatcatagctcactgcagcctcaggtgatttctcctacctcatcctcctgagtagctgggactagaggcgtgtgccaccatgcctaggtaattttttgtatttttaatagagacagggttccaccatgttgcccaggctggcctttaactcctggactcaagcagtctgcctgcctctgctcctaaagtgcagggattatagacgtgagccactgtgcccagccccaaaaagcttttttttttttttttttttgagacagagtcttgctctgttgcccaggctggagcgaaatggcgtgatctcagctcactgcagcctctgcctcccaggttcaagtgattctcctgtctcagcctcctgagcagctgggattacaggtgcccgccactacgcctggctaatttttggtatttttagtagggacggggtttcaccatgttggccaggctggtcttgaactcctgacctcaggtgatctgcccacctcagcctcccaaagtgctgggattacaggatttttttttccttccttccttcctttttttttttgagatggagtcttgctctgtcacccagactgcagttcagtggcacgatctcggctcactgcaacctccaccttccgggttcacgccattctcctgcctcagcctcccaagtagctggaactacaggcgcccgccaccacgcctggctaattttttgtatttttagtagagatggggtttcaccatgttaaccaggatggtctcgatctcctgacctcatgatccgcgcacctcggcctcccaaagtgctgggattacaggcgtgagccaccgcgcccggccccttcctccttttttatggaacactttacaaatttgcatgtcatccttacacagggaccatgccaatcttctctgtatcattccaattttttcttttttttttgagacggagtcctgctctgtcgcccaggctggagtgcagtggcacaatctcagctcactgcaagctccgcctcctgggttcactccattctcccgcctcagcctcctcagtagctgggattacaggcgcccccccaccacgcctggctaatttttttttgtattttttagtagagacggggtttcaccatgttagccaggatggtctcgatctcttgacctcgtaatccgcctgcctcggcctcccaaagtgctgggattacaggtgtgagccactgtgcccgacctccaatttttttagtatatgtgctgccaaagcaagcaccaaaaagctattttctatttctttcttctcagtcaagatagggcagttctgtcccttctcactacctctaatcagcttcttcacttcctttccaggttcagtgggaaatcccacctgtccaaacactgtgtgagacaccagaattagaggcctgcaagcctgcttccttcatccccaatgcccagatgggacaggtcaccagcctcctgtgtctacccccacctttcttgcttgctggtaggtgtgctgctccccctacccatcaaccccaaacagggttatgtttctctctcggagtatttttctctgttattaaatgtctccaacaaggggaaggccttggtgactcgcctgtatgtcttcgtaacttccagcccgaatctgtaaagagccgctaacctcctggtatcaaatgtccatccctttttctatagttcatgaccatttttcccatttagtgggtgtgggaatggaccagtaaacagatggtatttggtactggagagggagagtctaatgacaggtagcctttcttctgggggctagaaatctgaagccacagatgtgcattcttcctagttgcttgctatcctgggagagtactaggatttttttttttttttttttttttgagacggagtttcgcttttgttgcccaagctggagtgcaatggcacgatcttggctcactgcaacctctgcctcccggattcaagctatactcctgcctcagcctcctgagtagctgggattacaggcatgcgccactatgccaggctaatttttgtatttttattagagatggggtttctccatgatgatgaggctggtctcgaactcccgacctcaggtgatccgcctgccttggcctcccaaagtgctgggattacaggtgtgagccactgcgcctggcctacctggatcttttgagcgaatggttttatgtgtgcatttgtttttaataatatccagactgttccgaaaggaaagatgatttatctagtgtctatttcccaggaccaggatcttaggctctgagaatctgtccatactcattcccagatgcctccaggaagtggagaatagatggccataaagcagaatcaactactaggtgttactgtcttgagctcaggtgtcagctctcctctgggggctgttgagagttgcagggtcaggtgtgggcagagcatctccctgcatcctgggcataggaggtgacatcagcttatcctcttgaccctaggcctcctctctctgcagtgcctctctcatccctgcaatccagacagcacatgcagcagctcaagtaagtgccacctctgggtaaggtgctccctctcctggtaggcatatgggttgagttagaggtgaagcaggtgggctgaggtagacagagggatagagcaagtgttagcaagaaacgtccctggatgtagtcaagcagtaagtatgcatggggtaccttgagcaccagcatttataacttatcttcatgtcttctgtctaccaggttatctgatcacacagaacaggcctgccagttgggcagctgcagtcatggtttctgccacacgagggcgctgctggccaattaaaactcatgccccttagcagacagtttggggatgagggcaccctttctccaaaacaggggtcagaaactctggggctctctgggccccagagagcatgggcccaaaaagtgagacaaatatttggtaccacttgttcttccttgaaaatggcctgagacccctaaacactttgctctagtggcctgacatctcaatgtgcttccagctgaacttgggaagccccctctttccaggcacttaacaccttgcacaggtgcatctctcccttaaggtgtagcaggttccagctgtatgccccgttgtccccctgccttaatggcagtcactttccgacccagatggtggaggtgcctgtggtttttagggggaaaaaatctcttataattgttctaagaaaagtgttttgttagtgagaaagtgttaggggtgactgaagcctgggagagttagtctccccgtcacctactccagcacaaacctatagaattcaagatggtctagtggatgtttgcagcctcagtggctggaatacaccccaggacattccagggccctgagccaaaaatggtgtcagaaagctggataggagtgtgggctgctttgggccatgagcctcatacccaccctgtatcaggcagtgtttctgctaggggtgccaaatggccctggggcctctatgggactgaggactccacaattgaccctccatctccatgaagcccttccaggctgaacaggctaagggacatgacagaggttctcctcctccttcctacccccatgcctgagggcccctccccaggaggacagcttgattaaacagtcggtgctgctggaattactgcacagctggcgctccccccagcaccccgagcagagcagcagtgcagattaaaatctccaattagcgttaaagtgaagtgaggaggtgctgaggctgccaaggaggccagacgggggccctgggttggcaaaacccccactcttgcctggattctgagtgtcacccttagtcacccctactttcccagctcctctcccaacagctttcagtgcccattagttttgtatcgcttggggccagagggctttgcagaggggtggaagggggcaaatgccttacctaaaatgctagggacaccgtaagtatggaggaggagagcggtcagtgctcatcaagggagataccctattcactgcctgccaggcagccaggccaaggtgacttcacgctacagctctgcttcttctttttgcttgaagaaaagataaacaggacgggtcctttcaggtcctttacctatgaagtgctaggggacatggtgcccacatgaacatctctctctgcatattttatcctatctgacccatctgctcccaccgaagttatggctccttcctccctctctccattcttctctcagctttcctgtgggcaggggtaggcacagccaggcttgggagcatcgccatgccctgccacctgggtcccagcctgctcctcgttatagtcttcccagtttggggaagagcagtgatatgccaagaatggaggcctcagactctcccaatccctgatttttacatgtccccctataaggcccctctgccatctacacttttgcccttcatccacaaagcccaaaaggaaggcattatagctagccatgccctctgactgccctctgcccctttaagggaaatggaaatgggtacccagctgactgaacctactcaacacctccagaaattagacactagggcatggtgccaccctcccaggctggcacatgctaccctggcagaggatcaaataacccccccatcataccctgccccatgtcttcctctactctctccctcatgctttctctctctctctctctctctgtctctctctctctctctctctcagctcaaagcacagctgagccttaaaaggggggttgagggggtggagagaccaagctggggcaggggggtatagagctccaatagcacgttttcacctgccatttaattggatgtatttttaattaatgggacctcagggaccaacatgagacaatctgatatctgaatagggacaggggagggattgggtaagggaggaggattgggccactgggtgcggttaccgggaacccaggcccatcaatcactggccactttgcgttctggcatggagaatagcgaggtggaggaagggaggcactggggagaggtgccaggatttccccccaactgccaggacctccaaacggattggaactatactggttgactcaggtctggagcccaaaatcacagccagaatataaggtgaggctgttttcttgctcctggggttttgtctggttgggcttgtcccagggagtgctgtaaaattgtgaaaggaaggtggggacagagctttgaggtccttgtagagagaagacaagagctatggaccatagaaccagagactatggagagacggaggagaagggcagggttcagaggtatttctgtatgttttgacataaaataagtgccatggagattacatgcaaaatggcatgcaaatgaggcctggtgccttttggggtatgaatcgtagaaccttgcttttgcaagaaagggaacttggccaggtgcggtggctcacgcctataatcccagcactttgggaggccgaagcaggtggatcacttgaggccaggagttcgagaccagcctggccaacatggtgaaacgccatctctaccaaaaaatacaaaaaaattatctgggcatggtgatgtgtgcctgtaatcccacctacttgggaggctaaggtaggagaattagcctgggcaacagagcaagactctgtctcaaaaaaaaaaaaaaaaaaagggaacttggagctcatcttgccccaccccttcattttacagatgtgaaaaacaagacccagagaggggaaatcatttgaatcctgtcctggtattgctttgtgttcctggatttggagaatttctgggaacacaggaaaaggaaaggtaggtaggtgttgggggaggaaagtcaagggaagaaggtatgcaggatattattctccattgcttgaagtctcaagtttctatcccctgtcttagaagcaacttaggggagtcatggacaggttcagcttctatggagcactattagggggacatttcctctatacagcttgttccagagatcatcttatccattttcttgcttccaagtacacaaatcccctacagcccctgacccctatggaattttaccatgtcttataagatctacagggaaggaaatgcattatttaccccacctccttaaccaagaagcaaatcccccaatcaagactaaatgctgagcttttttttttgaaatcttaccacatatttccctgctgcaatataataagccactggagaaacttatgccaacaaatgtgttaaggagtagtcttatacgtcttgtcccatggcaaagcctagaacagagatagaatttaaattcaaggccctgaaggctgaattagaaatgctcctgaattcatgtggtgccatggccttagagctcttagacccctctgactcttgtagtgttgatgtacactggagaaaggggcaagtttccagctgtacccatccccaaccccttgcttccttcagtgttcacatgctagggttaggagggaagaaatgaaggagaaagggggttctcccactaggttgccaaggtggcatttcttgccatcctcctccttcctcagaaaattcaacatttttagttccatgcttcatgagactaagttaggttagggacaaggataggcacagagcttggaaagcagtgccagtaaaaactttatcacactccccaggcccccaacacccttcccccacccaagagttgccttctcttccccattttatatccccaaatcccctgagaagagcaagatctgcctaagtgccccccagcctcacccagcccttccttcagactgtgagtcatctccttggctgtctcattgcctgccttcttaactgcagacaggatgagaagagctctcctcagatccctccaaaacagtttggaaagaatttatctaggaccccgtgcctacttctaagggccccaggggtgtcagcaggggaggaaggctgtgccaaggggctggaaaggaagattctcttgttgggagagcagataaaaacctgaaagtggtgacaaggcagagggcgaagtttgggaactgagacctgtagtcccacctgtggggctggctgcctaatgtgtggcaggacatttagagcaagtatggtttgtaggatttattaaatggctgctgtttacagagctgctgtttctactctggaacacacagcagtggaaaggagcatgcattgaaggagagagggtggcaggctttctgtaagccctctttttcaccctttgtccatccctattccaacatattgcagtcatgttagagctagggctaaaaggccctaaaagcattcagtctatattctgggtgtttctccaaggaacagagcctcctttcttgtaactcctgtcagatctgcctcccactcctaaggcttttttgtttgtttgtttttgagatggagtctcactctatcgcccaggctggagagtgcagtggcgtgatctcagctcactgcaacctctgcctcctgggatctagtgattctcctgcttcagcctcccaagtacctgggattataggtgcgcaccaccatgcctggctaatttttgtatttttagtagagacgtggtttcaccatgttggccaggctggtctcaaactcctgacctcaagtgatccgcctgcctcggcctcccaaagtactgggattacaggagtgtggctcagcctctcatttctaaggtttagccaagggtgccagatctttgcggggaagagggatgacttgaagtgagtggaagttaaaaatggtagtacccagaatttcctgcactttggagaaaagagactaggtggggtactcaatgttagcctacggctcaactcttactctaataggatctctttcctccttctcccctaaatttttcccactggttgaagagagatctggatgactaaacctcccatcttgacaccttggagtttgttaagcaggtcccctctctgtagcttccaaagccatgaagaaggggaaggaaggccaagacaggggtagatagaggtggcagtgccatggtgtccatcagcacccaaggagaaaggccaaggagaagaaggtaactagagaggaagccaggaggagatgtctgctcctgaaacagcattcttaccccatcctctcctgcttccttgatcacatgccgacagggctgtttgcccaagtgtgccagctcgcctggctagtgatcctgctctgctgtgcaggcagccagctctctgccccagcacagagcacatgctgaggtctctcacactcctttgctcactcatttccatgtgtctatgttgtggattcctagaaatgaaggaggggactgtgggcttgaagataggaagatggcaggctctggggcccattgggcacatatctgcctggctggaggaaggaaagagggagaaggctgctggtagctcagcaagctcaaggttctggtgactcatagcagtggaggtggctcacaaaaacaacagaggggaagggatccaggcctattagagctctcttttgccccatatctccccactctgagctctgtgaatgaaggtccctcatctggattgtggagcaggggaggccccaactataaaaaaaacagggaaatgggagagaagagagcaggggaagctgagcattcccagtgagaggtatctcagtgaggaaaggataggagaggccagttattcttgccctactgtattcattgggtgcacaggaggtacggggcatccatctgtgctagggtagctcagtgcccctgggcactttccagaagaggggtttctaggcaaacacagttactcctccctaccctcacttgcctgcccagaactctaggtacccagctgacactaaatttttagaagtaaaacaagctgtgttataacaccagaacctggaaggataactgctgggtctcagtcctctcctttctggaaacagacacctgggacaagagagaagcagctagggactcctatgctggctgaaccaaggtagtggtgcaggctgtggaggtgggtgcagaaccatagatcttcagaagtgtcgatttcctcctcccttgtgtgccaggtgggcagtatgcatcgtctccatttttctgatagaggggataatagggtaacggggtttgaggtcacaccaggagaaagaggccagaaagtggaccaggagaaccattcatgccttggactccagtcccaggggcctatactggatctggtaaagagtaacagctaggatagccgggcacggcaaatcacacctgtaatcccagcactctgggaggctgaggcgggtggatcacgaggtcaggagatagagaccctcctgaccaacatggtgaaacgccgtctctactaaaagtacaaaaatgagccaggcgtggtggcgtgcacctgtagtcccagctactcaggaggctgaggcaggagaatcgcttgagcccgggaggcagaggttgcagtgatctccgagttgagatcgcgccactgcgctccagccttccagcctgggcaacagagcgagactccgtctcaaaaaaaaaaaaaaaaaaaagagtaacagcgatcttgtttgccaatgtatccagacacataatagtaaacatctggctgggcacagtggctcatgcctgtaatcccagcactttgggaggccgacgcaggcggatcacaaggtcaggagatcgagatctggctaatatggtgaaaccctgtctctattaaaaatacaaaaaattagccgggcatggtggcaggctcctgtaatcccagctactcaggaggctgaggcaggggaatcacttgaacccgggaggcagaggttgcagtgagccgagatcgcaccactgcaccactgtactccagcctgggcaacagagcgagactctgtctcaaaaaataaattaattaattaattaaaaaataaacatcccatcttcagtgaaggatggactaagaggaggagggttctgtgacagagcctgagttctcatttgcctatttctgttctttcattgctggcagctctgctctcctgccaggatgagggacctctgcccacttgctcttggtggtccagagatggctttggttagaaaaaggacagaagattagccactccttgtgtaggaagtcaggaacagctccattcccccagctctcccgggcagtatcagaagccccaggttgcctgctgggagatgcataataaagctcagtcctgaactaaaccaacacatcacctggccctgggtatagaagtagtattgtgagggggatcttgggtcttccaggccaggtgtaagcaaatgtagggagttcagccccaggagagataaaagaatcatgccatggccaggtgcagtgacttatgcctataatcccagcactttgggaggccgagatgggtggatcgcttgagcttaggagttcgagaccagcctgggaaacatagtgaaacctcatctctacacacacacacacacacacacacacacacacacacacacacacacacacacacacaaagccaggtgtgatggcatacatctctagtcccagctacttgggaggctgaggtgggaggattgcttgagcctgggaggtggaggttgcagtaagccaagattgtgccaccatactccagcctgggtaacagagtgagaccctgtctcaaaaaaaaaaaaaaaaaagaaaacatgccacgatgccacatgctccctaatcctctactttctcaaaccctattttctgcctgccttttctttcacctccctttagccaattccattcctggctacctcatcccctccagtctgaaaggacgtggtaagtacttgtctgttccctatgcttttctctctctcactctcttcctctcctcccagctcccaactgagagctatccctgtttcaactctttccagtgaatgccaccaggatctgaacccaagattccagcctcggtcaccaccctgaccctgagaatgccactgggatggggagaacttgtcagtcttcatccttccccacaagtatactgaagccaggacaggtatgtccactgccatgaagggccctgccctggagtagagggcagccataggggtacagtggggtcccagccctaaatgtgtgtatgcctgtgcattgggcacactggtttattagtgttatttcagcattgtgatgcagagagagtaagtgtaacagctgctccttgcttgcagtgtttattgttacctagagacaacctcctggctttttcccagctccccctccccgctagcccaaccccctccctgccaacaatcctgctctctccacactgatgggaaatttatagcttgcccataccatgcctttaaccctctcctatccatagggtagatgggctgagggaagccaagtgagcagcaggcatgcttgggcaccagcagggtagaataatgtgtggaggagggagggggcaatgacacccctcccctccattctatgtgtccagtcttaggcccctgctgccctcctggctctcagtggagagaaaagaggaaataaatttggacccagccttgagatcctggaagagctcctttggatttagccttgggatcctagcatctcctcacaaaattatgatcttccctgggcatctctaagccaccaattgggttgcctgcacctgagcaaatacagcaaggtagtattgaaacagaagggtaaatacagagtggcagaaccctcagatccctcctttatgtctgagagagaggtagctgtagagatgtcttatcaagacaagaggtgctggcttgagaaatgctggctggacttctacagctgggtagatgttagacatgaagccggccgctgagtctggtgggagaaactgcccgccttaacatcaccctgagcgcagcactaagatcctgagagacccctgggtcattctctaagctggtctttttgatctggttatgctgctgctttttacttttccttcctgggtcattttctcctacacatcttctagtttgacaccttggggtagatccaagagactgagaagatggaggcatcctagtcatggcctcaacaaagctggggaaagaaaaactccttctgtcctctcttgacctttcatggaggggcactgtgtgttctactcaccatcctcactggaaacagaagagaggaaaaagcatcagattttagcagaaaggatagagggaagacatatggaaaaacttactcatgggatgaaagacttcagattggacctgcttctcttctgagatttttcttctgcctgccggtttgtttttgtgtctacctaagaggcattggatgaagcacagttacttttccaggcctcttccagacagcctcagcacagtttccatacagtgcactgcttcttggttcttctaaatgtcatgtagtatgtgtggtggttagatcacaagttttggagacagacagccctgggttccagtgccatctctgccacttaccagctgtgctaccttggtaattcacttaacctctttgagtcctagtttccttgtaaaatgcagaaaaacaactactccttaagtttgttgtgagaatttcgtgaaataatgtgtgtaaagcacctacaacagtgcctgatactcagtaggtgctcactcaacagtggctggtgcaagagtactactacttttatgaagttagcagggctgatattgcttcaaagactttgtgagtcccctgagattaaaggccaaatgtatgtgcacatgctgggggagaatgtagttttctacacgatgtggagtaggggtggccatcctctggaaagaaagtagtcccaatacttgactcagactccccaagaaatcagttaccccattcctatgcctctcaagccagagtaccttggcaactgttctgcctggaagttcagcttcatccaggatggaggggggagagatagtcattagaaggatagcagcaactagcatttgctaggcactttacagttcgttaattacatttatctgcattagctcttttgatacccagaaccagtaaagagaactccatttattgatgcctgtatgccaggcattgtactgagtgtgttttttaaagtatgtttaaagcctatagagtatttcatcccctggatatgctgtgatttataaggctcatcccctattttgaatcatttggttattttttctgttataaaaaataccacagtgaatatccaaacaaataaaacttcatgcattttattttattttatttactttttgagacggagttttgctcttgttgcccaggctggagtgcaatggtgcagtctcggctcactgcaacctctgcctcctggattcaagtgattctcctgcctcagcctcccacgtagctgggattataggcgtgtgccaccatgcctagctaattttcgtttttttagtagagacggggtttcatcatgttggccaggctggtcttgaattcctgacctcaggtgatccacccaccttggcctcccaaagtgttgggattacaggtgtgagccactgcgcccggccttcatgcattttaaatagttaattctgagacatggaattattggtcaatggatacaaatacccacctcccatggttgtgttcattttattgatgtacactaatgagaatataatatttattagtcttcctcattggaattctacattggaaacacaaggcggccccttttccctcctatacctaaaagagacattaataatctatcaaggcttttaaaattgagatcattgtagatccacatgcagctgtaagaaataatacagagaggtctcttgtacattttgcccactttcaccgaatggtgacattttataaaactacagtataatgtcacaacaaccagaatattgaccgtgatataacctaccagtcatatccagatttctctagttttacgtgttctcatatgtatatatattaagtactatacaattttattacctgtgtaattttatgtatccaccactacagtcaagaagctgaacagttctaacacaacaagaattcttcatgttgcccttttatattcacacctccttccctctcacccacctcatcccctccttaacccttgacaccactaatctgtcttctaaaatttcgtagtttcaaaaatggaataatgtagtacataactttttaggattgtcttttttattgttttagacaggatcttgctctgtcacccagaatggagtacagtgtctcaatcatagttcactgcagccttgaaagcctgggcttattagctgggcatggtggcatgctcccatagtcccagctacttggaagactgaggtgggaggatctcttgagcctgagcggcagagattgtggtaagccaagatcatgccactgcacgccagcctgggtgacacagcaagaccccatctcataaaaaagaaaaaatgttaaaaaaaaaaaaaaaaagaaagaaaaaaaaaaatcctgggctcaagccttagtttcctaagtggctgagactacaggtgcctgccaccatgccagactaatttttaaatttttgtaggaatgtaaaatggggccttgctatgttgcccagggtggtctcaaactcctagccgcaagcagtgtttctgccttagactctcaagttgctgagactacaggcatgagccactgtgcctaggttgtcttttttcatgcagcataattccctgagatctgagtttttatgtgtatcaatagttcattccttttatttattccatggtatgaatataccacagtttggccagttacctgtagaaggacatctggactaattccagtttctggctattacaaataaagctgctatgaacattcacgtacagatttttgtgtgaacataaacttcttcttatattaccaggttgcccatcagcaaggttctctcactttgtactcattagcaatgaatgaaatagctcatttcacttgtttgctgaatgttttatattcataattattaaacttcttaattgggcatggcactactattatctccattttatagatgtggaaaattgaggctcatgttaaatcattttcccaaggtcacatgttaagtcacaaagaagagcctggaatccaagataataaggctttttccaccacagctgacttttcaggtggaggcctttctacacttcactaaggttgctgaaaagagggtgtgggtgctactagcagagagatgttgggggcagggagagcactggagcagcctgggtcactcaggtcctcacagccaacttcagtccatagatcaaaagagcggcacaggccatgtggggtggctcatgcctgtaatcccagcactttgagaggccgaggcaggtggatcacttgaggtccaggagtttgagaccagcctggccaacagggtgaaaccccatctctactaaaaatacaaaaattagccaggcgtggtggcaagcacctgtaatctcagctactcaggaggctgaggcaggagaatcgcctccaccagggggtggaggctgcagtgagccaagatcgtgccgctgcactccagcctgggcgacacagcaagactctgtctcaaaaaaaaacaaacaaaaagcagcagtgtcatggatcaggggacctgtgcccttgaaattgtttcccctttgccagagaacaaggctaaagtgaatggtgcgcctgagcattctatccagacacctgagacctggaatggggaagggaggacccagcctttggatgcctatcagaggatgagatattaaggtcctctttggaaatgtgctgttgaatgtgtttatgaggcctgaggaaattgagacctatgataagtgagctctctattctgaggggtaagggagatatagcactttttgttgtttttgaacaggggaactatagttcatttacaaacccatacatccacatacaccccttgggcaggctcagtgtctaggacgtggtagagagggcatgagcacagtggaagcaaaaatgccagttcagtgcttagtgctgactttaccaccgttcttcatggcaactgaactcatggacagctcaggagaagctagagaaattgttttgtctgtcactcagcctctggggcactggttgaagctgacaggtggaaacctagagttggcccagacatgatgaatgcagagatgccaatttgtaggagagtaggtttggctcctctcctgggagttctgtctggccaaaggctcccacctcccacctcctgctggagctggctcttttatagttgatgttaccattgctctcttggcctattccagcagctgtggactcctaacagttttccccactcacttacagctgcagaatcaggctaagattacgtatcactcctccatcttcttgggcccatcaggaacagcatatctcccagtggtacccactgtccctgcccagtagtcccagccatgtgggatataaacactgaggctagacctggaatggggactataaggattatttatttttttatttttttgagatggagtcttgccctgtcacccaggctggagtgcagtggcgcgatctcggctcactgcaacctccgcctcctgggttcaagcgattctcctgccccagcctcccaagtagctgggattacaggcgcgcacctccatgcccagctaatttttgcatttttagtagagacggggtttcaccatgttggccaggctggtctcaaacttctgacctcgtgatccacccgcctcagcctcccaaagtgctgggattacaggcgtgagccaccgtgcccagctggggactataagaattatataggcaccacactttatcatcgaaacaactagagatacccattctgaacctctgtcctctggttgggagttcttagacaaagggagaccactctttactagctctttcacctctacccactctgagattttctggctctgggaggtcctgactgtggctgggaagacagctaccttctcttagagccaagatggtgaggaaatctcaagacccctccctgccttgttccctttccttggctgcttctctattcaggtccccacctctcctggtaccactccattcccattccttctttctgttttcctctctctctcagcaagttttttatgtgattacaggcactgcatggtaattagtgctaaactcatttgcacaactacagttaattggctacaacaattaattaatgtgttggaaatttggcactggaaaaaaaagtttgtcatcaaaaaaagggcaaaaaattgtagagtgaggtacccataaaaatcgagggtaggcttcaaaagcccagctgggcctcaaacttcaggcctgcctcagctgcttttccactctcaacttcaacgcattttcctctctcatttttttcctcctttctttctctgtctctctcttctcctttttttttctttttcttttcttttttttttttttttttttttacaacttaagcaaactcatttccctgataaaatatagcatgactaatggctagagcatgtaaaaatcattgggaaaatgtccttggaagacgaatgcattttcagcagaataattaacttaattaacaaattcacatgcatattcatcaggctattaatgtcttctcggctcagcttgatgaacattgcggtaataaccatctcatttacatactgcattctactgcgatccaaaacagagacaacatacaggcgtatgcacacacacacactcacacacacgaatacacacaacatgcctgggccactcttgacttccaggttggctgggagagtgtgtgtgtgtaagcgaggcagggtagggagtgggtgagtgggaaccctgactgggtggtgtgatctttagatggccatgagtcaggtgggctagggatacccacatgtaaatatctgagagaactcaatattctctctctctctctctttttacttgtttccatttctctgtgtcattttctctcttcttctcttgcttcccgccccccccccgcccccatatctctctagggaaaaacttggtatctgtgccaacttttttccccctcccctcctccctctctcttcttcttccactctcccaactgctgccagccggcatcagcgccgaattgccatctccttgagctctctgtggagcaatctcagagagcagtaaggtgtgacgcgaggctctgccggcttcgcagcaccgcctgcggaaagagcgcaggatggcggaggaagattaagagaaatcgcgagcagggctcggctgccattggtgtgtgcaaacgccgaggaggaagggagagggagagtgagagtgaggaaggggggagagaagggggaaaaaccagcagctgtcggcctaattcttctaacactctgcttgtggtcatattagaaaaacagattatgcccctcggtgccactcacttatacttgacatacgttaatgttctatatctccattttccggttcttgatgacggtggacttgaggtcgaggaggatgggggcctgggtggccaaggggcacaaaaaaccctgtcctctcattctctcctgaccttgaaccccagtctgtactcgccctttagaaagcaaaccagtttacatctgatgccaccatttggcattttacagccccttataagatgcagaggtcagaggatacctggaggaccttacccctaagtcacccctcctttgtagtcttaataggtcactttaggaccaagtgagaccagcttttgtggcactaccccccaacctttctatgggctctctccctcaaatcagaagttgagggtcagagaagggagtctatgatagtgtgtgtcccaagagggggttacagagaagccataagcaaaacaaggccaggattgtttctgggttgctatggaaaccaggttccctcctcctggcaggaatggaggagtgcctaaggccttcctcctaccaccaatcctgagggttgtaaaggcggagtttgctaaggcctggggaaagggctggtcttggaggacaaaccaaccattccctatagctggcctgctattcagaggtctttgacccccacctttcctaccctcccacctctatattcagtcaaaggaggctttttcctctggtaccttgtcctctatagagacctgttgcttagcaaccactagtgctttcttcttaataactaacacggacggagagataaaatatctgtgtctatattcagttcccctcccctgtctatttatatttaataactgaaaccctgtcttgggttcccttagcacctgccttagagagctcttagagggattatccgcagcctgaagaaagaaggttacaactgaggaagaacttctgaacagggaagagtggaagaaaagactgcagtacgtagagcatcaagggaagctgtggaaatatattttcttaagtacaggtagagaggggaaacaaaatatttagaacttggaatgcgggaaggggatatccacagggattcttaagggacagctccaggtcctggagtggaccctaacagctgcttccaggctggcatttgccactccccacgcccttccctgcccctgcttcctggccacttccagtctatgtccctctcatatttcttttgtttgtttgtttgcttgtttgttttgagacagtctcgctctgtcgcccaggctggagtgcagtggtgtaatctcggctcactgcaagctctgcctactgggttcacgccattctcctgcctcagcctcctgagtagctggaactataggcgcccgccaccacgcccagctaattttttagtatttttagtagagatggggtttcactatgttagccaggatggtctcgatctcctgaccttgtgatccgcccacctcagcctcccaaagtgctgggattacaggcgtgagccaccgcacccagcctgtttgtttgtttgtttgtttgtttgtttgtttaaaaaaaacggagtttcgctcttcttgcccaggctggagtacaatggcatgatcccagctcactgcaacttttgcctcccaggttcaagcgattcttctgcctcagcctcccaagtagctgggattacaggcatgcaccaccacgcccagctaatttttgtatttttagtagagatgaggtttcatcatcttggtcaggctggtctcaaactcctgacctcaggtgatccacccgcctcagcctcccaaaatgctgggattacaggcgtgagccaccgtgcccagcttccctctcatatttctatctgtaagcagcctgttggatctccagtttcctagtgtctggatgttggtatccaggagagggggctgtgctgatgtgtgtcccccaaggtctgggtacttccccatttttcagtcactaggaaggagttcttctgagctctccactagaaaaccccacacctgacctggcagtgggggctgtacaataaccaaaaaatgagcaaggaaggtctacagtagcctaggcctgtatgtagagtcaggagacttggatttagtcacttctccttactctcctgtgatcccaggttattatccacttgatcttttaaagcccttgttgcttcatctataggccaggaataataataaagtttaccttactggactttagcaggatcagttaaagtaatatgtgaaagaaaatatgctgcaaactgtcacatttaactaaaatattttaagttctggaaaaggtctgattgctagggagagggaggcatcatgaatccagcccagccctgggcttaggaatgtcccttcccacagctgtcacggcctctggtcttccattagtttgttggcaagaggggtatgactctgctctctggtcattagggcaaggagctataaaaatcaaaatcaaacaccaagcagtctagggagagtcgtgcagtgttgtccctatcatttttctcacctcagacccaacctctggcctctagttttcggctgccaagacagcagccctaccgacaccccaccctgaccctctgcccctttcggcagtcagcacctttgctgccatcgtgctaactcacagactgtacagtttcacccgccataccccccttctctgcacctcttccaacccgagccttctgtggcagacagatggggtgtctgcgatggaaaaagctctgggctctacgccgtcttgggtgggcagcccccctccccaactccccattactccctctccccacctaagacactcagattcaccccaggcagcactagaaggggctgagaattccaactctcttctcttctcaggctcagctccagaagcagacccagaatggcatccttctctgagacccagaccccagccccttttcatggaagaccagcacaaaggaggaagtaggttagggaatggtaaggctccatgtgatgggactaatgtggagaggcctggggcctttccctgaggactggatggctggagtttgggagcctgagttgacagaggaggctaagcccgggcagctactttgttccagaaatctaaggtccctggagggaggctctgctttgggagggggaagggagctaacattgcagagcaccaactgtgaaccaggtacaatggcagagcctttccatacctgtactcacaactagcgggtgaggagtcaaggcaaataggtgtctcatagctccccatatctcggcagtcgaccacctcctcctttgattctctgatgtcactgccagttctcctcctattgctctgacctgtctttctctgtgtcctttgcaaactcattctcaactccttagactcagtcaagtcccccagttacacacttccatggtactatatatcattccttcagagcacttaacacagttatttcctatgtatttgtccagtcatttgaataatgatcctagtttcattggatggaaagttccacaaggtcagtgaccatttctatctgtgttcaccaatgtgttcccagtgcccagaaacaatgcctagcataaagcagctgttttgtaaatacttgttcaatgaatgaataaatgacaaaagaacatctctctggcctaaactcccttcttagccactccctcaccctgagctcacccaccccaatgtgtggaccagggaacaaagtacctgggaggtcaggccaccttgttctccctcatcaggacaggaccagtcctagtttcagggtatggggccattgctgtgccagagcctggtcctgcctgtctgctcttcagcctttccagggactgagataattcaaagtctcaacagtttttccccacatggaggcctgaaatcattcatgtgagctggaaagggaggggagttccatcagaggaaggtgctctgaagaaaatccctcttttttgccttgccgagactgcagagaccatctgttgccacccctctgtttgcttctgtcctcttaccctggacttcagggaaagagatggttaaaccaagtaggagggataggcagtttaccagatgcaggacaggctgcttgatcctgaaaatgtctggggagctagatgatgagcttcggccaggtgattggagcagaggaacacagaatccaggaacagccagtcctttggggctgtactccctagaccctgggaagcagggtatagataaaatgacctttatgaggtgtccagcctccagcccagggctttatctgactcctttgctgcccttaccatctgacctcaaacaatgttcccaaatctgttaagagttaaagttagcacaaacgtggtagctccttgctgtctgtggctattccccattcttaaccttgaacaagcacacagacgtttgcccatctcccagcccagagcatctcttcatccagctcagtgccaatacccagtgctcacagcagcttctcagcccccttatcctaacagtgcccgtcagcacccaggtatctagggtcctggatctgggaagccactctgggcagtgttgctctctctgaccccacctgttctctgggccctaatgaagcaggacaactcaaggcttcaggccaagtccttgtgtccttatcaaaggcaacatctgtcccctccaagaggataacccctggggggaggagggtgagacaggcacaagggagaaatcctgatcttgcctgggccctcaccccagattccactgcaggcatagattgggggtgaaagccaagacagtcacagaagccctcacacacacatgcccctgcatgggccttcatgcctctgagcccccacatatgaatgcccctcttgggctcacccagctacctgggctgctgctgctgccaagcggccttcttttattcatgcgttgttttattgctggcaaatgctgctgcttgctgctgttggaggcgttcctgccaaatccatcccaacatcttggcctggcatcagggcggcatgctaatgtggaaatttaaagagccgctcggctttaaatcggaattttaaatgagcagcagtgctccgaggggacctgggcaaaatcgaacagtatctgatccacccttcctcctcccacacccacagcatcaccccaagttcctcccacccctccctttgatttggacattagaggaggtattggcatgggacatcctaagggaagaaagaggtaccagggcagaggaatttgttcaagatgggggtcatctggaccagtgaggagctaggatcactctggaccaagaatggatctactccttgctgtcataggcaaatgaccaaatacaggatgttccacaagggagaagggctagaggtaatgaaactgaagttactccctcacttcccgttttaccaggaaacaagaagagaaggcctgctctgcagagaagagggaaggtggaattccaagaagacactcacacacaacatactcttgttgccaatgggatgtgtgcacacagctgtgcatgcaggctgggatgcttgatgaggtccctgcagcacatatacacatagctcacacatcacccctgcatggagaggaattatctgcacatggagggcggtctttctttccctatccaggacactattgtaaccccagagcaagctggcttctgcaagttgctagcctgaactgtgccccaggtttttccgtggatcctaatttcccagatcctggcagctgcttgagtcagccatggtgatggatctctgcagctcttctgccaggacaggggcagggggaacctgaggtcatcctgtgcacctgtcttggccacagtgtggtgccttctctggtgatcaccaaatgacaggctcagacatctcatctgggagaggttttggaaacagccttggtttcaaaggaaagaaggggctaatgggaagcgagagaggcagagtctgtgcctccttgtgattccctctccttacctatctccaggaggtaggtagcccctcattatcagaaaacattttttgagtgcctgccctcagggagacaccatgctttactttagcacagtgcctcacaattttctggattgacagcagccctcagaatctggatgtgctgtccccattggagggtccacagtaacacacatggtgacatccaccttactcatgttaggctaccaggccaagggatgctccaagaccttccctagaattcctcctccctcaaagaaggagccagctccttcaggggctggtgtggctgccagccaagaggcttggggcaggcctggggcatgcagctgatacctgcccaccagatctccaaggaacaccctcctcccccactcccacagcctcattcagatggccactgggctacaaggagacagtgctcacttctccccactcccagaaaaaacttcaaagctggacagcctccctttccattgtaacctgttccaagatcctccacttagactagatacactaacgacccaccaagcaattttgctaggcaggaccaaatgtttaatatagtaggggttgagctaggcctaggtacggaaacttgaggagtgaggcttgggctggaattctgggagaagttgttgaggtcaagagaggtatgaggaagaacaacttgatgtgagtgaaataggacagggggacatgaaggggagggcctgaaagaatctgcctctctcatctaattatcaacatgtaaataatatgcaaataacacactctttgtctagagaccacaaggccactgctttttggaagtggattacagagggcccaccagacagtatctctgagatcctcagatatgggacacccaggctcaagagagaggccagagtgcagccatctggttcttgcttattccctggattggctcactttctgtgagcctcagtttccctatgtgtgaaatggcaagactactggatggtctctaagggttttttccagtaccgacagtctgggattgtatgacctgggcccagtgccagggcagagtggagggtttgattccattctggggtggaagccaagatccttggctctcttgcccctgctgcccacctcagcagttctgtcatgctgcccccgcagcccgcaacatacctgccatcccaaacatgggcagttttctgaaggcagtgttttcttccatccatgcctttacctacactgtttctctgcctggtatgcccttcctgtttcagcccctcagttggctaagtcctccaactccaacagccttgcctaccttactcctccactccccagttctgacaaggtgcctcccttctgggtgcctctatgcactgtctctttacttctctcttgtcccactagaccatgaacttttggttttgttccagactaaatctccattataagtgtattagtttcccaaggctgctgtaacaaattaaccacaactctggtgtcttaaaacaactgaagtttattctcttacacttctggagatcagaggttcaacatccattttattataccaaaatcaaagtgttggcaggggtatgctctttctggaggctctagaggagaatctgttccttgtctctttcagcttctagtggctactagcattcctttgcttgtggccccatcactgcagtttctgcctctgtcttcacatcaccttctactctttgatatatgtataatttctctctctctctctctttcataaggacacttgtgttggcatttagggcccacctggataatccagaataatctccccatctcaagattcttaatcacatcctcaaagatgaacccattttccagttaaggtaacattcacaggttctggggattagaacatggacatatctttagaagctatcagactaccaaaataagcaaagacattttaaaatttaccatttattaagtaccatatgccagacacctacatacatttttctcacctcaattaagttttacaataaccctgaaatgtaggtattaatgcctgtattctatagacgaggaaactgaggctcagggagattgagtcacgtgcccaatgtcacgtagctggtaaatgacagaactaggatttgaaaccagatgagctgggctccaaagccaacatgctttttgcctcaccaacagcctctgagcctactccaggccctggcacaggtttcttgcctgaatggatgcagaaaaagaaagataggtagacaagagaacagacgatgaggcccagcatttttagtgatactgcttctagctttcttttgccaaagcccccttaccacccctcttattctcccccaccaaccctgacctcttgtttcagaagcctggaataccccccagcttgcagccccctgccaactactgctgcccagaagggtggcacagtgcctggacttcaggcagaatctatcaaatcacagaaccagagggtgtctggaagtcacctcatctagtcctctgttcacatccagccctgctcacgaggacaggggcagacaggttcagggtagtgggcagcagaaggatgaagtgcccatctcccttcagctgccctttctcctttcttacttcttacacaatttatattggaagtcctcactcagatctgactttgcagacatcatgcataatgagaattggccagaatcaggagtcctatggtcataggactgacccagtcctagattctccaaaaaataaaacgagatttttggctaggtcctttcacctctgtgggcctctaattcttcatctttaaaatgggatcgataataggggtaataataatacccaactcacagggcctttgggataataacacagcccaggaaagaagcatccaacccacggcctggagcaaggcaggtgctgcaggaatattttataacaccccccgtcagccctccagccaagcccctttatcctgggtaacacaaggctctgctcacctcagccattctggtctgcctcgcgcgctagactgtgaattcctcttggcaggatcttgttcatttctaatcaccgcccgttcccctccctagtgtctagcctgtgctcgggtacgtaagttcaacacacatttaataaatacggccaggcgcggtggctcacgcctgtaatgctagcactttgggaggccgaggcgggcagatcacttgaggtcaggagttcaaaaccagcctggccaacatggtgaaaccccgtctctacttaaagtccaaaaaaattaaccgggcgtggtggcgggcgcctgtaatcccagctactcgggaggctgaggcaggagaatcgcttgaacccgggaggcggaggttgcagcgagccgaggtcgcgccaatgcactccagcttacccaatagagcgagacgccgtctcaaaataaaataaaataaaataaaataaataagtgagcgagtgtatgagtcggcctcccaagtcctgagaggctcagagcttgacccccaccagcaacctttgcccgcacgaccatttcccctggggtcctggcggcgaccgcaatggaggggaaagaggccactgcagctttaagatttctctcgggcgtcccggttgccaaggcgcggttgccagcgccctgcgcggagctgcgtcctgctttagcgcgcggccttcgggtttccgccatcgccgccgccgccgccgccgccgccgggccgcgccgggctccgctcctccgaaccgtctggcggacttggcaccggcccccgctcctcagtgcccccgcagtgcgtggcaggctgcggcttcattatcctgattgattcctcctgctccccgacaccatgggggccccggacaaggaagggaggcggaggcggcatctgcaggccccttccccggccctcgcccccagccgctcctcaggccaccctgctgtggctggccaggcagggcggggatggaggaccggccccgcctctgctctcttggtgggcggggaggggagggccccaagggagagcggagcagtgtccggtcggtgctcttccaaggttccagctctgggccgcgtacaccctgcctcggcccgccctcagcaaagattttgcgccttctgaaccgggaggatatggaaaggttggggtggggaaagaacacagtggaggactgagaacttcaggaaaacaagccctggtaaaacgggaaaggtgacatctctgaggagcgttggtcacgtgtgtcaaggcctggtgacgcgtgtcttatgtgcctccctgggcatcttctcagtacagttctcagtagaagcaggggcagggtctggacccaaccaacacaggacaccccgcaaggatctaagcttaaaggaaggccaggagtctgtgtgagggagaggaccttttccccagaatccagcatggtgtgcccaccccacgcccaaaccaagtactgacaccttaaaaagagcatctgggccgggtgcggtggctcccgcctgtaatcccaacactttgggaggccgaggcgggcggatcatgaggtcaggagttcgagaccagtctggccaacatggtgaaaccccgcctctactaaaaatacaaaaaaaaaaaatagctgggcgtggtggcgggcgcctgtaatcccagctactctggaggctgaggcaggagaatcgtttgaacccgggaggcagaggttgcaatgagccaagattgcaccattgcattccagcctgggcaacaagagcaaaactccgtctcaaaaaaaaaaaaaaaaaaaaaaaaaaaaaaaaaaaaaaaaaagagcatctggggccagaactgagattggagcatctacttagttccgccacttggtttgtagcctgggcaagtcgctttacctttcttagccatggcttatccatctatacaatagggataagccagttgccaatgactaaatgggataatatgtaatgtgtagatggcaggaccttaagtcctctggcaaaaagaagaaagggagataaggggctgacctctatccctgctgctgttttgggtggataccttgagggaggtgagtcttctccatatgcttaaatccctgcttaactggaagattacctcaaaccttccagccaaagccgccccattgtcacagtagaggggcaaaactgctctttacctcattggcattgcacggattcaatatctaggtttacaccaggctctctactactgtccttctctccttgggtcctctcttcccacaatccctgacagtctccctctcgtgccttgcccctgtcctgtccaagggccagacctgggaagtttcttccatagactccaacctttgatccctctcagccctgggaaagagggaactggtggagaatttgaggccgtttaatgtatacctgtcatgcttgtgaatgtgatctgagcctctctggcaacttcagtgtctatctcagggcctgtttcctcttctgtaaattcattattcttgcaacccacattgactgggtgacaacagcagggcagcatggtgcacccagcaggttgggagtatggaaaaaacacaggatggaaagaactccactgaggccgggctcggtggctaatgcctgtaatcccaggactttgggaggccgaggtgggcagatcgcctgaggtcaggagttgaagaccagcctggccaacatggtgaaacctcgtctctactaaaaatacaaaaagtagccaggcatggtggtgcgcacctgtaatcccagctactcaggaggctgaggcacgagaatcacttgaacccgggaggcagaggttgcagagagctgagatcgtgccactgcacactgcagcctgggtgacagagtgagactccatctcaagaaataaaaccccactgtgaaactactgatctggggacaacagaccaatgcacacagcaggctctccaatactaggggtcggtgcagggacacctcccagattctagagcattccacagtgtcatgatgcttcctcctgtccttcctgagtacagcagactcttcccctagacttctgtcagaggctaattcatttcctacgggaaaagacatcctaaaatttgagtctggggcttttgttcattcccttttgttggaattccctatttttacaccagtcatccagtatctttatattcaaagggaaaacacaataaaaatacttccagtttgccagtagccagaatcaggttagctcatgtatctaggtttgcaaagctgcccaggacctttgttcagtgtggccctgtgtgtggctgccttagtctacccactggcctgtctgcccacccatccctggctggcctgccctatcttcagcgcctatagccctcagctccacttcctattaatacaaaccatgtgggaccctcactgtggcgtctccaggcaaaagatgaagccacagccgcctagtggctgccagggaggctggcaggaaggggcatctctacccggcgtctcctgggaaacagcgagctccccagagaagggacatttggaaataaaatttctgccgttgtgtgtcaatgtgtgtgttgaggcaggagagggagttaagaagcctccccagcccctctgttcctttctcctcaggaaaagcctcttggagcaactctcccactgcctcccaaaactccagccccttgtaggctctcctgggactggacaagtggctgaaaatgttccttcagattcatgatgcaggtgaagaagagcactggactgagagtcagaggccccagttctgagcttcctgacttaccccgtggctctggcctgttatacctccctttctgagtcctaagttcctcctctgtaaaatgaaattttttcatcattcctggtctctacattgggcctcctccacaaagtccaggaatatagttggggcattctaggccattctttcctatacttaggacagataactaatagaagcttataattcctagagtgaccttgactctaggaattctacagcgaccttgaatgagccagggcccttcacctgcccatgcattcattcaggcatttgtaggtgccttttgagagtgaagtctgtgctaagagggtgaagtctgtgctaagagggtctaaagctgccccaaattttttttttttttttgtagagatggagtcttgctctgttacccaggctggagtgcggtggcgtgatcttggctcactgcaacctccacctcctgggttctagcaattctgcctcagccctcagcctcccaaatagctgagactacaggtgcacgctgccacactcggctaattttttgtattttattttatttttatttatttatttttagatggagtctcgctctgtcgccaggctggaatgtagtggcacaatcttggttcacggcaacctctgcctcccgggttcaagcgattctcctgcctcagcctcccaagaagctgggactacaggcgcccgccaccacgcccagctaatttttgtatttttagtagagatggggtttcaccatgatggccaggatggtctttatcttgacctcgtgatctgcctgccttggcctcccaaagtgctgggattacaggcatgagccatcgtgcctggtcctatttatttatttatttattttgagacagagccttgctctatcacccaggctggagtgcagtggcacaatctcggctcactgcagcctctgcctcccaggttccagcgattctcctgcctcagcctcctgggtagctgggattacaggtgcagaccaccacgcccagctaatttttgtatttttagtagagacggggtttcaccatgttggccaggctggtctggaactcctgacctcaggtgatccacccaccttggtctccccaagagttgggattacaggcgtgagccatggcacccggccatttttttgtattttagtagagagggggtttcaccgtgttgccaagcttggtcttgaactcctgagctcagcagtccacccaacttggcctcccaagttaggattacaggcatgagccactgcgcccagcagctgcccaaatttttatgaaagaggcatctcagcttcctcttgctgtcctgtaccagaggtcagctgcatgccacattccttccatgatgacccccttcatgaggagctggagggactaggaaccttctcttcccctagtgtccaaagccaacctaagggagaagccatggtgtctcctgggaaatagaggtgggggtgatgtccctgccccctcctctctcactcccacctatttccctttgctctttcttgctcttgatagtcaagccccactcctagcccaatccactgctctcctgtaaaattatgggatgtccaaattagagacaggagccctttggaaccacaggcagaggtcagaggcgccctagtaaaagcaagtggctctctcccagctggaggccccctcttggtctcacctcctagagcttcccttcctcaagagactccaccttctaggcaggttggggattgctgagagggccctccatgcaggagacaacccccaaaacttggaggagacagaatagctctagggaggaggagggccatggtccctgcagagacccaggggcccaggcctccttccttcccatcttgtggcttctcagcccttgatctacattgaaggaagggtcaggcagtgggaagtcggagagaggaaggggaatgagggggaatgggggacgctcagaagcagggagaggtcctggagatctggattctgacttgtcacctttactgggcatctactgtgtgccaggctctgtcccagttttacatagattatgtcatttagccctcagcccagcgctgtgctgtggcattattattctgctctgacagagaaggaaactgagactcagaggccttatataacttgcccaaggtcacacagcttgtcaggagtgaagccagaatcctagcccaggtctgtcggcctccattgggttctccctgctgccaaaaagtcctcctcctggaaaagcaggtctggggttggggttttcagttggagctcatcaggatccccagaggcaaagctattgtcatctgccttcctcctcctcacccatctgccaggcaagtcgcaggtgagcccccaccaccatggcccctgccctagccccaggtgccagcactgctttgcctggctcccaccctctccctggtgcccccaaggtggctctgaggtcaccccacaccccagtgcctccattctgcatttctacatctccgaatgcttgggaaaaacagaaggagagaggaggtcaattgaaggttggaaatgtggactctgactataggtagagcattcgggggcctggttatcttcctcagttcaaatgaaccctttccccaactcccaccccctcacccccagagacagccagagctttgcttagttaatgaaatacaaaagaaggaatcaggggtggggggtggctccagagccctggaaagcgagggagagagaaaaagttgggtctcttccaaagagttaatgttccacagtatgatcgattaggtgtcagatgtaatttcaaaccaatacaagatgaatggcataattttccctctctcattttagacagaattaagaatccattagctaacacaaatttttggcaagtttaataggagctcaaatctacattcggaggaaatgctccccaaagcctgtttcaagcttttacttctcaggccccctgcctccaacgtcctcttaccaactcactgttgtctgtccacccaccaacccctcctcccccgccgcatgcagcccccactcccttcctctggtccccctacatgcccctccccaagccagcccaagattaactggcctgacctctctcacaaaggccgggcctgcccaccattgtctttcagtggcaatgggtgggggaaatgggtggaggggctggcagtgggcccaggagaggggagaggttgctgaattggccctaggctgcagacaaaccctagggagaggggtatattggggccttgggcagtttgagtctcagctactcctcagtttcacctccagaaaagttgtttttgtcctcaacaaagcattacccagttcatagggaggacacgagccccatccttgttgtctcttatagttacatacattaattcacagagttaacctgaggtaggaagaacagctatcatcccattgcatacatgaggaaactgaggctcagagggttggactttggctctgctgtttgctctcttactagcgccagaaggcacttacctctgggccttaatttcctcatctatgaaatgggaagaacatttagtaaccagctcataggattatcctaaggaacaaatgagatggtacacatcagagctttagcacagagcctagcacattaggagcgctttcatgactgcccacccaggcagaggtgccgcgtgtccgccctacgccagctttgtgctggggttgagacctggaacacagcctgaatcagctctagcctcagcccgtcaaattcacagcctggtaagggagacagacatgcggactgacccctgccctggaagacaaaagaggctggaaaaagaattatggtggcttacccttactaggcatttatggtatgccaaatatgggagcaaatcctttgtatatagtaacatgtttactcctcacaaccaccttatcagatagatactattatcatcacccccattttccagatcagggaactgaggcccagagaaatgaagtaacttgcccaagatcacccagctaccaaatggcagaactaagattccaattcaggcagcctgattctaaggcctgtggctcttaaccccaatggatggtgaagcatgaggatgtgatagaccctgcttggggtctaggaatgcttctcagaggatagaaggcttgaactaggtctttttttttttttttttttttttttttttttaagacagagtcttgctctgttgctcaggctggagggcagtggtgtgatctcagctcactgcaacctccgcctcctgggttcaagcgattctcctgcctcagcctcctgagtagctgggattacaggtgcatgctgccatgcccagttcatttttgtatttttagtagagaacaggtttcaccacgtttcccagactggtctcaaacgcctgacctcaggtgatccacctgcttcggcctcccaaaatgctgggattacaggcgtgagccacggcgcccggcgctgaactaggtcttgactgatgagttggagtttgctaggtgggcaaggagagaaagagcattctaggcggcaagaacagcatgtgcaaaagcaccgaaaggaggctcagcatgggaggcagtgagtaacgcgcttcttcaccaaaacatggggttcgtgcggaggatggcaggaaacaaggttggataggcaggcctgatgcttcattctgacaatcctcggcaagttgggaagttcttcctattgtctgactcctacagacagctttgcatgctgtgctcaagaactatgatttaaatcacgttgtcataataataggcatagctagcatctctcgtatgccaaatgctttatattgattatcttgtttctcctttacaataaccacatgaaccaagtactattatcccatttttcagatgagcaaacagaggctcggagatgcgaagtaacttggcccgagagagacagctagaaagtgacagagctaagtttcaaacccaggtctgacaccaagcccaaactcttaatcgcttgcttgctgtgtgctggtaggcaatgggggaactttggaggaattttcagcagtgaattgaattttagaaaaagaattctggcagagtgtagaggttggattggaacagggtgagactggaggcagagaagccagccgtgaaactgtttctcttgtccagatgaaagttccagatggagaacgatgggaggaaaggcccttccttatccatggggatgaaagagagggccttttggagcccaaggaataataatcatactataggcagggcgcagtgactcatgcctgcagtcccagcactttgggaggccaaggcagggggatcacctggggccaggagttcaagaccatcctggccaacatggtgaaaccccgtctctactgaaaatacaaaattagccaggcacggtggcgcatacctgtaatcccagccacttgggagcctgaggcagggaaatctcttgaacttgggaggcggaagttgcagtgatctgagattgcgccattgcacgccagcctggatgacagagtgagattccttctcaaaataataataatcataatcatcatcatcatcatcatcaccatactattaagtgcctaccatgtcctctgtaaggaagtttttttttttttttggacatggagtctcgctctgtcgcccaggctggagtgcagtggcgcaatctcggctcactgcaagctccgcctcccaggttcacaccattctcctgcctcagcctcccaagtagctgggaccacaggcgcccaccaccatgcccggctaattttttatatttttagtagagacagggtttcaccgtgttagccaggacggtctcgatctcctgaccttgtgatccacccgcctcagcctcccaaagtgctgggattataggcatgagccaccacacccggccaggaagtatttttttttaaataaaataagataaaaataagtgcttactctgtgccagtgagccatttccaacttgcacatgctgcaaagcagatattattagccccatttaacagatgagaaagctgaggctcagagaagttgaccaacttcagagccaggactggcctaaagccccagcctttcccttctaccacactgccataaggtgattgggccatacattagaagtcagctcttccctctcaacctggcttaatattccctgggtacatatggagctggtccttattttggccccagcaaatggcgttgagctgagggaggtagaaaagggatgagggggagtggagaagggaaactggagaggaatgaggtctggagttcggaggatctattgctgactattcaggaagacgtaaaggaaggcacacaggaagattagtggatttaattctcttagcccttaagaggagaagacacctctgccgggcatggtggctcacgtctgtaatcccggcactttgggaggccgaggcaggcggatcacaaggtcaatagatcaagatcatcctggccaacatggtgaaaccccatctctactaaaaatacaaaaattagctgggtgtggtggcccatgcctgtagtcccagctatctgggaggctgaagcaggaagatcacttgaacctgggagtcggaggttgcagtgagccaagatggcaccactgcactccagcctggtgacagagcgagacttcatctcaaaaaaaaaaaaaaaaaaaaaaggagaagacacctcattcctttacttcatttcctaacttttggtaaatccttccagctgtctaactcctatccctcctaatagagtcacaaaccaccccagttgccagttttaaggaagagctcctatccatgctccctaccatgagggcatacttcatcctttcttgtggagtaggaggtaaggagatgggggagtattccacctacttttattttttgagatgaggttttgttgtgttgcccagactggtctgaaactcctgggcacaagtgatcctcccacctcagcctaccaagtagctgggacacaggcatcgtgccagctcatctacttacttttatatcaattaatacccagaggaagctaggttcccagagtattccaccaaaaaggaggaaatgaccaactcttgccccagtagagagaagacagagaatgcttggcaccaggtgggtctcatcgcctgcccctcaagaatggttgccacttttgagatccttgatccccatacctttattattgagtccattcatctactcgctccacatttatttattgggcacctaatatgtacctggtcttgtcctaggtgcagggagtgctactaaaaacaacccccaaccccaaccaaggagcttgtgtatgaagtggggggagatagacaatgaacataataaatgtgtagaatacatagtgtgttagatggtgaaacatatacgaaaaaagaaaaaaccaaggaaggtgggccaggtgttgtggctaacacctgtaatcccagcactttgggagggggctgaggggggcaaatcacttgaggtcaggagttctagaccagcctgggctaagatggtgaaacctatttctactaaaaatacaaaaaaaaaaaaaagctggatgtggtggtggtgcatgcctgtagtcccagctacacaggacgctgaggcaggagactcacttgaacccggagaggtggaggttgcagggagtggagataacacccctccactgcagcctgggcaatagcgcaagactctgtctccaaaaaaaaaaaaaaaaaaaaaaaggaagaaaggaaaagcagtacagttttgaatggggcagccaggaaaagactcttagagaaggtgctattttagtatggatctgaaagaggtcagatatctggggaagaactttcctatcaaaaagaacagccagtgcaaagaccccgaggcaatagctttcccagagtgtctggaagagggaatgagcaaggggaagattgaaggagttgagtccagagaaccctagggtcagactgtctagggccttcaggttttcattctgaatgaaaaggtacaccacttgagggctcagagttctaggcagaggagtgacatcatctgacttagtatttaaaaatcattccagttgcctagggctgaggtattggaaggcaggtggagagagactgctaatgggatgggcttcttattagagtgctgaaaatgctcagaattggccagttgtggtggcgcacacctgtaatcccagcactttgggaggctgaggcaggtgaatcacttgaggtcaggagtttgagacgagcctggccaacatggcaaaacaccatctctactaaaaatacaaaagttagctgggtgttgtggtgcacatttataattccagctacttggaggctgaacctgggaggcagaggttgcagtgagctgaggtcatgccactgcactccagtctgggtgacagagtgagactctgtctcaaaaaaaaaaaaaaaaaaaccaaaaaaaaaaaaaactccagggcttggtggctcacacctgtaatcccagcactttgggaggctgaggcaggcggatcacaaggtcctgagttcaagaccggcctggccaatgtggtgaaaccctgtctctactaaaaatacaaaaattagccaggcgtgatggtgggcgcctgtagtcccagctactcgggaggctgaggcaggagaattgcttgaacccaggaggcagaggttgtagtaagccgagattgtgccactgaactccagccttggtgacagagtgagactctgtctcaaaaaaaacaaaaaaaaaggaaaagtgttcaaaattgtgtggtgatggctgtgcaaatttataaatacactaaaaatcattgtattatacactttattttttatttacgtatttatttacttgtttgtttattattattattatttttgagatggagtttcgctcttgttgcccaggctggagtgcattggcgtgatctcggctcaccgtaacctcggcctcccaggttcaagcgattctcctgccttagcctcccgagtagctgggattacaggcatgcgccatcacgcccggctaattttgtgttttcagtagagacggggtttctccatgttggtcaggctgttctcaaactcccgacctcaggtgatctgaccgcctcggccttccaaagtgctgggattacaggtgtgagccaccatgcctggcctacatatttatttttttgagacaaactctttgtcacccaggagggagtgcagtgacatgatcatggctcactgcagccttcaacttctgggttcaagccatcctcccgccttagcctcctgggaagctgggactataggcatgcactgtcaggtctgcctaatttttaagttttttgtacagacaaggtatcaccgtgttgcccaggttggtcttgaactcctggcctcaagtgataattctgcctcaacctcccaaagcactgggattacaggcaagagccatcactcctggcctgttgtatactttatttattttttattatttgttatttttaagatggagtctctctgtcaccaaggttggagtgcagtggtgcaatctcagctcactgcaatcaccacctcccaggctcaagtgattcttgtgcctcaccctcccaagtagctgagactacaagtgcctgccaccacaactggctagattttgtatttttagtagggatggagtttcaccatgttggcaaggctggtcttgaacgcctgacctcaggtgatctgcccaccttggcctcccaaagtgctgggattacaggcaggagctgtcgtgcctggccctgttgtacactttattttttaaatttattttttattttttgagatggaatcttgctctgttacccaggctggaatgcagtggtgcaatcttggctcactgcaacctctgcctgccaagttcaagtgatcctctcacctcagcctcccaagtagctaggatttaaaggcgtgcaccaccacacctggctaatttttttatatttttagtagagatgggatttcactgggttggtcaggctggtctcgaactcctgatctcaagtgatccatccaccttggtctcccaaagtgctgggattacaggtgtgatccaccgcgcccagcctgtcgtacatattaaatgggtgacttatatctcaacaaagctgttctgttttttaaaaagtcactctgactgttgcactgagaatagactatagacaggagtggatcaagggcagaaactggtcatccaggagagagggaaggcagtgggtagcagtggagggacaaatgcgctgattctggatttattttgaaggcagagcagacaaattccctgatgaatcagatgtgggatatataagaacataaactagaatagttgaagaactggagttctggaaaggaggaagggctggcctgaaggcatgggccttcaagggcagcgctgagattgcccttagaatttaggttctaagaccctggctttttattttttactgattgattgattgattgcttgattgattgatttagagatggggtcttgctctgttgcccaggcttgagtgcagtggtgcagtcttggctcattcaacctctgtgtcccgggttcaagcgattctcctgcctcagcctccgagtagctggaattacaggtgtgtgccactaggcctggctaattttttttgtatttttagtagagactgggtttcaccatgttggccaggctggtcttgaactcctgacctgaagtgatccacctgcctcggcctcccaaagttctgggattacaggtgtgagccacggtgcccgactgaccctggctttttaatatgaattttaaccctattatatttcagaacatctctgagcatcagtttcctcagcttgtactcaatcagctgcagagactgatggggacagacctgactcctataaggtgcttgtggagcattcactccattcctatcctcttcttttctggccttctaactgagactgctctgaaccaggggcccaggaaagaatgagggggaggaatatggcagaacttaggtcccaaagggagtactgggcagggggcttgggcattgttcctagttatctgattcctgcagtggggaaagaagtggaggacattgcccatcgcccttgagcctgacccatccatggtcaccctggctcctgtgcctccaccttccctgggggcagaaggactagtgccttacacatttggggttggcagaagattatcttggagccagttctcttcaacctagtgggagattctaggaaggcattaattaccaccttcctgctgatgctcggttaatgcgatgattcaaaaggtgtatttttcaattacatttaatgaaaagatttatagtcaagtaaaacataattaggaggctgccagcagactggtctcctgagaggaagaaaggtgggaccaagtcctaatgaggcaggttggagcccaggccagaggacctacttatccttccctacccctcttcaaagatgccgaagcattcatcaattccgacattcaacccacatttataagtacttattccatgctgggcccagagtgtacaatggaaacagaataaacactatgatccctgccctcagagagcttacacacgaggagagggggccaaccaaaaaaacaaaaaaacaaaaacagctgacagtttaacaaagtgctgcaagtgctgcaaagaaaataacaggatgctgaactagagaatacctgggggatctgccttgggcaaagagatcagacagtgtttcggggtgaaggggcaagctgagattggaaagatagaaatgagtcagccaacccaagagcgggaggtagttgagggaattggttctcagaaagcagcccaggtggatcatctgaggtcaggagttcaagaccagcctggccaatatggtgaaactccgacactactaaaaatacactaattagccgggcatggtgcaggtgcctgtaatcccagctactcaggaggttgaggcaggagaattacttgaatccgggaggcggagatcgcagtgagccgagatcacaccactgcactccagcctgggcaaaacagaactagactctgtcaaaaaaaaaaaaaaaaaaaagcagctcaggtcctaggatggggctcttagtgtttgcaaaatggaaggaaaagccagtgaggctggtgcaaggagagggagcaggagagacagaaaaggacaccaggaagggaggcagggaccatgattacaatcaggtttgaattctttcatcaccccaagaagcaactatacccattcaaaattactccccattttcctccacacccccaagctttaggcaaccagagttattttattctatatgctaaggactgggggttttaagccagggagtaaaatgacccagcctatatttttaaaagattgcctcaggccaggtgcggtggctcacgcccgtaatcttagcactttgagaggccaaggcgggcagatcacgaggtcaggagttcgagaccagcctggccaacatggtgaaaccccatctctaccaaaaaaaaatacaaaaaccagccgggtgtggtggcgggcgcctgtagttccagctactcaggaggctgaggcaggagaatcgcttgaacctgggaggtggaggttgcagtgagccgagatcgcgccactgcactccagcttgggtgacagagtgagactccagctcaaaaataaataagtaaaaataaaaaaggttaccccagctgctatgggagaatagatcagagagaggcaaggtgaaagactggagcagagactcagggaagaggtgatgtgacctggcttggggggaaacactgaggaagaagagaagagcctggatttgagatgcactttggagcaagatgcagtgattcttagtgagagtctatgtggagcgtgagggacaaggtgagcttaaaggtgactcgggtttctgtcttgaactgggtgctgccatttattgaagtggggaagccaagaggagaagcatatggaaagacatgtggataaagaattcagatttggccagcctaggcaacatagtgagacctcatctcaaaaaaaaaaaaaaatttgccaggcatggtggcccacgcctgtggtcccagctacttgggagtctgaggtgggagggtcacttgagcccaggaggttgaggctgcagtgagctgttatagcaccactgtaccccagcttgggtgacagagtgagaccctgtctcaaaaacaacaacaacaacaacaaagaaaatccaaatgcccatcagtgatagactggataaagaaaatgtggtacatatacaccatggaatactaggcagccataaaaagaatgagatcatgtgttttgcagggacatgggtgaagctagaagccattattctccacaaactaatgcaggaacagaaaaccaaacactgcatgctctcacttgtaagtgggagctgaatgctgggatcacatggacacggggaggggaacaacacacactaaggcctgtcagagggtggggtgggggagggagagtattaggaaggatgactaatgcattctgggcttaatatctaggtgatgggttgataggtgcagtaaaccactatggcacacgtttacctatgtaacaaacctgcacatcctgcacaggtaccccagaactaaaaacaataaagggttcatgtgaggcttccctggccctgagggatggaggcctggatgcccacaccaagggagtctcctctcaccaccacactctattgcttcctggcttgtcctttagcgtttttttgttgttgttgttttgttgttgttttgtttttaatttgagacagggtctcgctctatcgcccaggctggagtgcagtgatgcgatctcggcacactgcagtctccacctcccaggttcaagtgattctcatgtctcagcctcccaggtagatgggattataggcgtgcaccaccacgcccagctaatttttgtatttttagtggagacagggtttcaccacgttggccaggttggtctcgaactcctgacctcagatgatccgcctgcctcggcctcccaaagtgctgacattataggctcgagccaccatgcccggcctgtcctttagcttttttacatgtctaacttccattcttcctgctattcttggaaatgcatctctctagtttggagagggaattttggagagagaattctgtcattctcagttccctttaactgtctaagttcctgaaattctaccacaaaattcatactatactcgtattcattgagtacccactatgggtcagatactatgctagaagcgttggctacattatttcgttaaatcttgctgaccactctttccacagtattaataatacaataataataacagtagtaataaaacaataatagtgaccacttaatgaaaactcacttgaactaagtgctttacattaattgtcattttaaaatctcattgggaaataacctacccagggtcaaatagccagttaggaatgggatgagaaacctggacttctctccagtacaccagactctcttgggggatgaggactttggctgcatgggtggaggaagggcagaggcattgtgatgcctttctcttccttctcatttattctttcaaatggagcacagaggcagcaatatctttccagacttccttgggtgcagagggcaggcacccctgatgacaactccagggcctgccctttgctggggaaatgtgaccatttcttggggagggcacagctctcacaagacttaccagacccttagagcagttgcctggtgtcataggaggtaggttcccatctgtgtagtgcaggatcctgctctgtgatacaaaaggctgattcttgtattcatcctctgaggatggctttggtgtttgtgcaggtgcatttacccttctgtatatgtgtgtgtgcatttgtgtaataattggtgtgcaaaggaccaggtgatttgcacacatgcatgcaagtcagaacagcctggattctgtgcatttctctcaggatatgtgtgtgtgaagggatgattatctggttgtctggggcctcagaaaggcaggtaacttgtaaatttcctcaagcatgtgctggtgggtggagttcccacaggatggaaaaaggggctggccccagagttgagttctgagctcagctctccacctcttcctgcccgtctccagctcgctgcctccccctacttttccccaagctgggcagaatgccctcagcctgtgccggctggcacacatgccacatggtgcctggcgcgcgtctgggcaaggatgacgcccccaggaccggctgggataccaagccacccgctgcctcccccacctccagaacggagcgtccccatcccatcccctttcccagccagggactcggggagcaggcagggacacagcacagacagatacaaacacacagatgcacccagagacgcccacaggcgtgtgccccagagggacacagacacaggcgttcacacaggctcgggtacacacacgcacgctcacacccccccagagaaatttatgagtggtcaccacttgcacggatccagacagaacctgacccgcctaggacatttaggcaaatccacctggtgtctctgtccgtggtgctgaaacaagaatgtttgaacgtcctccctatggaagcactaacaggaagtagaagggagaaaaagacctgggaatgggtggtggacaaaaaagaagcaatggaggagaaagaagagaggggagagagaaatctggtggtaagggagatagaatgtaaaggattccaggaggaccaaggactgtctgaaccctgggactaggagaggaagaagaggatggaagatgatctcagccccatccctgtcccctgaatgtgtggctcctgtggcctccagttactccttccatatgccaccttgccctagatgacctgaaaatagtagggaaaggagatggacctgggaaagccctatagtggacctgcagatagctccctacctgattacttatctcaatttgtgttgggcaagtggacaacactgttgatctggatttgttctggggattgcagggatttagtgactgcttaatgcttatccatcagattggattatgggttccttttgctgtctcctgaggaaaaaacaacaacaacaacaacaacaaaaaaaaaaaaaaaaaaaaaaaaaaaaacttcccttcagagagattgcatccctaatagggatggctctcccatcagcagccccttagttgtggaatttatgtaacatgaggaatgcccactcttctggtggggagacatcttcaaggactgaaggggttatcatataactaggtggaaggggataagggaagacgggagagagaaaaaagagaaaagagaaggagaaagaatgtgtgtgatggatgagaggatgaaagaaggaaggaaagagggaggaagagggtggagatgcagatggcaagagtaaggcagggcttgagtgaaccagacagactcctgtgtccagggaaggggcagggaaagtgtgccagttggagcaaattgctcccctcaagtgtcccaggggcccagataagactggaattccagcctagtcctgcagctgttcacagtggcattcttcacccagagctttgggcaaaaagaccctgtgggccaggactaccgatgtgaggagcagctgctctggcgaggaaggtgaggtcagatgcagtcaagtgcatgtgtggtttcctcatgggtggggtgaggacagtgggtgtctcctggggtgtttccacctattcatatgtaagcagtggcaggaggcagatgccacatgcttgggtaggccctggagagtgggtactgggttaattgaggatgaggagcaggcagaggaaaaggaagaagagagcagagggagaggagtaagtaggaagaaaaggatattggatcgtcttctagaaagttctggaccttctgttattctcttttcttcctacaatttgagaaaaaggcctaggctcagctgggtatggtggctcatgcctgtaatcctagcactttgggaggctgaggcgggtggatcacttgactctaggagtttgagaccagcctgggcaacatggcgagactccatttctacaaaaatataaaaaactatctgggtgtggtggtgcatgcctatagtcccagctactcgcgaggctgaggtgggatgattgcttgagcctgggaggtggaggttgcagtgagccaagatctcaccactgcactccagcctgggtgacagaacaagatcctgtctcaaagaaaaagaaagaaaaagaggaagaaggcctaggctgccagctgggcacatctacctcagtgtctttgtctgtggtataagtataatgacagtcccaagctcatagggttgttgagaggattatcaactcatgtataacgctgagtcaattactaacatatcacaagctccaagtgtatgttaccttccatattgttgttgttgttacatcttggttttgcactggatcattggggatttctttttttttttttttctttttttgaaacagagttttgctcttgttgcccaggctggagtgcaatggcatgatgttggctcaccacaacttctgcctcccaggttcaagcaattctcctgcctcagcctcccaagtagctgggattacaggcatgcaccaccacactcggctaattttgtatttttagtagagatggggtttctccatgttggtcaggctggtctcgaacccctgacctcagttgatctgctcacctcggcctcccaaagtgctgggattacaggcatgagccaccgcacccggcccagttcaggaattcttcacgcataactagaccttcttgctatgcccttaggttcaacacttttaggtcttcctttgcacacatggaggactgtgatttcttagatcttcaaatttactcctgaagagaggcagccaagaggttttctggaatgcaaagcgaataccccatgataagaaaagtctagggtacaggtcactgagttttcccaccagaggctgtcacggaggttttcctggattcctgaagaaattggaccctggacctacatcagtgcctccctatccagcctggagcctcagccatctgccccatgcagtgctcctgtccgggccccacccaagcctgtgtgggtttgggtcatttcttccagactcctcttccaatcccaattccttctcttcattcactttcttcaactcaccctctgctcctttcttgtcccttttcttattctcaggaatctagttggaaggaaaggaattccctcactacttagagtgggattcccccaccctgcatgggcagaatggatggtctcctgctggaggtcaaagaagcatgtggagactggcctaggaggggcgaggggtggcagggcagtccccatgtccccctattctccccagctcctgtctcatcactgtcaccattcaatcatagcagatgggctgcagctgtgagcgccagcccggcacacaggctggtccgtgccacttgggagagaaggaagagaaagggagggagggaaggaggagggatgaagggaggagggagagaggaaagggaagaagaggaggaggaggaaaggaaagagagtggaggaggagagagatggcttggaaagaaaggagacttagtgccttttatgcctctctcttcccagcagaagagcagaggccagggctgggctcacaagctgggcagtgccaggcaagatgggcatatgcccttgattactaccaggaccgcaggccaagcctccacagcctccacggcctcataaatcagtttttaagtagcaaccacatggacatttcccagccgagaggcctggcctctgttggtgcagctagggcagccctggtggaggggcaggtgccaggccagggcaccaaagagagaggggtggtcattgaggtttggcgggaagtgaggctggagcttcttcaagtaaaacctggggcaggggctcctgccaatagagactaggtaagaaagtggcaagtggctggcagtgggtccaggactccctgctgggtcccccagaccctgtgctggatttccccggtgaagctgcttacagaggagggggagcgtgttgctactggaactccttccctccagctcccacccctctataagaacaaagagtcagggtgagtgtgagggcaatgtgtgcgcctatgcacttgggtatccgaatgtgcgcaccaggccttgaggggcaggaaggtgtttcctgatacccagcccaggcctggcacagacagggcacccaataaagttgcttgaatgaataagtgatggagtgggaaaggggccagttatgcagacttgcgtgcgttcacaggaattggagatttctatccgagtgtgtcctgactggagtctgtgtgtatgtgtgtatgtgggggtgtctgtgggtgctctggtatgtgggagggggtggggaagcaggaggtgagggagctggcgaaggggatctatttcagccaacgtccctccacatcctccctttcaggacgtcttccctacacagccctccccagagccacgattctccccttctaagaatccatcagtggggcggcagctcccgcgcccccaccccctgcccctgctggatcccgcggttgacgccctcctctcctcctccccgcactggccgcgtaggtggcctcgggtgcggaggtcccggcctggcgcaatcagttgcagagcggatggggcgggggcgcccagccttcttgcgcgcggtgtctcctccctgggtgaacagatgtctcggaattttagatgtgctctccgcccctcctcgcaataactccccccaccacccccgcagctggcaccggctgtggcgtggcgccctcctcctcccccaactcccaatagcaaaaccgggtgatggatccgggagcacggctggaggcttgggccaggaggcccgggaggcccgcggcgtggcagtggcggctcccagcgcggagggaaccattgggcgctgttcggacctcttcccttgtgtccttccttcccttctcccgcatccactcactcccatctctccactgtctatgtccttctcgacctctgccccaccctacagcccatcccagccaccgcgtctacgaagatcctctacacggaccctcacacttcacgacagaaactcctcctggcaactttggaggaattctttcctctagagaccccttttcctgcattcctgagccgccccccatcaccatcaactggctgcctgccctcagtagaaaccccgagttaatccggaaaacgtggggggaggacgggaggggagtagggattgagattagggaggtggagaagaccgggttggccctggctgagagacacccaaattttctaatcactgctaattaatgaataatccaattccacggacccccaactcagggaagggggcgggacccacagcgggcaggagggggccttggcagggcttcgcagtcggggtggtgccaggagccctcccccccacccgccagcattccgaggtaacaggcatttgttacccagctcgtgccaggagcgattggcaggttcgagcagcacagtcattccgcacacagatgtccctgcgttcactcttctgatatgaattctgtcagctccgaatccgagagagacaagcagacagctacacagacagagtcacagacagacacagacacagatagagcaattgtctggaagacgcagaactctacagatatttttcttccctgaaaacatattttaaaaaagaaagaaaaataagaaaagctcccattaatttggggggacagtccccgtgcccccgatgaatgccccccttcctctcctccttgtgttacctgcccagacatttcagcggccccaagggccccacaacatcatcacggagcttcaaagttaagtggtggcagagagaaactctaaagtccgcgagatctgtcccctcacgcaggacccttttgtagttctagaaatccagtatccctgagagttctagaacaccaccaaggtgcaagttccagcattctagaacctctgaaattcaaaattccagaactcccatgaattgcaaatcgtgctgagtgcccagttcttatattgccctcttcgtgggtgcgcgggaagtggatgctgtccggtgccccgagcggttcgcactgcatgcctggtcctcaccggctgcctccagaaccttggccaccagccaaaagtgcagcctgccctttgatttaggaacacagaaaggtcaagtctccctggctactgtccctttctgacgttgccttccagagcggaccccattcctgctcctgtcccaccctggccctccacgcctgacctggctgtcctgcctctgcccctgccagcggctgtgggagtgagctggttggtcactgggcatctgtgagctggctgggcatgaacagccctggggtttggttctccctggtcatccctacttagtggacgaagaaaaagggggcaaagaaactggtcacgacagaggagggggcacagaggggtttgggctgtggtttgtggggttgtgttttttaatctttcctactttctttttttaaaagaaaaagcccccatcctgtgtcatcatttttatgggatctgcaattctggcaaaaatctgtctttaatttagctgtccatataaaaatcctcactgtataataatgaacagatgccatggaatttaagctggagcctcggctcctccccgccttccccccgcgcctggcaccgggcaccgggcaccggctgagtggcacagactggcaccaacgcgcgagggtgggcagggggcgacctgggctcagcgccagggctctggggtggtgaaggggcgtccgggcgctggggttggccaggagggagcttttccgtggtggtaccagggagaagtgtctgcgggatttttctgtctttttctacaagattatcagtagttaaggattttggtttggttttgctttggctctttgtggttcttccgatatattttttaaagcaccgccctccattccatataaacccaaatgtttttgatattttaattgagttgtttttaaccctccccctgcgccgcgccccagcctcggcctgggagcccggccgagcgcgagttcgctgcaagcgggatccgctctgagcccggccggccggcagcctccgcggtattcccggcgcgggcccctccaggggctcccctgcggctcctgggggcaggggtaccctgctgccctccaagactgaggctggatgtggcatctgattgggaagtgggagagatgaagggaagagagaaagccccagtgccctcactcccattctcgggctgttcccaagggagaaggaaaaaactatgtgagtccgttgtgccctcctgcctccgcctgcggtcaagaaagggggcaccggctcaggcttgaggggttggttctgagccccccacccccacccctcgcttttaatgcgactctggcgagaacagatgtcccaaaccgggcgaactgcccagaccccgcccagctgtgcccttggtgaagacttggctaagagtaggaactggcatgcaggtccccaaaggggttcgggggttcccgcgacccctgtgggacctgacctagcagccttggcctcctggccagctcagcctcaggcgggaggcggaagagacccggaaagacccgttcctaattcaattaattccgaaaagaggaatgagacgcagacagatactgacagaagctgggagagaggtttaaatacccgaacaccagacacacactctggtatggaactccgcagcccctgtcagcgcggggagacctcgctgcgctcccgcgctggagagggcaggagagttggctgcgctagagccataccctggctcacatctgggcagcgtctccacccaacgctgtgccccagctccctgggcatggccggcgcctagaggttccctcttctcctcccctcggagcgccccagcttcccttccctgccctagggaactaaggtgactccgctcctcgcatctccctcctgaaatccgttgccctccttcctgtgaacccagccccggtcttggccttcttctcacgtccacactcccagggctggcgcccctgtcccagtgctttaggttggagaaagtttccagagcagaacagccctcccaaggcagctgcgccctttcttaccacttctcacccagggaaactttgtcgagaatttttaaagctgcaggacagaaaggcagaagctgcttcaggattcagaaccggggcagggttttaaggtttctcacagttcaggtgtcatttctgctctggccccgtggccagcgcctgggtatcccagccctgaaggatggaaaaatgacagtgtcttgggctgtgagttggggagcctgttctgacagcagaggcccatctgcccctcccacttttcgcaaaaagcagcatcctcctttgagcacactggagcaggtcagatgcagtccctccgcgctgcccctctgttgtcatggaggggttgggagggtaggtcaggctaaagctgctcagtcctggcgtctgccttctctttctcctcaggtgccttaaggactaaactgcagaatctagaaccataccttagtctcaatcccccctcaaatcaatggctctcctcagagcagatgaattcctgtcaatgattctggggaagaggaggaagcaaaggttgccaagagagaacgaaatctctgacctctgcccagaaattcttgtatccaccagcttgtggactttcccatgaaagggaaaaagagaagcaggcacagccccgtggagcttccagagtatcagggttttcctgccactgatcctcctgggggtcggtgtcccgcagtgatttatcgggctgtctccccgagtcacaaaatcagggctgggggttcactgggggtccatagctcactgtccgagtcatggctggaacgcagctcaacaatgaagggacaggaatggagctcaacagtgaagggacagggagtaactgctttccttccctttcccgccagatgggcaaatggcctggactcggagatacctctttttctctgtcatcttccaaatgctggacttggaatggggtctggaaaatcaagaggaagatgtcctcctgattgaacttggatccagccgtcgggttcagcggcccaggggttgagctgagccggctggtggacgcttggagagcctgccgctgaggctagggcaagaagggcgtcctctctgtgccttctccccaggccaggcacagcgctggcccctttcctcctccctcccctgcttctgttcttggagcatctctgggtgtgtgtgcgcaggcgggagagcaagcaagagaaagagacctgcgaggggacgtttggggccgcttgtccgcgcacatcttcttctcctgctcatcacaccatctcgccagggaagttgagcactggggaggagggtgatgagaggctagagccagccagagtgcagggaatgtggggggaagggtcagaaatcgggaaaggggcgactggtgtggatgccgggattcaccagaagctgagtcactcggggggatttctgtcccaaaagggacctgtgcacccccacccaatgtgatcacagctcacagaggcccaaaagtcatcagcatctttctaaaagggctggaatctggcttcaaaaacagaattgagccacgtagggtagctgaagaacaatgcatagaaagaagtctgtggtctggccaggagagccacatggaggggtcctttgcttcaggccccaagccacctggatcccgcccagctctggacttctgagcgggttctaggaaactgactgagtaggggagaagcccaattaaccttgttctcagggcaggataagaatcaggcctcgggataagtgccaagttccttttctctgcaattgcccctgccaggccttgctccacgccatgagtgcagatcagacttttgcaggttaggatctggggtatgtgccttgctctacactccctgcaataagtgagggggaaggaagatgggccaactcctttcttccatgaataggagtgattcagaggtttctaagatgctgaagacagggacacatccgggggatgaaggccctagtctgtgatctcactctagagaggcgatgccgggagaattccagagaaggcagtgaaattttgaaagaatgctggtaaatgttctgaaaactgctggagaattccagtgcagcattggaaagggcctcctgctccatgttcccctgggtcaggcaaatggacctccctctgcagccagaagaaaagacactagacgagggtcagcatgccacagtggacagctcctggccttggcgcctctgccgacagctgtcctgaccaccgggagggtattctttctactgggggacagaagaggtttgaggacagacatttaggggatgcaatgagctcaagttcagagtataatttgatccacccttcaatatataggacttccttcttcaacaatctttccctttcctgcttgtcagggagatattattttgggttcttggacccaatctttaaaagcctttgcatgcctgaccttaatcctcaaccccaacactacaaaccccacttcagccctaaaatgagtcacagtgtttggagaaatcatttaaatgagcagcatcagaaacagcctctttgggggactcctaaatgtgttcaggctttaggatgggagtctttggggctcagaaccctcttcaaatattctagggctacagcatgcactgagggctgagcagggggagtaggagggactctatcagggaagtcagttaagagctgcccctgcctctcaggttcagagaaaaaagaattgtgaggccacattgtctgagcaggagatgctcacccagtgcccttcctcccttctaagcccttagggttccctctgttcagaactgtaccagacaggaagaaatcagcccagatttggactgggtgggcgcctgctgccctgtcccagggagtacatggttaggctcctctctactgggtgggcgcccagactcagccacctcacagacctctaggggtgttcctccaaccttgtccacacccctaaacatgtcaacattcctgagaccaaaatggccgattcccctgagtccaccgaaatacaattttaagatgaaaaaggggcctccctcattaatatttcatcttcatgaccttataatgttttgttttgttttgttttgttttgtttaaaaatacccctgtctgattcaaatggttgtctctttgtctctgcccacttgctttttgcaacagtgggcagagagttgtaaaatgactggctgttcccaacttgatcatttttcagtgatgaaaaggtattttgttttcaagggaggtgcctgtgcatgttcaggaatgaagaagtgtaaggatatcagtgctttagtgctgggaaggtgcgagcctgggttgggtctgggaggggtagctagtatagcccagtgggtgtatggggggtggttagggagagaatactacccaagaatgtccagggtccctctgtttggcctctgcacagtcacttgacactctgccttcatcaccccagccccagctcaaaccttctctcccccctcaatgaaatgaggccaccgtgagaaaccggtccggctttgcatctcatttacataaatatttattaatcgtcattaaactgaacagaaacacgcaatgcacttcgggtgtccgacgggagtttcatcttcgctacaagaggaaggtaaaattgcgtgtgtgtgggtgagtgtgtgggtgtgtcgcctgtgggattgcatttttgcatcgtgtatttggatgcctgatcccctgcctccggtgggcagagggtctccttttgcccctttttgggggaacctccagtaggagccctcagacctctccccgcccacccaccagctaaagccaagaggactccttggaccaaaaaatactctctccagacaccggaaatcgccaggtggcacccaccgaggcacagtccgggcaggggtggggctgcccccaggtctccatccccacccctcaccccaggaggggacagaatggccgcggggaggaggagccggcgagctcacctccttctgccccccggacgccggcgccgggcctgcttgtgcgtgcggtgtggtgtgcgtgtgtctttcatgcaaaccctccctccccaaaccgaccccccaacagtttgccattccatacaaatttggaaacaggtttttaaaaaacagcatgacgcacaacggggacggggcgggggagggcagtggcactggggccccaaatctccgagtcactgattgtaagaacctggggagggggagggggcggcgcgggcccccacttcaccaaagtgcacagatccgcgctcgggcggggcggcccgcaggccgggcggggcatcccggggccgggccgggccgcgaggctcagtggagcctccttgcatagatatttgtgtctttgattattggtagtagtggtttttttttgtttgtttttttgttttttgttttttttgccttttattgcttctaaaagtccttactgcgttttctctccgatccggactctgcgttcggcttccgtcgcctcttagcttttttttttttttttttttttttttttttttttttttttgtatgtttgtttgtttaaaaaaaggaaaagggaaaaacggattctagttacaaattgtcttggcctctctctttcctctcaatccacttcccctcccgccaaaattaaaatcgcaaaacgcggagactggaggttgggggtgagggcgttccaggcccgggctccggcgccctaacttctaccctcttcaagaaagagggagcgcctggctcctttttgcctcggcagctgggtgtctgtttttaaaataataatgagagggggaaacgcgttccattgctcagctgcccccttaccaacgccttgggcctgcagggaggagggggaggaggaaacctcagcgaagatattgggaatgggggaggggtgcctccagggagcccccggagagaggtccctggagaagcactccttgggagagaggaggagggaaccccttggggagagagaaggcgagtcccctgggggaagcgaggcccctgggacaggccacccacaggtaacaggactgcgctgccccaggagagcggcaggaccggtggcccgctccccgcgcccggcgccggggtaggatgggggtgtccctgcgctctgggggctggggacaggggggcgggcaaaggcaaaagaaaaagaagggagccggcgcgaagtctcagttatgaaaaaacgcattgagctcctcgtacatggggccccggtcgtggtgaaggtgcatatcgtaagacaagagattctccgagtggacgcccccgcgcacagccgacgagccgaagactagcccgtggcccgtgggccgcgaaccgggcagcgccgagtagtgcatagagtagtggtagcttttctcgtggtcgggcgaggagtcctgcttgagtgagaagttgccattgagacagagcggggggctgagcgggccctcgtactcggagctgttgtagtccgggctcgcgccgccaccgcctgccgccgcatacagcgtctcgtaggcggcgcagtagccgtgggtccgcagggcgtgcgccgcgccgccgcccaggccgccggccgcctggcactgtgcgcccgccaggcgcgagcacgggtacgggtaggggtgcatggcgaacgggccgcccgagccgtggaagcggccggcaccgtcggcgccttgctccgtgaggaagttgcgagagttgagctgcagacagccggccaccagattggtggtgggctgcgacagacccttgcacagagtctgcacgtaggacactaggtctggccgcttgccggagcgcaggatctccgagagcgcccagatatagttcttggctaggcgcagcgtctcgatcttggacagcttctgcgtcttggagtagcagggcaccaccttgcgcaggttgtccagggctgcgttcaggtcgtgcatgcggttgcgctcccgcgcgttcgccttctgccgccgaagcttggagcgctccaagcgcgccttggtcatcttgcgcttcttgggcccgcgcttcttgggccgctcgccctccgcctcgtccagtccttcttcctcctcctcttcctcctcctcctctccccccagctcgccttcctccttgacctcggccaacgtggcctccgtcccctcttctccacggagagggactggcttggccgcccgggctggccccggagcccctggcccgggcgcaggcggtggcggtggcggcgcgtcgcccttgtcgctcctcggctcgtcgtcttcgccgtcgccccagctggcgaacttgggcacgtccgagagaaggccgggctcgctgaacaggcgggtcagcatggtgcctgagggcgccccgcgggcgggaaggggagacagacagcacaaagtgaggggcgcgctggggtaccgacgcccccccacaaccctcctccacccccgagtctcgtgcgggctcctgcctaggctaccctggatgcccacctccgccgcctgccccgcccagagccggcccagccctacccggctgccggcctgggatctcggcccaggccctctccccggcgctgggccccggctccgcccctcgcttgaatggggggctgctccccgcgcctgcttcttctcagggtcagggcagggaccgggtgggggttttagggaccagatatctttgccaggggaggcggcgcgctcgccctgaaagcccgttctctcctggcggtggagagaggctggtcggccgccggtggggacagctgccccgctccgcgctctcgcggcccgggccccccggcccagctccctcacccctcccgtggctctcacccccacgctccctaatccaatttgcaacttggctgcgcgccgccccttgctcggcccccacccccgcacccccaattccagaggcgggaggatcgtctcctctagccgatgcgtccccagctcccggagccggctctgggcggcgaggactgaagcagcggggcgtggggaggagactgagagaagcgagcccagtccgtcccctctgcggtcagggacccccttcccccttcaagctgactccctcccacaaggctcttcagatctcgttgtattttgggattgatgggggaaaaatccaaatttgtttgtttgcttcccttttttcggtggtggggaaaggtggcaggctttttgggacaaccatggaggggtcctccgtctcggcctcttcgcatatccccctccgtgatcctgccttccccccccaccgagcccatcgcaggcagagacacctcctctgcagccccctgggctgcagcccctaagggagagagaacctggggcccctccgatgcccacccaatgaggggggcatcatcccaggaaggaggtatttgaggaccctcctgtcggccgaagctgccgcccctcctcccaaccggcgggtcagatctcgctccctttcggacaacttacctcggagaggagtcaaggggagaggggaggggagggggggagggggcaagagagagaggggggagaagagggatcttctcgcttatttcattgttcccccatcttcagggagcgggggcagcggctcctcaaggcggcgggcgccggcgtcttcagagcgccatgcgaaccgcggagcgagtgtggcatctctaccaggcggggtaccagcctctatgccaggccatatgggcttggcacgtcacgggcagcagctatcacatgagagacggtgattggcatgcgtctgcactgggggagagccggctcccccgggacccgccgccatctgtcactctctactccaaaaaaaaaaaaaaaaattaaataaataaaggaaataaataaatatttctgccgccctcccctccccgcccaacgcagggaaagcagggattgagaggaaggtgggaggagttgccccctgtatatagagaccccctcacgggaacaatggggtggcaaggctggacactgggggctcgtggtggccaattctatgctccctcagggtcccgctctgtccatttcctcccctgcaggcccccaaggtgggtcagggaccagaccccgggttggggagaaaggacctctgtgcttgcccccactccccaggagggtccccttggccacaaagggacagctgagaccccctcccaggatggctgtaaggggcgtccctggcccgagccccataggtagatgttggcaccatgccatccctcatccctgtctgcccctcccccacccaccctcacgcacacacaacatatgtggctaaacgaaattcaaaccaagggaaagacagagaaagggaaagatgtgcctggatgtctgtgcctctgcatgggcgtgtgtgtgtctgtggggacatgtgtgtatctgtggagtcagccgatgggagatctttccttggttgttgggggcgtatccatgttagggtggagtggggaggggccgcgagatgagcctgtgcaccacccatctgggggtggaggggagggtctaagtctggattcctaacctagaaacctctcactctcctcctcccactgccagacaggtgaccagtccaccagcggctttctctcctggtcttcagacttggttatttgagggaggaggagcaggcagtgctgagaactgcctaagttcctggatgagactcaagcattctcctccccttctgaaaaatctgaaaatactgaagccaaccccagtaatcccaagagtggccaaggggaggtaggtcagacagctgtcttgataagggaggtaggaagttgctgttttatcttgtggctcacctttcaacactctcattgggccagacacagatacaaatggcacaggttgaagaggtggctttggacacacacacacacactcatgcacacacacatacacacacacacggatgcatacacatgcacacatatacctgttcctcaccctgtggtgtagaaaaatagataacatacccctactcagatagacacatgtatgtgagcaggtaatcacagcctggtgtagacagacccttgcccacaccccatttggagcatttgtatgttttagacccacatttctgcccctccagacactctagctgacatatatacacaacttcaattatactttcagcacacacattttgatgtctaccatgtgccaagcactgtggtggtacaaaaatgagcacggggaggcctttaccctcaatctgggtgggcagggctctctccctctaggaggctccccagggaccttgggctggtaagacactgatctgatgttgggtaggttggattaagttctaaatagagacacacatcaggaggccttggagataggggtgctggtgctgcctgggactcttgagtcacttggctgggagttgaaagtagcctgagaatgtacctctccaactcctcatcttacagaggcccatggagggaaactgacctgcctaggaacacacaggggaaacacagaactgggcctagaattcaggcacttgacccacagaccagtactccacttataagcccacaatctgcctcagtggtctctaaaaataagcctaccatgcttcccttcattcacgaatcctgggtctgcaaggcgaatcccatctctggcagatagtcgtggtggggagattctgggcatggcagagaaagaggccaaaggatgggcttcaggtagggcagagactcaggagtgctggccagcctccaccaagtttgggcacagcctccaaggctttgcaatccttttactgaagcagggtcctcaatcctgactagtagcctttttcctggagtctcctggctctgtgatatttcaattacatgcccatgctctgggcttctgattcctggccaaccccattaccaacttaaaaaaatgttggtcccagccaggcatggtggctcacgcctgtaatcccagcactttgggaggccgaggcgggtggatcacgaggtcaggagattgagatcatcttggctaacacggtgaaaacccatctctactaaaaatacaaaaaattagcagggcatggtggcgggcgcctgtagtcccagctactcgggaggctgaggcaggagaatggcgtgaacacgggaggcggagcttgcagtgagccgagatcgcaccactgcactccagcctgggcgacagagtgagactccgtctcaaaaaaaaaaaaaaatgagaggcccagcatggtagctcacacctgtaataccagcagtttgggaggctgaggccagcagatcccttcagctcacaagttcgagaccagcctgggcagcattgtgaaaccctgcctctgcctaaaaaacaaaaattagccaggcatggcggcgcatgcctgtagttccagctactcgggaggctgaggtgagaggatcgcttgagaccgggaggcagaggttgcagagagctgtgatcacgccactgcactccagcctgggtgatagagccagaccttgtctcaaaaaaaaaaaaaaagtgctgaatgctttgagcaagttatataacatctcttggtcttgatttcctcatctgtaagatgggataaattatgctacaccttcatagggttgttgttaatactaaatgggataatccattccatgaatgagcctccaataaatgccaactcttaattaaaacaccttgggaactgtaaaatgctttacaatattaattttttttgctcatacccctccccacacacattcagaatgcttggtctatatagaaattgaatttttgttgaattgatgggcgagtgaatggatgaataagtgaataaatgcttccttaggggagaaagttttctctccctgccttctcccttggaccctgagggctgggttaaacgcttcaggggtctcacaggcaggaggcaaaaacttgttcaagataggggagcccttggttggggggttcctgccacccttccggccacctgtcaggaatgacctcaactctctgggtctgagaagctcccctcagtcacccagagaaggaggtctgaggttgggggtgtgcacctggggacttcatccctttcgctctgtctcctgcccctgtcttttcttccttcagaaaaatggaacaagtttttctcactcgacacatttcaacttttttttagaagatacaataaaaaccaggggaaaattggaacagagggaggtgtgggatgggcctgcttcagacatgggcttgaaagaggcacaacacgtgtgttcacatacacacaagcaagcatgaacacgcagggacatacgcgcgcctctctgtgcaccagagatgcagagatgcagtgacggagagacagaaagagccagaaatggaaggaaggagacggaaggagaaggacacccagagatgccatctgttcctccccctggcattgggggaagggagttggtgaggggcctggtcccctccaggtctctgagagaaaaaagggagtgatgggcacctcagccaggcctggaaggcccccattgctgctgcccactcctcttggaaggagctaggagctggggggcctgaggttcccatggagacatagccccatcccaagggaggccacagtctgggcacctaaaatggctgcctcagaggggtggcagccattttgtacaggctcaggtcctgggggcaggggtgaggggggcagagtgtgtgtggaggggaggtgggaggtcatacctgagcagtctgggggactcttgctcaggggacaggaagagtgttctagaaactgctcttgttatacccccgctccaccaaaatacatacataaatctttaactgctccactccattctgacacccagaaagacagctagccagtcaccaccccctcaataagattggtgggggcaaatgtgctgaaggagacttcatttcccaccaaagctccaggcagggagaggggcggcaggtggatcaaacccaggtgtccagcccctggcctcagccacacatctatccacctcctggggcctctctgggctgagtggggccagcaggtgagaacccagcgagcttgggagcacggggagggaaggggccacctgtcttctcacccccctcctcagatttgaggggaagggcaggaatttggagatccttgagggacctgtgttcctgccattagccgtgctatggggggaggaggaaagggagggggcaggctggcactgcccagcagtgttccagcagttcaggatgctcgaagattcctcctaaagcatcggagcacctgccacctccctccccagcccctgcctcacatcaagtccaaaggatgctgggggagggggacctgcagcttcttcctggctctggggtgggcacctgccccactgccccctcctccccgcccgccgcagtatgccggggagcggcgggcacgccagatggcgtggctgagaatgcggcgacgttgccgggaggtgagggctggcacgggtgatatgcggctgcgtgccttgtggtgccatgggggaggggagggcagggccagtgaggtgtagccccctcctccgtgctgacctcctgtcctgacctccactcaccgccaggattctcttcaacttcctccgcctgctccctgggctcccactgtgggcctagaccccacccaaagatgggtgggaccagcctgatgctgagagaccgaggtcagacctctgttgcatccttgtccccctgtcccacccccaatcagggacaaaggatggatagaggagacccaccagtcctgcaccaaagccagccccctccgaattgtttccttgctctaaaggtggcgtgacctttgctcccgtaacctttgacttctggcctctgaaccctgtttttctgagaagagctctttccctgatgggcactggtctctgagtttccctttggtcaaatgcattctcattcctcactaagatgcttcctggacacctcctcctgggagccttccctgacctccccaggcaggggagcttaccaccctttgttagaaggacccatttacccatctgtctccttgcctggaccctggtgacgacttgttctgtatctctttagtctcaagcttcgtgctgggcaacatagtgagactcctgtctcttaaaaaaaaaaaaaagcccaagaaagagtccgcaccctttatgccaggcagtccttcccaggtccatgcctggggctgattcaacctgcctggtgccacgcacatagctctcactgagttggtgcttaataaatgcttgttgcattaatgcccagctgggccagaaactttgggtcctggaacctttctcctgagactctcctaaagcagaaaggctgagggtcccggtcaagcccagagtcctcagccccttcccttgccttttgcacaaattgcagtctgaggaggtggacttgggatgggggtcacagattccccccaaagtagggcgaggaggctgagcctgggactgccagactcttgctccctggtaccaggccatgatcctgaggccacagggcctgccctgctgtggaccccctgcttggtcaccacaccttcacctttcagcaggctcagaaccccctccttcttaccccacgacattcttgccctgcatggggcactctgaggagagatgaggtccagggacacagctgcgtcctgctcccgctgctgcatctctgctgatgctgctccccagtatctcagaacccttcagccttatgggcctggcccaggccctcctcctccgggaagttggccctgacttctgtttttttttttgagacggagtttcactcttgttgcccaggctggagtgcaatggcgcgatcttggctcaccgcaacctccgcctcctgggttcaagcgattctcctgcctcagcctcccgagtagctggaattacaggcctgcaccaccaagcccggctaattttgtgtatttttagtggagatggtgtttctccatgttggtcaggctgatctcgaactcccaccctcaggagatccgcccgcctcggcctcccaaagtgctgggattacaggcgtgagccactgcgcccagctggccctgacttcttaagggcccttgctcctctggcttacctcacgggaccaaggctacccaccctgcacatcctatccaaaatgcaaataccatgcaaacatggtatttgcctactctggtgccttccatggctcccagtgtccctaagatgaggccatgctctttagggacacccctgatttggctgctgcttttatctgtgccctcagcagctccaactatttctggatttacaagcctcatgcctagtaatctttgttcaggctgttctgtcttcctgaggtgtccagtccagcttcctcaccccttaagcctaagcatcacctcctccaggaagccgctctgggcagcacatttcacgaaggcaggaactggacccagagcctggcacacagaatatcctcaatatatagctgtggcaccaagatctgtcctgctcctgttgggagggtggtggtgtcagttcttctgcccccaaaatggaaggctgcaagccagcacaggacctctacccacaggaagtccctcctcaaaatcttccctcttttctcttcagcttccccaccaatatcagcactgacatggaatgtcagttttcccctctgtaaaatgggcgtgctaataagcttcaaatgagctaacagctctctccagaggtggctgattttgcctcaggcaaaatcagtgttatttttttccttttttcttattgatttatttgtttgtttgtttatttttgagacagggtctcactctgtcacccaggctggaatgcagtggcacagtctcagctcactgcagcctccacctcctgggctcaagcaatcctcccacctcagcctcctgagtagctgggactgtaggcgcacaccaccacgcctggctgccttttgtatttttggtagagatggggtttccccatgttggccaggctggtctcgaactcctgacctcaagagatctgcccacctcggcctcccaaagtgttgggattacaggcgtgagccctgcacctggcccaatgttatttttttaattttgttcctgcagctctcttcatcaccatatctttgttctgcttctcttgtgagttttccatggagaagttgatatgtcttgttccagcccctcccaaacccactcccagagtccatacaggaaggcagaggaacagggagctcaaggtggcaactgtaccagagttagcagcgttgtgaccttggtcagatcatgtaaccccctgcttcctcatctgtaaaatgggactagcaccacggttcacctggtcacctgcagttcagcactgatgggaggaacaaaaggacggcaggttatgaagtgcgcacttgggtggccaagtgctggcggatgggggttggggaactcctccctgatgctgcagcgcagggcagtggggacagcacaggaccaggctgcatcctgggccctctttccttagggcgggctctgttgtgaccttccctgtgacctgggcatttcccagtttctgcccctggaaatcagagccagggatctgggctggggaattttaggggcttggtgctggactattccctgaaacgtcccttgagcgcatgggtgcaggggacatatgggcctgacagtaggcacggatgacccacaccatagtggtgatgctagtgctcaggaggacagccccaaaaggtcactggggcagaatgtatggtgtgtgcaggacactgtggtcagggcaggaggtcacaatttaaccagagatctcttgagtcagccccaggagtggacctgggaaggactgcctggcatgaagggtggagattctttctttctttctttctttcttttttttgagacggagtcttgctctgtcgcccaggctggagtgcagtggcgccatcccagctcactgcaacctctgcctcccggctcaagcaattctccagcctcagcctccagagtagctagaactacaggcgcacgccaccacgcccagctaatttttgtattttagtagagatggggtttcaccatttggctaggcaggtctcaaactcctgacctcaagcgatccacccactttggcctcccaaagtgctgggattacaggtgtgagccaccatgcccagccgttttttgttttttttagagacaagagtcttgctatgttgcccagactggactcaaatacctggcttcaagcaatcctcccacctgagcctcccaagtagctgggactacaggcccacaccactgtgccctgcctgactttttaattggggtccacagggagggaagggaatagtctagagaggtagggtctcatgggctcactccccattttacagatgaagaagccacagagaggggaagcaacctgccttgtgtcacacaataagtgagtggcagagctgggactggaaaccaggactctgttgccactttggggtcctctcattcccagagcctcagcactctgtgtgataacatacttattaatgtaataatgacaatggtgagtgctatctgtgccaggcactggccttcacaggaatcattttattcttgacaagacatctgtgggagggattcctagtaccaccacttaaagaccaggatgctgaagcacagagaggttgccgtcaaggctgatgtgtcaaggtcacatagctagaaagtggcagagctgggatttgaaccaagtttgacttgactccagggctcatgctcttactattataaagtgtgtccctttctctgaaaccgctgtggtctccacaccgtaggaccagcagaccccgcaatggagagggaaaggagggtgccctgggaaggacttgtgcccagggtttgccctctggcaactggcctctggccaggtccccaagtcacaggagccatgatgccctggcctggatctatcaagttctgctcatgggtgggtaggtgggtggaggctgcttctaaacacagagagggagcagtcacattaaccatggagtttttccaccctgtatataccactttcctcagcttcttcagaagactccctcctagcccttgcagactcagtgaggtgctgcctccaccaggaagtcctccctgatgtcccctgatggcgctccagcctctggcccttggcaccgcgttgaacatttggggatggacagaccagcttcaggagccccagcttcaccacttgctcaccagctacctgcagcccccgcccccgtctgccctcctgtctgtaaaatgggaataagaagccctgcctcacaaaatctttgcaaggaggagcagcggcgtcctaggagcaagcacctggcgcccggtgagcccccgccactcgctccttctcctccttgtccttctcctggcttgctcccggttctctcctcgccacccccgccccgcgcctggcacggcgcccggcgcgccccagccgcccaatcccggctcgcagccctgacttcctgcccgccgggctccctcggcacgtgccccgcgccccatgggaccgcgcgccctcccggggcggcctccccgcggcctcccgcttgggggagccgggcttgggggagcgggtcgccccggctcggaggtggggtcggcgggggccgggcgggccggccgcggcggcgggaaggggacgctgcccctttaaggtgccaccgccgcgtggcagggaaacagcttgtgccagccccattccgcccggctccgttcgctacaagaaacacaatgcataacaatcaggcgcgcgcttggagccatgccacgcggcgggggcggggcggggccgcgcgccgggcggggcgggggctccggggtctcggcccccgacctgcgtcctgggcccgcaggggagtcctgccccatgctcccgggcggggccgccctgtgccccagcgaggtgccccggtgccccccgcctcgcccgcgcttgcccctccctccccgccatctcgctccctacaaagttcattcccactaactcttttccaggccacttccccctcacatctgacaatcggggcccctcattctcccagtaatcactccactgcactaattgcacatgcaaatatgcaaatgcgtattaattaattactatactaattagttctgtggtatttgcgagtaataaatcattggatgggagcgaggaagctggagacctggcccattttcattctgcataaaattttaatggtctctctggctgatccgggacggcagcgcgcggagaggctcttaaagggccagtggcggcgggaaggggcagcggtggggatcgccgttgaccccggcggggactggcaccctagaaggagttggagatgcggcctcacattctgcaggggccgtctccggcgtgcggtggcttctgcctccccctctggggctcagtgtcctccttagtggcttctaaggagagaacctgggcggggaccaggagctgaactaggattctttaagaaaggaaagaggtctaggagatgtgagaggccaatgccaaggctttggggccccaggtagcctgggagacaggaatgaagactccatctcctggatggctgagtaaactgaggcacaggacaggcaaatcttagctcccacccctcttctcccaaggggaaggaagctagaaggatgttctggttggccccagccttttcttatatctggtgggcgccacaaggttgggggtgcctccagctttccccttccacacgatcaaaccgctgccccgcccccatgggcaccagctggcaccctggcagagtagtcctgggcttgagtgggccctggggaccctgctttatttccaggaggtagtcaggacccgggcacagggagggggctggctgctttgcagggccattgactgggggaggcagacagaaccagttgtgctcatgccagggcgtaggaggatgccagaggtgggcaccttaaggaggtggggactgtgggcctgtcctgagccggtattccccgtgccagggtctctagtctggttctgctcagcctccaaccttctgccatcaacaagcccctggataaggcacagcctaaggagggtcagtgctctagtgggggccgatgataatgacagcaactaacaagactattaactcggcaaacatttatttagctggagaactgttcagcaagctctaggtgcctcacgaccccccagtgacacaagttctgttacagtctccgttttaaggatggagaaacaggggcacacgaaggttaagcaacctgctcaaggtcacccagctgtgagtagtggagtggagtttgaacccagacagtccagctgtgtgtgggttctttccagcacaccacctctccccaccaccatttctgcagctcctgctctgaaccacatcctttgctaagaacttcatgggcagtatcccatccaaaccttgcaacaacccagaaggtaggttctggaattatctccatgtggaacacaaggctcagagaggttgactaagctgctctggaacacacagggaagatgtagcaaggccaggctcacacctggcttgtgtgagggcagagtccaacagagtcctccaggccctctgatccctccccatctctgcccctgctgggatctctgcctcctggaagagcaagagggcgttgtggtagcccctgatgactagagaaatggaagggctttcagttagatggtagagagaacttgcttcttgaaaggtgggagctccaggggctggggtgggatggagccttttcttcctttcccagacaggccaaggaagggccttggctgtgtagtgggagatgggtggggatgggggtggaggggtgggggagaacagaagggcccagaatgataaagccttgtgaggaccacagaactcaggaatcctggctgggttttaaaaattttgtccctgataggccggacgcggtggctcccacctgtaatcccagcattttgggaggccaaggcgggcagatcacttgaggtcaggagttcgagaccagcctggccaacatggtgaaaccctgtgtctactaaaaatacaaaaattagccgggtgtggtggcgggcatctgtaatctcagctacttggaaggctgagtcaggagaattgcttgaacctgggaggcggaggttgcggtgagccaagatcactgccactgcactccagcttgggcgacaagagcaagactccatctcaaaaaaaaagaaaaaaaaatttgtccctgcattcctacctgccccccacccattgcccctggaaatgtcttgggcacccccacctcaagaattgctatttgggtttcctatttgggttttccaggagcttcggtctccagcagggggatgagaagataatactaagcaacactttgtaataaatcacttgtttttttaaactgtgtgcttatgagcatcaacttgcttagttttcataattctattgttatccccgttttataaatggagacaccgaggaaggaaagacaggttaaatgatgtggccaaggtcacacagctactaagtggtagaactgggacttgagcttctgagctggggtgcttcaccaccctgcacacgctgagccagattgacccccttgcccagcagtcagggatcatggtggcaggtggcctttcaccctgggtccctttggaacttgcagatgcaaggagaaagaacaggcctcaagcccgcagttcacatggcccctccccatgtgaattttcatggtgctgtttatatgctagcagaagctgggcaaagtgagtattcaggtggccctgatccctccacactggagcctcaggacgggtgggcactgggagctccagaacaggatgctatcccagcatctcttgccccctgccagcccacccttgagagcacagcagggtcagggagtcagtctattagcatctgtcagggggaccaccctgagacagaacactgggattcccatgatctcagggtccccttacctcctggtggctcagggggacttccccagggaatctggacaccctcatttccccaaaactagagaaacctttgacacccaccttctggacctgaaagtcgggtgggatatgggggttgtgggacttagggagggatggcccttgggctgcagcccattaggaaagaaaacccatccctgtctcagcactccactgaagaccagagaatcggggttcatcagggtccacacccctgcccccacccacctgccctgcaagatgcccagtttctgggtgaatgggagcaagttggagaggttgggggaagaaggcaggaagggcaggctggcggctctgagcttctccatgcagcccccggggccgggtgcctgggcaggaggacggggcagagcagctgctggcgatttattaagcagtcacggaaaaattggtttataaattaacagctgttttaactttagggcctcttcttcagggaatggaagcagccgactggaccgggattggagtgtgtgtaaggctggtggagggagtgggaggcggggggctccggcagctggcattcttcgggggcagcctcagctggcacctcggggggcaccaggcagtggccagagcagggggtctccaggtgccggggactgaggctacccctgctgtgggctgcagcttgctctcttctcaacttcccagctcccacctgggggcgccagagggcacatatactgctgtactcgtttgtgccaccagagggcagcctccgcacatcgatctctactgcttccgagaactgtccaaaccggcgggactgagagagagaaacctggtccagggcagagaaagagaggagcccactgcagtgcgtgcaagcgatcttccacgcgtccatcctgaatgtgttaaaagcagcagttaaagagggagggctctggagttggactgtttgcgtttgaacccagactctgggcaaaagctgctgaacctctctgaatctaatagcctcatctgtgaattggaaggatactagcgaggattaaatgagagtgcataggaagggcctagccccggtgcccagcacagaggctccatatgtgtcaccgttgtcaatttctgactcatgtattcatctattcattcacttctcaaaccatcctctcggcgtcatgcagtgcctgctgtattctgggtactgtggcaggtcggtgatgatgtaaacagagatggcggccagggacggtggctcaagcctgtaatcccaggcctttgggaggctgaggcggaaggatcacttgagcccaggagttcgagaccagcctgggcaacaaagtgagaccctgtctctacaaaaaacaataataaaaaaaacattagtcaggtgtggtggtgcacatctgtagttccagctacacagaaggctgaggcaggaggatcgtttgagcctaggaggtcgaggctgcagtgagccgtgatggcgccactgcactccagcctgggcaacagagcaagatcctgtctccaaaaaaaaaaaaaaaaaaaaaaaaaggtgagaaagacacgtatcaaaatagtgtgctaagagttacgatacacccaatgaggggagaagggagattgacttggatggggcaaaaacgaacgttctggggtgacagaaacattatatatctgtattgtggtggtcaaatgctatataaatttccaaaaactcattgaaatgtatatttaacactttattgtaggcaaactgtaactcaacaaagctgatttgaaaaaaagcacctaagcacccaatgtgaatttactgaatgggcaaagggatggacgatgggtgaatgaatgaatgagtgcatgtgtaaatgagtgtctcagatggttgtccacctgtcttggtgccaccactgctcctactgagggtgtccttgccctctcctctcgggtacacgggtttccccagagaggtgggtcttggaattcctcttcctcccgcgtccccccttctcccttcccccaagggcagggaaagacaccccagtgctcccagccagcactccccggctcctctaagggtgtttcctgggacttccggggcctcccttccagctgccacatgccaacccagccggctccggctcagctctgtggtgccaaggtcacgggtgtgatgcccaactccagacccacagtgcctgcagcagccacccaaaccctggccgactccgccacctgccggctctttctggaagcgcatcccgagagctctaagcgggaacctcggtcaagggctatcaggaaccctgccctggcgggggctttatttttcttcctattgaatagtcacagccaccatgtgaggtgggctctgaagcataaggaaactgaggcacagagagtagctaagaaatgtgtccaatttcacacagtaaattacagatctgaaattctacccagggctgggacttcccagttgatgttctgtccaggtaaacacatcttgcttgggaggagggagggacagatcccagtgtcccttctccccccatccggggaagagggcaaaggcctcacaccaccctcccagattttccctccaaaggtgaatgcagggcctcctgcacgccaggccccgcggcaggcatccagcaatggcgtgaagatacatgatgggaaagaaacgcctcaaaatagtgtgctcagacctatggtacattaatagacaccctaccgtcaactttttctgtcagtccaagcagagagacccacagttcaatcagagttacgtcaaatgaggtcttgaatttgttccttggacccaaccgcctgtgcttctaacccaagaataataaccaaggagtggcatattatttttacatcttatttgcatatgattaattctaagtcaaagtgaatgcagggcaccctggccccttgcttctcagtgccctcccacccccaccctgtgcctggtcctagccatctcccccagcccctgccggactccactgtccccagcagcccctccccactccttgcccctgcccacccctcctccagctctcaggagtcccattcccttcctcctctgtcgcccacacagcccccaccacctggccgcccacctgaaaaacttttccccaagttcttgagaagtcgcgtaggatccaggagagaaaaatcaaagtaataaaacctcatttaattcctaacggagggcagagctgcgagctgcaattatcttaatgctgagctatttttactctctctccatctctgtcttctgcctttctctgttgtgaggttcgctgtctctctctctgcctccctttgtctctccatctctcaaccatgttttctgtctctctttgctttctcctctctccccccaatctctctctcacgtcctgtctctgtgcagtctcttcctcctccttcatgtctgtccctctgtcagccagtcttccccacccttcttggccccaggatttagatgccagcctggccacaggctgggggagatgggcaaaaaccctccctccgctcccaaagacctcatcttccaggcctagctgagagggaggcttctctgccctcatctcccttctcagctgccccagcctgggatccggggaatgtttcctgatctggggtctcccagagctccaataagttcagcagagcctccgtaaataagccctcctgctcaaatggggctcagctgccatgttccctgaggccttttcagctcctatgggctctgaggtgcaactggtgctgatgcctccctgtctccaccctctcatcaccctcccagctatcctctgtccccttcatccccacgatccttccccacactgccagcactggaagccacaagccccttccccacctctgcccacccagtggctgtccgggccactgcctgggccatgcccttcccataccccttcttcctttcaggacctccttatttaccctccgaaggcactgccaaacaggtctttgccactccccaccacaccccatcttcgacagaggttctgggccaagcctaggggctgccagagatgcctacacccctgggccaacaacttatcatccagctgtttcccaacaagtatataagtcaacaaacatacagggacttgagccaggcctggggtgggctgatgtggagctggatggccaggacatcccactcctatgagcaacactctggacctcctgccaccctttccctcacccccagagtgggccctgaccccaattccagaagattcctctggcctttcactccacccaggacccagatgctggggctgggagtggaaaagctgcaggaggattgggggtttcaggcctgagagtgaccaggagagaggacgccaacacaaacagagccccaggaaaacatgcatgtacacgtctacacacaccctctcagtgctagacagaagcattcagaccctctgcacagctccaaggagggaaacagcagctcctgcaaaggcacccaaggcccggacaaatagaccaaatagacagggacattccacccacagggccagctcctcccgctcccgctccagagacacacacaaatacctctggagagagagaggctcacacctgtctcccccaaccctgcttctgaatgcaccaaattcatgcacgtgatggcacgtgtacaggcagcccccaaacccaccccaactctgggccggccctgtcctccccaccccattagatccggagaggaaagacaggagccacgtgaatctacagtacatcatggcagggcacattccccttctccctcacaggagcgctcacacatccacaacctcataccccagcaactgcacagcggagctgtggatacagtcccccaccccctgcaagctggcacacgcctgcccatcaccttgacagcctctgacatcctcccccacacccacaccctcccccgcacacacgcagtcctcccacaccctgccactcacacctgcatctttgacactctgacacacttacacagacacactcacaccacaccggaccccccaaaacacactccctggctatgggcaccacagggccccggcacacccctgcacactctccctgccacgatgactgacacgtgtcctcccacacacaactcggtcacactcgctccctttccaggacacccccattcacagcgtgacaggctggtactctccccacgacctcgcaggcctctctgaaactcccagtaccaggaccacgaaggggttaaagccagagtcctgcctccccgctgcccctctccccctccctccccctttatcctctctgctggactccatcaataatgcagcttcaagttctggggagaccgcagggggccccccagctggctccccaggccttggctctaactcccaccctcctcccagccccaggagaacacgattctccatgctcattggccagtttcccctaaaccctccctccgagcacccgggcgccagtcccaggcggaggggacgggctggggaccccaaagctgggaccggagggtgagcccggcagaggcagagacacacgcggagaggaggagaggctgagggagggaggtggagaaggacgggagaggcagagagaggagacacgcagagacactcaggaggggagagacaccgagacgcagagacactcaggaggggagagacaccgagacgcagagacacccaggccggggagcgcgagggagcgaggcacagacctggctcagcgagcgcggggggcgagccccgagtcccgagagcctgggggcgcgcccagcccgggcgccgaccctcctcccgctcccgcgccctcccctcggcgggcacggtatttttatccgtgcgcgaacagccctcctcctcctctcgccgcacagcccgccgcctgcgcgggggagcccagcacagaccgccgccgggaccccgagtcgcgcaccccagccccaccgcccaccccgcgcgccatggaccccaaggaccgcaagaagatccagttctcggtgcccgcgccccctagccagctcgacccccgccaggtggagatggtaaggggcccgtgccccaccccggcagcgtacccgacacaccccgcggggcttcttcgccctcccaaggcgctgccccggccggactggcctgggggtgggggcgcaaggagagccgggctctgcctcggtcaggacggggcgcggggccgcgtgtgaagttagctggagactcgtgcaacttttccccgcggctttggtcctgatcccggggcaagagagttcctggcagtgaggctgggggtgcgggggtggggggacaggccgattccagaccgcccaggagtggggtgggggcgtcctttggtcccagcacagtccccaaagggtagtcagtctcctaggctaccaccgggaccgctccgcctggctctgtcccagagctggtcagatgtgagcagcggtggacactgaccttgtcacccagggcaggagtatgaggctgccaccgggtgaatccactaccctgcccctctctaatcccgcgtgtgtgcctgggctggggtctccagaacctggctctggcctcctgctgtcaggccccagagccccaaccccaaggagggagaggtggggagtcatcacaaagccagacctcttcccacagactactgagtcctcctgagggccttcttgggggttgaggggcttccaaaggctggcgggtgctgtgacagagagctccacttcccatccctagtggagcaggggtcacttgttgctgagctgagatgcagctggctccccactgagcagtgatgagggggccaagtcattatggggggagatagagggcagggggtacagtcctgggcctaagcagctttgggtcatgagggtgtcatggggagcttggctggggaggtggcagtttcagcttaactcacctggttctctttgtgcatttccctggagctcaacagggacctaattaactgacagttggtctgattgccaagctgaggggcggggcggggaggggggcggtcagttgctgcttggctcacgtagcaaggagggcaacttttcatttctcacaaggactgggtgaagagttctgcagccttacagagactggaaaagaagcccaaaccaaggcccccagagaggtcccccaggcccctttgggtccctgagcctcagctggaggtggggggtgcctgcagtgcgctggctcagtctccttctgaaaagctggatccagcttgtttgaagcccttgagctgatcttaggtgggcagggccacatgggtgccatggcccgtggggcatcttccccagagggcccagccgtggcagctggagctgtagccagctttggcttccgaggtctgatgttttcagaaactggagagaggaagggccttggtgggagaagataggaagggagatgtctgttctggagtagccatggagtgggacaggcatgggctgggagtcagtgactggggtttttctcgtcctttggacttgttgtgctgtgtggccttaagcacattgccaaatctctctgagccctgctttttcacctctgtaaaatgagggggttaggtgagctacagagttccttttggctctgacagactttgattcaaaggttccctggggactccaaagcactgtttgttccctgctgcctgggggtgggggagggctgcaggtgtccatccagtcacccctccctccatctccttagatccggcgcaggagaccaacgcctgccatgctgttccggctctcagagcactcctcaccaggtaggcccctccctgcccacttagccctggccccaccctagctctgatgccttcctaggggccctgccaaagtcccatgaacaggagtcaaagctggagactggggagtggataaggtctgggaacccaactctattggctttatttattgacatgacacctcccagccgcaggagggagagggcacactttccctgtccccagagattgagaccctggggaaaataactcggattctttctctctctccctcttctcttttcctcctcgcttggttctggttcggttggctttggtggccttcctcagaggaggaagcctccccccaccaggtgagtttcctggggcagctggaaggagggatgcctgggccccttggggtggggtggacgggtgcctgcagtgacaaccaaccagtatggggtgccacccaagaggacacattagcatatcaatgggcagtcctctgagagtgcctcatgccagggtgccaccagcagatcctcctctgctcagactcagggtggaacctcctggacctagagtcctgccctgaaccaggccatggcttatggggggccccccctaaagccacagggtggggaggctcagcctaggtgcaggacccattagcagtggctaaatcagtctgcttgggtggccatgggtgggatggaatggagggatggtgaaggcaagggcctctgctgagcccctttaacctggcacttcccctggcagagagcctcaggagaggggcaccatctcaagtcgaagagacccaacccctgtgcctacacaccaccttcgctgaaaggtactatacccccaccgaccttcctggctgtccgcctgatccctggaactgggcagacgctaggggagcttttgtcagtggggagggattgtttcgccacacatagcccgctgtcagcgtggcgcaacaacccaacgtaaagaccaattttttctcagtctggccttgcaaaacacaggagtcccgaggctgcaatgggcagctatgggccttaacatcgggttgtgggcttgaaagaaaagagatggctggcctaagacaaccagcaggcatccgcgtggaagggactccacctgcagctcctcttcaccagcctgtggtggaccacctcccacccctgctcatccagggcgccttctcctgtgggcttcacccctggcctcccctcccatttgcatcccatttgcacagatctgcacactggtctcctctttcctgcttccctttctccatggaaaagcaagccattccttttgcacacttactcaacacctagtatatgccaggccaagttggtgggcattgggcagaataagatgagtcagatttggtccctgcccccttggggctctttgcctcaaagggtcagggaggggccaagtaaggtggctcacacctgaaatcccagcactttgggaggccaaggcgggaggactgcttgagcctaggagttcgagaccagcttgggcaatacagtgagacccccatctctatgaaaaatttacaaagtgagctaagcgggccgggcgcagtgactcacgcctgtaatcccagcactttgggaggccgaggcgggcagatcacctgaggtcaggagtttgagaccagcctgaccaacatggagaaatcctgtctctattaaaaatacaaaattagccaggcgtggtagcgcatgcctgtcatctcagctactcaggaggctgaggcaggagaatcacttgaacccgggaggcagaggttgtggtgagctgagatcgcaccattgcactccagtctgggcaaaaagagcaaaactctgtctcaagaaaaaaaaaaaagtgagctaagcatagaggtgcacacctatagtcccagatacttgggaggctaaggcacaaggattgcttgagcccagaagtttgaggctgcagtgagctatgatcgcaccactgtgctccagtctgggctacagagtgagagcctgtctcgggaaaaaataaaaaaagaaaagggtcaaggaaggtacacaaagatgtttaagcttggatttgaaggatcataggaatttaacaggcaggcaagggcatcccaggtccaagaagagggaagaaggtgtgcaaagagaaagagatgcgagtcagagggggacttctgggccaacctggaggaggcttcgtttctagtcagggagctggggagatatacctgaaggacataggagggcctcttcctgactaagccctgttgcctaccaaccccccacctcaactcctgcctggggctcttcctgcccggccagccccctccgctcctgcggaggttgggagggagagctaccggaagagtatgctgggaagtggttcgggggagggtttaataagttcccagcaccagccaaggtcaacaggtatacctgtcagcccacttgccagggttgggaacagagaggagaggctgggaagggaggagagaagggaaggggttattttgctttccccaggacaggaaaatgaagggtcagagctgcagcaagtgggcagtgtggctcagcacctggaaggacctccccacctagaggggtgtgtggaagggccccaaagcaggcatgagggacagagtgtcatcttctcaggagagaatttaagaaatccctctccctcccaccttgggctgggtagggagaggctgggtggatgtgaggggaagacctggctcttgactgcaagcatgggcgaacaggccaggatgaagatgttagggccagggtgctaccatgcaccgtgcagtggtcaaaattgtgcaccccctcaactgcccctttaggccacatcttaggagagtccaggtgagtagaggcagggaagaggaaagggatcaggagaggggtggccagtctggggcaaggctggggaccttccaactgaagaaggaagacttgtggtggggggagtttggggccccacagagtggggcagagaaggagacagcctggaaggagtgatggggagaccccagagagcccaggaggcatgagggaggtgggggaagcgagggaggctcacggggcaccagcgcaagcaccgcacacaccttctgttgtcactgtggctcacgaagtgaactctcctcccccgctgggggagaaggaagctgcctgggctgccacctgctctcctgccttacctccccccacagccctcatggatccttctctaccaggagggcactgttttgtaggcttcagtccttttgtgggcaagggaaggtgcccggcagggttggggcttgtcagggaagaatcgagggccctagagagaggggcacagcactaagtcttagcttgaggggttgtgctccaaggctggagctctcacacttggctcaagatgaagctctgccgcgtccccaaggtcagggtagggtgatttattgtgcttttattgcctggatagcttgcccagagccagcaggaggtactgggctgggagctgggggctgggtggggcagcgggcacatacaaagcaccctctgtgcctgtccccgagttggcaggagcatagcaccctgctcactgtgccggaggtttccagcctggccctacccctctgggccttctgaggggaggggccactggcagaccaagaaggaactgcagcaactccccattccccacccccagcccctcctcagcatcttgtctgtggcctgtgaactttgtgtcgcatatgttctaagatcctgccagctcctgcagcctctcctcagtggcccctcaacctctgccatcccccagaacccctggccttggcccctttctctaaccccttgctcctttccatcttttggaaacttgtctccagctgcccacactgttcccttcccagccctatctgagcaggtctttggaggctgggggggttgctttctaggtcaccgcagagggagctgggaacctggggatgtgggtcaagattgtgggggccgcatctgagcatgccgcatcccccggcacagactgcactggctgcagactattatgtcctcagcctcggaattgttctgtcccttggagcccggggcaggagtatgtggattggcatctatgactgggcagtgccagggagtggggactatgcatcgcatgggaggtaggatcagggtaagcagtgagccctcagcaggctgggcacccccaagaaatggaaagtggcaaatccccaggccctggttcctacgccctgtgccttctgcctgggcttgaagctgggagacactgtctcccgtactgggtacttggaaaatcaagctctccagccagggaatgttaagctgctgctgtgcccgcctggtcttgcccagcctagtgccctatggtgtgggggagctgcctgggggctagcatcttaggacagcttaagagccaaacatgatcaaatctacccctggctgcctctgccctggtctgacacccatcaggctgacctgtcaactttggcctttgaacttgggcccctgagggggtattctctgccccaggcctacgggaaggaggctgggggctaggccacaggctatctccagatccatgggctgtgtctagctgacccttgctttcctcggtctcctctgtgccagctgtgcagcgcattgctgagtctcacctgcagtctatcagcaatttgaatgagaaccaggcctcagaggaggaggatgagctgggggagcttcgggagctgggttatccaagagaggaagatgaggaggaagaggaggatgatgaagaagaggaagaagaagaggacagccaggctgaagtcctgaaggtcatcaggcagtctggtaagctgaggggcctgtgacatgtggattagctgtgggtcctccttgagtatacgaggacgtccccttctagttcagtgtctcatacacgcaaactgtagtgacaccacaggggcctccctgtcttctcgctccatggggtgccccgaactcagccctacctgagacatgggtttcctccatccttggctcagtccctctcccaatcaggttttccctaataattcctctcttccctgagaattaaggccaaggccgtttggggtttgaggctagagccaaaagaggacttcccacctatggcagtaagggggcgtgaggacattcagggatggaggaccaggagagtccaacacccctgtcacctgcatttcacctacatttttgaacctaggatgtggtctctgctggggtgcagagggctgcctcatttacttgccctctccaggactgttgtctgtttctcctctttttccttcctaggatggagtgggagggtgccctctagtgtttagatgtagaatttaaaattcaagaaccagcccggcccattaacctttttagtctcattatttatgggaatactgaagagtcaaccacccctactagaagctgtcagctcttccacacaaacaaaaggccttgggcctcctgcctgcatatctggcagtgaagagattggccatgggggcaaaagctgttgctgggcttcagtccctttgtgggcaagagacagctggaagacctgaatcagtcctcactgagacccctccaaaacagtggaagaggggtgagaggagactgttccctcaggaaaagcagcaggtggctgggtgcggtggctcatgcctgtaattccagcactttgggatgccaaggctagcggatcacttgaggtctggagttcaagaccagtccagccaacatggtgaaaccccatctgtaataaaaatacaaaaattagccaggcacagtggcacacacctgtaatcccagctgcttgggaggctgaggcagaagaatcccctgaacctgggaggtggaagttgcagtgagctgagatcgcaccactgcactccagcctgggcaacagagtgagactccatctcaaaaacaaaaacaaaaaaccaaaacaaaacaacaaaaaaaaacaaacaaacaaaaaatgcagaagggcaccgggtcaaatgatagtcctatgatggagcaatataaaccaccacgactcctagtggctcctgggtgctggcgctgggctgggcagggtattcactattacatcttgtttaaggtaatctacacaatttccccctttctatttccttcagaaaggtactaactgacttacgtaagccatatggctagttgctgggagagctgttctagcccagttctctctccatgcttccatgatgcccctggaaagcttaacctcagccatcagacacttagctcacactccaggacagccggatggatacgcagagcctgtgttcttatctcttctttcccatccccagctgggcaaaagacaacctgtggccagggtctggaagggccctgggagcgcccaccccctctggatgagtccgagagagatggaggctctgaggaccaagtggaagacccagcactaagtggtaaggcttgggagtgtgaaatggggaggaggggctgggatcttggtgggtggggccaggccctgagtccctctctgcttgcctttcagagcctggggaggaacctcagcgcccttccccctctgagcctggcacataggcacccagcctgcatctcccaggaggaagtggaggggacatcgctgttccccagaaacccactctatcctcaccctgttttgtgctcttcccctcgcctgctagggctgcggcttctgacttctagaagactaaggctggtctgtgtttgcttgtttgcccacctttggctgatacccagagaacctgggcacttgctgcctgatgcccacccctgccagtcattcctccattcacccagcgggaggtgggatgtgagacagcccacattggaaaatccagaaaaccgggaacagggatttgcccttcacaattctactccccagatcctctcccctggacacaggagacccacagggcaggaccctaagatctggggaaaggaggtcctgagaaccttgaggtacccttagatccttttctacccactttcctatggaggattccaagtcaccacttctctcaccggcttctaccagggtccaggactaaggcgtttttctccatagcctcaacattttgggaatcttcccttaatcacccttgctcctcctgggtgcctggaagatggactggcagagacctctttgttgcgttttgtgctttgatgccaggaatgccgcctagtttatgtccccggtggggcacacagcggggggcgccaggttttccttgtcccccagctgctctgcccctttccccttcttccctgactccaggcctgaacccctcccgtgctgtaataaatctttgtaaataactgctgagactcctctttcaggggaagcaggaggaaaagggaggtaatggggcgtcctgatagggaaggccggtggtcaaccaagggttagggttttgaccctactgtccaatcctctagtctaggagtctttctggcagacagcaggctcggggcactcagaggaagaactacagaagttctagctgctgcttgggatggctgaaggaggcaggtggggtggggaagtccttctcgaataactggattcctccaaagatttccccatccccacaggactcccctcgggaaattcccctttttccctcagtgccaggcctgtgtggcctaataacgacggccctggtcttcttcccactcccctacccttaggtaggcccttagactccggcctttgagtccgcttctgcgcagggccggggctggaggcggggcgaaggggcggggccgcaggcgaacgcaagtcccgcttcgctctcgggggcggactcagcggcggaagtggcgctgccggaagatcttcttccgctctgaggcgctactgaggccgcggagccggactgcggttggggcgggaagagccggggccgtggctgacatggagcaggtgggtcccggagcggtcgctgggagcgggtggcgtgcgagggccgtcttccgccggtcgaacccgcttcgccgcccgctgtccgtgctgggttccgtccgacccttcccacacccgctgcgtctcaggttccgcccccttcctctgtctggcctcgcgccgccccgcgcgggttggggtctccagcaatgactcttggcgaccccgcctatcctggggagcccggggaggacgttcgggatctccttccaaagcctccgtcttaactgaggggagaggagagggtgaggtgtctgggtgttatgagcaggggcaggtatggggaggggtcggaatctggggtgagaggaaaacatctacgcattccggtagctctgcgtctcagtgtcatcccgtgtctccccaacttcctttcgaaacggccgtgaataacttcctaattggtattaaaagggccctttgaagtcttgagttcttagaggtgcatagtaccattgacactcatttctaatgacacgttccctcaccccgcatttttgggttagtcaatgtctcctggttttcttcgtaccgctctgacagtcggtcaaagtcccgcttcacgttttcctctgtcgcccaacccctcgctctgtacactgaatctcagtggtcttattttcccccacggcttcagctttacaccaactaaatacccagatccacatcttcagcgcagcccttccctggagctccacgcttgcccatccagcggccattgggacagctctgcttcacatggagctcactgggtccaaacttgaactggtcttttccttgcagattaattcttcctctaccccaacccagccggaagtctggtaatttccttacactttctcctctctttcaagtcccacatcttaaaagtgacctagtactgccaacttcctgaacatccttcaaacctgggccagctccatctcttctgttaccacgctgttgatgtattgtcaattcccaacagtccagccctggcagcttgcaacccagtctccaaactgtaactcttgtgatccttttagaacacaagtcttacggtgccagttccttgctgataacctttttctggctttctattgcctatgtgctgaacccctagcacaatttacacagctctctgtgatctgacctagcagtctcctgtgtgcaccctaaggtccaataatacggcactgcagcatgcgccatgcctacccttgctgttcgtatcttcatgactttgcacacaccagcccccgctgcttggaaacctcctccttctcttgtctgctgggctaccttctacatgtttttcagcgcaggcagcgctgcctccgcctaacccccaaggttaattgcccttctgtgtcctgtagcaccctgtccataatagcatagtagctgagaatacagactcctggatcagactgcctgggttctgacctgtttggtaaccttgatgaagtcagtgcctcaatttcctcacttgtaaaatggaggtaggaatgtctctacttcatagagttgtgaggattgaatggaatattgtatgtttaggtcttaaaccagtgctaggcacaagaatgctcaataaattaaagtgagttgcctgggtgcagtggctcatgcattaatcctagtactttgggaggcaaggcaggatgatcgcttgaggccaggggtttgcaactagcttgggcaacatagtgagaccccatcgctacaaaaatttaaaaaactagctgagcatggtggtacgtgtgggaggatcctttgagcccaggaatttgaagttacaacgagatatggttgtgccactgcactctagtgtgagggacagagtgagatcctgtttctaaaataaataaataaaaagttattactattatgtaaggacaacatagttcaccagttatgatttttaatttcataagttgcctgaggatggttgaagtggcttactagtcattggatagagcctggctctttgccaataaataaaatgctggagtggaggacactgggggcagggtctggatttattgagtgaagattcaagagtgaaaaaggctcagacctggtctgctcaggaaaaccagtctggaagtgtgtgtgtgttacatggcaagcattaaatctagagaaatgtatagatctgggaactagagggagaaaaagaccaggggcggcttctgaggagctgacagttaatggggcctataaagcgatgggaggattttatcagagggaggcagaggctggagtgggctcagagatcagaaagctgggtcctctgaacagagctccagtagatggtggctgggtgggggaacaggggagacggagctgaggaagacagaggcagcgtcctttgctgacgctggcaattcctttcctgtattggccatgaggaagcatcccttgacttgggagccagcagggaccatgcctgggggcaactatgctccggaggcctagtacctggtgtttgggaccaggccccctgggtagggccattgtgcatgcctttgggctgggccttctttggagctcttttgcctccctgtaatgcccaccctccttgcctccagctgatagatgctgactcttcaaggccagggtcagatggcccctcctccctgtggcttttctgacttcactcattccagcctgggtcagatgatcccttctctgggagcccacggtcctttgttcattcctccctgaaagcgctgatcacagcatggtattatttatctgccagtcttcctcaccagacccagagtccctgatggaccagaacagggtcctgtggccccaggacttgcactgtgtccagcatactgtaggcccttggaacccgcatgttgcattaagttgagctctcacacagctagacttgttaagggagagcggtgcgggggagataaaaaatccggcacatctggcagcttgtgcctgttccactgaatgcgagagcctgttggctccactttacagatgaggaagctgaggttcaggggaggtaaggtcaagatcactcagcagggatttaaagagctgtctcctgactccaggtctgcatgtctcccagaaactgccttggggtcccagcctccaagggggcaggtgccacatcagtgggacaaaagaaaagtgtccctttttctggctgaggagaggctaatcctggctttgtccaggcagggttggtgcctggaggatcctgtgctgaaaccggctcccttccatccccccaacccccccaccccttgtcccttgccctatgggggccttttcttgagagggctgagatctctcctggaagatgactagccgtttccagactaaccttgggaacttgacctcactggtttacatagcagcacgaagagggcaggtggggcctgattcactggccctgagtgggtcaggggtcatggaatcacagaactgggggcatccctgatgattcacagggcctggcacaagggggaagggagggcaagtagatctcagtgtgttagggtcttcctgtacactgcacccgcagagcctccccggctggggggagaagtgtgtggtggtgagtcttgtttctatttggcttaactcttccccttccgcttcctcagaaggaaaggagaaacagagccaggctttggctttgggtcttatttgtcactgtagctgtgtcctcctctccctacactcccacttctccaggggatttcccaaaccctctgtggagggctatagtagggccagtcagccaaccatcccgaggctgatggcatgggccagtaaccctgaatgtgccatcctagccaggcgcagtggtgcacacctgtaggctcaactacttgggaacctactcccaagtttttgactccaggattgatgtccaaccccaaacccacaccctttctcctgttccagggtggacattacggatccacagactagctaacttactagacatgtaccgtggccaggcactgtggctgtgacttggacctcaagggcttaggacagatggccttgaaacatctagctgtgataagggaaatgctgacccagagttacttgggaggctgaggcaggattgcttgagcccaggagtttgagaccacagtgtcctatgatcgcgcctgtgaacagccactgcactccagtctggcaacatagtgagacctgtctcttaaaaaaaaaaaaagtgtcattctgggtcagccccctgaagccagggtctacccttccattctgcagtactgctgggactctcagtttgggcaaagtgctatgctggacctgcctggccagggtcctgcctctaacactgtccccatgggtaatagtagtaatagctgctattaattaagcacagacactgtgcatgtgttgtttctaatcccttcaagctctgtgaagtaggtactatattctccccattttacagaaaaggagactgaagttcagagaaacccagtgatttggtcaagggcacacaatctaataaggaatggccttaggtttttgcctccaggactggtgtccaaccccaaacccacacccttttccctgttccagggtggacattatggatccacaggctaacttactagacatgtatcatggccaggcactgtgactgtgacttggacctcaagggcttgggacagatggcctcgagacatctagctgtgataagggaagtgctgacccagagttctgaaaggtcaggggagtctggagggtgaggagaagctctgccccggaggtgacatttgaactagtctctgaagcgccagagttctccccaaaggaaggaggtcattcaagaatgaggaaacagggcgcccaggcgatgggctgtggtgtgtcctgggagcagccaatgatcagcagagtagaggcagcgagtgttgacccccatagcaaaaaatgagtgctggggtctggagtcctccctcctccttaaccctcctctgttatcaaagactcaaggttaactcaccttacgtcttctccctacaagtcaggctcagggaggggagcagataccctgcttgaggacccccaggaaaccagttcctctttccttcttgtggagggagtgcctgggctctgggcagggaagacccccacagagggtggagtccagctccaggagaggcagcctgggcagggaggggctgctctcccggctgggcgtgagtgtccatgtgcacttgtgcatgtgctgctgtagggaagggtgtaaatggccgttcagtgcatttcctggaaacccactctgagcctggtacagttctggcactgggcatgcagcagggagcaaagcacaggaagtccttactttcatggagttcgcatgccagtgggagacgatgggcagtaaacacagaccagtgaatgtatcatatgtcaggggtgacaagtgctgtgaagaaaaatacagcagggtaagggatggagggtgggggctaaatagaggttcaggaatggtctctacaaagggacatttgcatagggacctcattggaatgagagagcaagtcatgcaaagacctggggaggagctcccgacagagcagcaggtgcaagggccctggggtaggagcatgcttgatgtgtccgtggacagcgagggaccagtgtggctggagtagagggctcaaggggaagaggaaaggggaagaggaggacttgtaggctagggtggggacttacgcctttattctggggaagccattggaggttggggcactggggagatgtgatctggcttttaacaggatccctgtggctgctgtgttgagaacaggctgaaggggtgaagacaagaaagagtggcaggtagaggtgatagcctggacagggtgacatagtggtaggtgagcagtgggcagatactggccagattttgcaggaagagacaacaggatttgctcatggtttggatgtggaagggaggtgtgaccagatgaatgctaagcccaaagagggcctcttgacacactgtcccccagctagcaaggactcttgcaggcagcagcatttgtacttagaaggtcccagcctgtcatgggggaaggtcatgttcctctggggtcggctccgctctgcctcttcctggctaggggactgtgggcagctctccttcccatgagtcatcactacagcttctgggaaggggtgtgatgcattaaggagatggtgtctgcatggtgccaccgcaggccatggccagctggatctgtgtcttctgcaccagcccatctggatgcagtgcaacctgtctggtctgctatcctgcgttcccctaactggcaccctcctgggccagccagcagcaggacatagaccaaggccaacctcctccacacccagggcctctgccttctaccctctgtggagtctccattaacttggcattgacagggctgcttgactcaaaacaaccccagccctgccctgaagccatctcgccagtcagtcagagctcaagactctctctttctctggagaagagcaggaaagtaatcccagctaaccctcatgcagccaccactctgtgtcagaatctcttctaggccattgcattgaataagtcatttaatccatataaacctgcaaggagtaggtgatattgttaaccccattttataggcgaggaaactgaggcatggtgaggttaagtgaccagcaaggtggaaatctgaggtttgacccatctcctggtgtggagtccagttctctcagcttcactgatccttcctgatttgtgctgagttagggaccccttgggaagcccccatgggcagggggtgctggtgctagcatttcctgtggattatgggagggggatgtgtggaggacctgtgtctactgttcctctagcctctgggggatttggagaacccactctgcccagagatgtaagtcatctttggatatagatgagacttgttccccctccccctgaatcccagggcacagctctatggaataagctctagctggaacttgtaaagtttggcccagccctccctgggaggctaggaggtggggaagagccaggagactcgaagtggtggtggtagttaatgtctatgtggttagacgttaaccagttactctgtggtgccaggcactgtcctaggcacgctatagttatcattgtctcctttggtgcccccagacagcccagggtcaagacaggtagcctcagtttacagatgcagcagtggaggcttgcacaatgagtaggtggctttgttcaaatcacagacctaggccaggtataaaagcctaagtgtggtgtaattccagcactttgggaggccaaggcggggagattgcttgagtccaggagtttgacaccagcctgggcaacatagtgagaccctgtctctacaaaaaaaaaaaaaaaagaagaagaaaagaaaagaaaaattagcctggcatggtggcatctgcctgtagtcccagctactcaggaggctgaggcaggaagatcacttgagccagggaatgtttgaggctgcaatgagctgtaatcacaccactgcactccagcatgggcgacagagtctcaaaaaaaaaaaaaaaaatcgcagacttgccttggctaggaaacgcctactgagagctgccgtcggtcagctgggctttggagccgcctccctgaagaaaggtgtctggagcttctggcctggggtatgacgaagggctagcaaggaaccctgtctgtggctctgcagcctgagatttgtggaaattgaaaattggaggtgggtgagtgggaggcggcttagccatcctgctgtcctcctcttctgtctgcgggaaggggcagccgatgctgttccctgggtgggagcttgcaattgcagaggggccggtctcaagaggaaggagtagagatcagcccctgcactcccctaagagcctctgccaggagccaggacagtcctctacttcctgcccctcccccaacctggaattcacctctgcctgcagctggataacctggcctttctatagatgaaggaaccaggctagagggttagggagcttgctctgagccacacagcaggtgaattgtagagttcagatttgaacccacgccttttggggtgatttttattacatgtcactatagtgtatttaacctccctcgctcacaatttccctcttacttgaaaggtttttgttttgttttgtttttttgagacagagtctcactgtgtcacccgggcgggggtgcaatggtgtgatctcggctcactgcaacctccgcttcccgggttcaaatgattctcctgcctcatactcccaagtagctgcgattacaggcacacgccaccatgcctggctaatttttttgtatgtttagtagagacgaggtttcagcatgttggccaggctggcctcaaactcctgacctcaagggatcctcccacctcagcctcccaaagggctgagccactgctcctagccccatcttacccgaaaagtcttgccagctacttaatctatctcaaccaccactgaccaagcggttaccatactccctcctgacacctacctcaacacccatccctgtgacatagggattcttgccttttttttttttttttttttttttttttgagatggagtctcactctgtcacccagactggaatgcagtggcgggatcttggctcactgcaaccttcgcccctcaggttcaatcaatcctcccacctcagcctcccaagtagttgggactacaggtgcacaccaccacacccggctattttttgtaattttagtagagacagggttttgccatgttggccaggctggtctcaaactcctgacctcaggtgatcacctgcctcagcctcccaaagtgctgagattataggtgtgagccaccgtgtctggcttcttgccttttcttgtcatggtaaaatatacataacataaaacttaccattttaaccttttgtttgttgttttttgttttgagacagggtttctctctgtcacccaggcttgagtgcagtggcacagtctcagcccactgcaacctccacctccccggctcaagtgatccttcctcctcaggctcctgagtagctgggactgcaggtgtgtgttaccacgcctggcaaatttttgtattttttgtagagacggggctttgttgtgttgcccagactgttcttgaactcctgagctcaagcagtccttcctccttggcctcccaaagtgctgggattacaggcctgagctaccacacccagcctattgttgcctgttttaatgcagctgaggaaactgagtctcagaagggttatgctttgccccagagcacacagctaggaaggggacagtctgagatttgaaccatgaccttagagtccattcctttttccatgataccagccacctcctgtttgtcctgagtccaggacaccacccaaaaccctattacaagtggggctggtactattgtatcctagggtgaggaagagaaggcctggaaagcggtgtgggggcgtgtgcccaccccttccctttgcctcatgaataatccgctgttccctggcacctgacttcccccctccccacccgcttccccctctaacccaggatggtaaaacctccacttttgcccggcgtggtggctcacgcctataatcccagcactttgggaggccgaggtgggcggatcacaaggtcaagagatcgagaccatcctggccaacatggtgaaaccccatctctactaaaaatacataaataggcaggcgtggtggcgggcacctgtagtcccctctacttgggaggctgaggcaggagaatcgcttgcacctgggaggcggaggttgcagtgagccgagatcgtgccactgcactccagcctggtgacagagcgagactctgtctcaaaaaagttaaaaaaaaaaaaaccctccactttcccccctacctcccactctcactccctccccaagcagttcagcttctgcagacactcgactgtcaagtctgcagccatcccaggcagactctttcacaccacacgtgctgttcccctcctgacacttctgaaggtgcttgggagaggccagtcacagcaaccagtgggctcttttggcagtgggtggggtgctgctcccagggggctgggctgtctctgaattgtccattcctgcctccccctcatcaggagggtgggtgtggtgggtggaggcctgcgctagctgtgatgcctccagggctaggcagcctacagtcagccagagaatgagcactttggggactgcacagggcagttccacgccacggtgggttttcatcacttagactggcaggtggtctgatggagctcaaaggcctttcaaagtcatctgagtgagccccattttcaaaccctagccaacgaggcctcactcagggtgatgctggagtttgaggaaaggctgacaggtgggattcagtagctgcttttacccatagcagtctggtttttatctgttttatatattgaggttccaagtaaggtattactcttttaaatgtttctcttgctttgcaaaggaggtggtttgtagctgggtgtggtggctcatgcctgtaatcccagtactttgggaggctgaagtgggaggatcgcttaagcccaggagttcaagaccagcctgggcaacatagaccttgtctctacaaaaaatttaaaaattagctgagcatggccggccgcggtggctcacacctgtaatcccagcactttgggaggctgaggcgggcggatcacgagatcaggagattgagaccatcctagctaatacggtgaaaccccatctccactaaaaatacaaaaaattagccaggcgtggtggtgggcgcctgtagtcccagctactcgggaggctgaggcaggagagaatcgcttgaacccaggaggcggagcttgcagtgagcctagatcgcgccactgcactccagcctgggcgacagagtgagactccgtctcaaaaaattaataaaaaataaaaaaataaaaattagctgagcataatggcatgtgcctgtggtcccagttactcgggaggctgaggcaggaggatcacttgagcccaggaggtcaaagctacagtgagccatgttcacgcctctggactccagcctggatgacagagtgagatcctctctttaaaaaaaggcagagggagatgattgaaaaaaaccactgactttcccccagataaacagaggcttggtgagaaggacttgcccagagttaggcggaattactggttgcccggagactggggtacaggttccttaactctgggccagtgctctgcctactgtacaggctgtcatttggactttgagctgctttcggtgggagggtgatatcaaaccccctttctttgactcttggccaactgtccccgcccctgccttcgagcccccatgcttggctcccacactccctggcatatttcaactctcccgggctcccgcaacacctctgctctagccccatctgcgtctctcgcttcgacagggacgtctgggcatgtgagtgtcagtgtggttgccactccaagtgcgtctcacacccaagctgctgccatccaagtcctgtccccaaggagagagaaagtcagagggaaagacagacagacacagaagtagactggagtaggcgagcgacagcacctggaagtgaggcaaggaccaaggagggagggagggaggagagaggcagatagagaagagagagagaaatgtggagaaagtgggagagactgatgggagtggagagaaagactcataaatgggagatagattgagaggaagacccagatggggaaaaataaagacagacatggatgacgatatgttctgtgggctgtggggaaacaggcattcttgtacattgctagtgggagtgcaaactgcaaagggaacttggcaatacctcacaaaaccacatatgcaatttgacccagcaataccacttctaggaatctgtcttgaagatgtatttccaacaacgggaatatatatatgcgctcaaggttattcactgcagcatttctggaattacaaatctaagtgctcattcatgggagactgaataaactatggtttgtctataaaatggagtaccaagcatctctatcaaagaacgagaaagacaatgtaaaactgacatggagtgctcaccaggatatactatttagtgaaaaaataacaagcaagagcccatctgtagtaagctactgtccatgtaagaaagaaaggatataagaaatataaggctgagcgtggtagctcacgcctgtaatcccagcactttgggaggccaaggcaggcagatcacctgaggttgggaattcaagaccagcctggccaatatggtgaaacctcatctctactaaaaatacaaagttagctggacatggtggcacgtgcctgtaatccaggctacttgggaggctgaggcaggagaatcgcttgaacctgggaggtggaggttgcagtgagctgggatcgcgccactgcactccagcctgggccacagagtgagactccgtctcaaaaaaaaaaaaaaaaaaaagatatacaaagaaagcatattcctttatacaaaagaaatataaaaaggataaagcagacactaaagctgtaagttactgctcacacgtgtaatcccagcactttgggagaccaagaagggaggattgcttgagcccaggacttcaagaacaccccatctcttaaaaaaaaagataggttactgttaggggttgaatcgtgtcccccgcaaaaaggatacgttgaagtcctaaccacctttacctcagaatgtgatcttatttggaactggggtcattgcagatgtgatcagtcaaggtgaggtcatcttggaggagggtgggcccattatgactggtgtccgtatcaggagatggcagtgtgaagacggacacatgggaagagcaccatgtgacagcgaagaccggtcggcgtttgtggctacaagctgagtcacgccagattgctcgcacaccgtcaggagccaggaagaggcaaggaaggggtcagagggagcacggccctcccaatacctttctcagacttccagcctcctgaactgtgagatgataaatgtccatgatttcaaacaaacaaacccaaaatggcagacatgggagagggagagggagacagctaaaaagataattacaaaggaaataggccaggtgcagtgactcacgcctgtaatcccaacactgggggaagccaaaacaggaggatccttgagccagggagtttgagaccagcttgggtaacatagtgagaccctcgtctctaaaaaaaataaaataaaatgaattagcctggtgtggtggcgggcgcctgtggtctcagctacttgggaggctgaggcaggaggatcgcttgagcttagaagttgaaggctgcagtgagccatgatcgtgccactgcactccagcctggttgacagagcaagaccctgcctctaaaaaaacaaacaaaaccccacacagatggaaagttactttgtgaaacagatacaaaagatgaggagagatggagagagtgaggaagggagacaggtctggctgcaaacaaaagggctgtcagaggcagggaaatgtcacctgccctggagctgcggcctgtcaccatgagggatgcactgagcatgcagtctggcacagatctggctgatagatgttggggatcccattgccagcggcctgtcacatcccctccccatcgcctgtttccagagctgagcccagcttttccgtagcactgtggagatgaacctgtcatggggctcagagtgtggtgttgggagtagccttggcctggtgcctctgcctcacctgccctccgactctgctgcaaacagtcagttcctgtttgtgggggcttgcacaggggcagagggatggacgagctggcttgctcagaacctcctgccagccacaaactgagctgcgcttgttttggacgtggtagactgaggggcccaggaaggtagtccacatagtgaaagtgtggcaggacacctcaggaggggagagtggttagatcttgcctcccaagatcagggacaaacatctagagcttcccttcctctagaccccaaactactccctggtgctgggatgtggggagactcagggagcctcttggtcaagtcccagaagctcaggcccccaccaagctggtgagtttttgcctccccgcttcagctcctctgactttcttttttttttgagacggagtctcgctctgtcacccaggctggagtgcagtggtgtgatctcggctcactgcaagcttcacctcctgggttcacgccattcttctgcctcagcctctcgaatagctgggactacaggcaccggtcaccacgcctggctaattttttattttgtatttttagtagagacgggtttcactgtgttagccagaatggtctcgatctcctgaccttgtgatccacccacctcccgcctcccagagtgctgggattacaggtgtgagccaccgcgcccggcttcctctctgactttcagtgggacctttccttctcacccaagggacggggcctcttagagcccagcacatgggtggggcagagactgtaggcctgggggctacatggcagggagggagtgccagagttccttttgtctttagggttcctgagagcccgatgctggcacaggatggtaagggattgggtaaatccattcacctctctgggccttggttgtcgtatctgtaaaagaagaggaaccgtccctgccctgagtggacgtgaacgtgggtgtggatctgtgggcatggggtggggggcggtagagcactgggctggcctccagagtggctgcttcctactctctttagggtttgccctgttcctgtctgttatgtagcatggagctgagggccaggagacctactgagcattcatttattcaacaatcaattacaaagcacctattgcatgccaggcattgtgctgggcaccagggagacagcagtgaccatgtcagataaagcccgtgaggccatggagtttacagtctagtgagagaagggtaaacagtgaaataaaacaataaagatcgtttcagatagtgacccacttcactgaagaaaggaaggcagcttactatcatgttatgctgtgatttggagcaggagggtgggaggctttctgaggagaggacttttgagctgcctgttgaagggtctgtgggagaacattccaggcatggggagagccagatcgaaggtcccaaggcaggacagggcagctgtattgagggatgtaaaaaaggccagagtggcggtggcagcaagacagagagaagggctgggcagaggccacctgcaggcctggactgagagggcctggtgaggagactgttagcctgagaagggtgggaaaccgtgggagggcattgcaacgcattctctaggccggctatgtgaagagcaggagggtgagagaggcagcctggaggcccacccgtgagaagcagattgccatggtccaggcagagatggtggtggttggacctaggcagggcaaggggtggtggagctgagagggaccaagatgcctgctctccatagctccaagcacacagacactgctctaggaaggccctcccagttgccatggattagggggtgggaggggaagactggctgctgggagggaatgtggctttgtgcttggaaaacaaagaacagagcttggggccctcttctcctgggggtggtggcaggcccagaggctgttgacaggaccagaggctggagctcagggctaggcctggtaggagcaggctacagccccagggatccaggagggggtaggtgcccatgcagagggaccccagagccctccaggggtgaaccctgtggctgctgggcttggggcagggagcaccaggaaggaggacagataattagcggaatgctcaaccctgcagcctgggagccaggctggtggaggacatttgggcaacagtgccctgggccctgggcttgggacccagtgtagagacaaatgcgtttgggagccagtggtggccctggtggctgtgtgggagggacaggaggagtttgacaggactctgcctctgcctcgcccccagccctgctgctgaggccgcgccctccccgccctgaggtgggggcccaccaggatgagcaagctgcccagggagctgacccgagacttggagcgcagcctgcctgccgtggcctccctgggctcctcactgtcccacagccagagcctctcctcgcacctccttccgccgcctgagaagcgaagggccatctctgatgtccgccgcaccttctgtctcttcgtcaccttcgacctgctcttcatctccctgctctggatcatcgaactgaatgtgagtgggggcgaggtgggggcacaggccatgttgcaggccacccgggcctcagtttgtccatctgccacatgggagggctgcctctcccctggggttggttagctgggtaaaatgaagactgggaggaacaacaggggttctcatattctgaatgaaggaatgtggaggggttcggaggggttgtgtcatttggccaaggtccctctgcacccaagtgtgtgaaggcaacggccttgaacctaccctccagctgagttcatgctcttggcctctgccccatactgccccctagtggaggctcccgagagaggaggagggggagacccagctctggcagagctgttgaaacctttgtcttctttctgcctgccactgccctctggctccagttggttcattcattcgtttgttcgatcattcattcattcattcattcattcattcagcaaacattttttgagtctctgctgtgtcccaaccactgtgctaaaaccagacgctagccaggtgtggtggtgcacacctgttgtcccagccgtttgggagtctgaggtgggaggattgcttgagtctagaagtctgaggctgcagtgacccatgattgcaccactgcattccagcctgagtgacagagtgagaccctgactcaaataaataagtaaataaaagcagagggcacagtgggaagcaaaacaggaaaaactcccagttcccagtggctctaatgagatgctgccgggcagcctggagaccagagctgccccacccccaccccacgcagtgcttggcccaccctcaggaacacagtctagttggcagtggcctgatctggtctccaggcagggccaagcccacataagcaggagccctggaagcagggcaccccaggctcagttctgtcccagctcctcctcggctttggcccgatgacctcagcaagggactcagccccttgagtcctcccctcgttttccttctgcagcatgggctccccatcagacttccggatggcaagggcccttcctccaggtctcatgcttatgtgacaagaaaacaatgtcttgttaatagaggtgatgagctcagagaaggggccagctccgggcaaagagattaagtttgattctgggcatgttgagctggagggagagacagggctctgagggtgactgtcgattgtgcaccagagatgagctggcaccttcagtgagctggagccatggccatggatggccctaggggccatcttacccatgaaaaagctgtggcccagcaggctcaggaccttctgcagagcttctaaggtcttaggcagacttccttttcaaggtcccatccaacatcaaagcaaacactaaaacttacctgcatccttcattgaatacttgtttccttacccaaaaagagctgaaaagattttgataattttactttcgttttgttttgttttgagacagggtcttgctctattggccaggctagagtgcagtgatgtgatcatagctcactgtagcctccaactcctagattcaagggttcctcccacctcagcctccccagtagctgggaccacaggtgcatgaccacatttggctattttttttttttttggtagagatggagtctcactatgttgcccaggctggtctcaaactcctgggctcaagtgatcctcccatctcggcctctcacagtgctgggattagaggcatgagccactgtgcctggcctctgtaattgtgcttttgaagttatttggctgtgttggctgcgattgctctgcagtcctcatgcgtacctgggaattcttgcaaagtgagaagatctaacttactaattgttttcagatgtcatgaaacatttcagaatcctgcactgaacaattagtagagtccacatgatgtttcccttggcagacatttaattaaaattgtattgattttcagtcttgtagttttacttttgtatttgggagcatatatttttagttcgctgacagactgtgtctgtgttgcccagtggttacaaggactcagtagggtcgtgctgagcagggggtttggagccagagagtggcaaagcaggggctgagacttggctctcccgagtcctgatcggtcagcaccggtgggtgcccaggctggaaagaggaaggaggacagagctctgaggcctagtgactgagggtggaaggggctgcagagcccagggcagagtctgaggagcaagaggagtgctgggtggtgtgggttgggtgggatggggtgggtgggtggcaggcctgggggcctcaccggcagccagaggagaggtggcatcagatttcatggagctggggtgggcttgaggaagaggcacatggtggggctgtgtgctcagtgggggagcatctgtatctttaacaagcccccccagatttggctgccctgctggagagcggaagccccagtctaggcggttgtgaggggtcttcctctccagggctcctgggctccatcgcccagagtccctgtgtcctcccttctccagggtggctggtgccccacctgaaggagcctaggcccgtcacccccgtcattccaaggagtcaggtcgcagtctggcctggtgtccatccagttccctcaaacctctggacattggagtcagggccaaggcctcaggggtcctggtgaaaatgtctggtgggctggggtagggacaggggcaaggacacatccactccgtctccacttcaccctctcaagcagcgtgatggattttgcccattaagcataaacctaatcaattgatttgccacctgaggctccgtctgacaccactgcccacccccaccccccatcagcccagatggattatggctgggaagatggagcaccgcagtgctgggagggagatgggattctgtcagaggtgggctttcggcgcccttctgctggccctgtatagggcgcattgcctcccctgcacagccccgaagcctccaagcctgccccttcctgggcagggtgctggaagctagccctgcccatcggggcggcctggatccttagaggactggtattggtgcctgaggtctctggccgtgggctgagatcccttggtgcttccagggccccctgggtggtggcttagcatcaacagcctcccctccaggttcctccatcccctacctcttgccccttccgggaggtgaggggcagccccaggcccttgcttctacctgcagagctcttcctgtctccctctcacagaccaacacaggcatccgtaagaacttggagcaggagatcatccagtacaactttaaaacttccttcttcgacatctttgtgagtggccttggctgatcctggggaccccggaggcagagagggagcagggaaatgacttctgctgggttctcttttggcagcatatatccagtctgatcagagactcggctcccatccttcgggagccatcagtcattaaaacctttgctccacaaggctgggcgcagtggctcacgcctgtaatcctagcaccttgggaggctgaggtgggtggatcacttgaggttaggagttcgaaaccagcttggccatcatggtgaaaccccgcctctactaaaaatacaaaaaattagctgagcatggtggttcgcacccataatcccagctacttgggaggctgaggcaggagaatcacttgaacctgggaggcggaggttgcagtgagctgagaccgtgccaccgcactccagcctgggcgacagagcgagactctgtctcaaaaaaaaaaaaaaacctttcctccacaaagcccccttcagagagccccaggtgggagagggaagataagacccctgtgcaaggttacatccaaattgtcccagagacatgctgactcagtcgttgtcccctgaggtgtgcatgcccataggaagggaacgtgggggcaggaccagaggggaggtcagcctgcagcagggtggggggcagtagcttcctgtgactgccttgctcccgtcccccaccaggtcctggccttcttccgcttctctggactgctcctaggctatgccgtgctgcggctccggcactggtgggtgattgcggtaagatgccactttcctggcagcttctgggccctggcagggctggtggaagggatgggatggaggaggactcacttcccagcctctgccttccccttcctccctccctcccctgggcaggtcacgacgctggtgtccagtgcattcctcattgtcaaggtcatcctctctgaggtcagtggctcagggtctggccagtctggtgggcatcagacctgagtggtatgcttctagagaggagcatttctctaatttggggtgtctgtccctgttgtccgggttagggggagagggaatcctgtcctttggtatctataaggaatcatccttcacccgcttccctgacttagccccttgcagctctaggaatcagaaggttctttctccagcctaaccccagtttatcctgctgcagacttgagagggttcccaagcagctgctaccaggaatggggtgtatgccagtttggctggctagagttggtagccacagaagggggctctgggtttggggtgacccctgccatggagctcagccccctcccttcacagctgctcagcaaaggggcatttggctacctgctccccatcgtctcttttgtcctcgcctggttggagacctggttccttgacttcaaagtcctaccccaggaagctgaagaggagcgatgtgagtgcttgcgggtaggggggtgcagcgagggttacccacagccccaagagaggggagttgcgggcatgagagtcagtctgaagcatctcgccacctctgagcagcctccagtagcctgagggggagcttgggtgggggtaccccaggctgctagggtgtaactgtcctcggtccgggaccgagtctgctcctccagggtatcttgccgcccaggttgctgttgcccgtggacccctgctgttctccggtgctctgtccgagggacagttctattcacccccagaatcctttgcaggtgagggctggtgtgtgggggaactgctttcagggaggggccttgtgaggaatggggtaggctgggtctgttctttctattccttctatcaggctccctggggaaagccagcaaccctctcccacacacttttatcccccacatccttgcactcacatacccgaaccccactacctccccacactctctccccaccccttgccattgtcatctgtgcctgttttctgcagggtctgacaatgaatcagatgaagaagttgctgggaagaaaagtttctctgctcaggtatttgcctgcctacccctaacccctgcccttggaatgggtgcctggaggagggcgggtgcaggggtcagccggggtgggcaggggtttcccagtagaggctgaacctcgggcaatgcccatccgagtgtctcccccaccaccagtccggcccccctggtctgcctcatgcctgggcacacaggtggagcagccacaagcctgcagggcccagggagaccagcccagatcccacatgtggctgggccaggcccctctgggaagcatgtggtatgtctagagagagaacaggccacgaacatggtggactgcaggccccaggctgacccctccctgcctcctgcttccgtccaggagcgggagtacatccgccaggggaaggaggccacggcagtggtggaccagatcttggcccaggaagagaactggaagtttgagaagaataatgtaagaagccctctcccacctgaccttcccatgcgtgttaggagtttctgttctcttttctgaggcctgaggaagaaacccaaagattacatgggttggagccatattcctgccccaagagagggagctgggccctcgggtcggcaggaggctgggctggattggacgtttcccccgtgccccttggccccccttccccgcaccccccatgtttacttccctgctgttctgcccccttggctccaggctttgaaggggaagccaggcttctgctctgcatccgttgtttcgtttcatgatcaaaacaacattatctacaaagatcgtagagagcttggaaaacagagagcaacatgccccagtccctctctctggccagttcttgtggcagccccattggcctggagacatggttttttgtggttgcagctgcagctgtccccccgtcttttaactcgacatcaaaagcctctctcctgccagtgccataggtttgttagagctactgttttgtaacagctgctcaggtgtccccaaactcctggagttttccaccctgagctgttaaaaacctgccctgcctgtcacccatttctgtgccaccagcccaccccctgcctccactctcctccctgccaccttctgtccctgccataggaatatggggacaccgtgtacaccattgaagttccctttcacggcaagacgtttatcctgaaggtgagtgaggggagcgggtgtcctggagccccagacagcacaggaggctccaggaaggtgccgaggggccctctggtgggtgccccccaccaagagggaagggttggtctgcccgagcccatctggcaccacccagccctctgccgccctgtcccagaccttcctgccctgtcctgcggagctcgtgtaccaggaggtgatcctgcagcccgagaggatggtgctgtggaacaagacagtgactgcctgccaggtgagcccagtctggctgcctcttaaggcacagatgggggcacagccacgcctcagtgggatcactgaagcactcagcgcctcagctgccccatctgtacagtgggtgtgatggtaacagtgcctgctcgggagggtcgggaggagggcaggaggagtgctcatcaggcgctgcccagggcctgcctgtggcaatagcagttagtaaaggggcctggggtgttcccatccctggggttttcctggggcgacctgttccaaaagtctccgttgacggccctcagatcctgcagcgagtggaagacaacaccctcatctcctatgacgtgtctgcaggggctgcgggcggcgtggtctccccaaggtgagtccatgccgggccccctcctttcagccaggtcttctgcactttggccttgggtcattgtcccctgaactaaccctccctcccgcagggacttcgtgaatgtccggcgcattgagcggcgcagggaccgatacttgtcatcagggatcgccacctcacacagtgccaagcccccgacgcacaaatatgtccggtgagcctcactttgcctggggtcacccctgccagcccctcccctgggagcattgagcagtgcagggtacagcatgtacagctgggcacttcccctgctgaggctgcgttcctgttccctgtcccgctgggctctgctcctcctggctactaatcctgctaatcttgctgctctgtctgtggagatggggggtggtggacagctggaaccaagccaccaaggctggacgggatgtgcggcggtggctggctggggtagaccatggatggggacccgtgcagggaaggggcctgagagccatgtgctcactctgggctgattgacctgagcaggaggctctatgctctgggtttcatcttcctgcctaaggagactcgggtcccctttcgtcctcctcaccctgtcctcactccgtcatctttctctggagtggctcaggagttcccccaaagataaagggattatggccttcccgcatctgtgcctgggcttctggagtcttcccttttgtccagtcaggctgtggtgctgcgggtggccccctcccatagaccccactcttccccatcccctcctgggttccagcaggagcactgttctttgaataggatgccaggctctgctttgggcactggacagacttgctgggtgcagggaagctcacttcctctctggatgccaacttccttatctgcagaatgggcttaggtgtgctcagtggagctgagggagaatgaaatggtgatgggatgtgaaccgtgcctcccaggcttagccttctcctgagcaggtgtcccctcctgaaggggaaggggtaagaagcgccagcccagcctactctgccatagcagggctgacctagaatctctggacagagtgtatgagggctgggaaggtggtgagctctctgtccctgggggtgtgcaagcaccaacaggccgttgtaggaggattcaagcatcacagagtgggtgggggtggagggccgattctgcagcccatgggacacctgtgctaagccttgttcagatagggtagctctgcctttctgcttccagcccagtcccagctgggccaagaatggagtgtgagtggtaggggctgcgggggggtgtcagggcctcactctgttccaaagtccccccaatgatgcctctttccataggggagagaatggccctgggggcttcatcgtgctcaagtcggccagtaacccccgtgtttgcacctttgtctggattcttaatacagatctcaaggtggggtgctggggggctgccaggtgggttctgtggagtggaggggaccctgctgctgacttggttgctgcatgactttgggggctctctgccatgcctgggcctcccctttgtcagccacctttcttacttgaaaatttgggtcagggtccagatggtctcttagccctgggttgctgtagggcatgtgcccccccttcttacctctgagtcctgaggccctgaggaagggtggctggtggccagcccggccccaccctggtctgtttgtgttgctggtgccaagagccaggcccagcatgttcttcctgccaggggtgagtgggagagggcgacccaggctggattccagagctgcacctgcattctggcccagagcccccctgctggtgccagctgcaaggggagaccctgctgagggcaggccatcaagtgtgacttctgcctgccttcccccagggccgcctgccccggtacctcatccaccagagcctcgcggccaccatgtttgaatttgcctttcacctgcgacagcgcatcagcgagctgggggcccgggcgtgactgtgccccctcccaccctgcgggccagggtcctgtcgccaccacttccagagccagaaagggtgccagttgggctcgcactgcccacatgggacctggccccaggctgtcaccctccaccgagccacgcagtgcctggagttgactgactgagcaggctgtggggtggagcactggactccggggccccactggctggaggaagtggggtctggcctgttgatgtttacatggcgccctgcctcctggaggaccagattgctctgccccaccttgccagggcagggtctgggctgggcacctgacttggctggggaggaccagggccctgggcagggcagggcagcctgtcacccgtgtgaagatgaaggggctcttcatctgcctgcgctctcgtcggtttttttaggattattgaaagagtctgggacccttgttggggagtgggtggcaggtgggggtgggctgctggccatgaatctctgcctctcccaggctgtccccctcctcccagggcctcctgggggacctttgtattaagccaattaaaaacatgaatttaaaaaaaaaaaaaaattccagcccctcccactgccttgcctcttgagggaagagaaaggcaggcagcagcttggatgaagagggaagacccctcacacagcctctcctgggctcacaggagggcggagcccggggagccagttcctgaaacatgccccccattccccccccgcccaccccccactccccgctttcctgaccagttcaactgagcagatgactggtcagaaaaaaatgccccgccccctgccaggcttcagcggggcaagtttaaagtctctagtccaggaatggaggtgggggtatgggcacctggcagtgcccacagcaagccttgactgtgtggcctggagatggggcctgagcttcagggtcactgaggcacctctgggatccaggccacctggagccccggacctcccagactccactcacccattccctctccccgcacggcactcacaccaggggcggcctggagcccggatcgcagggcggggccaggccactgcctgccttcctcctccctcccggctggcctgcccccttgcctgcctgcatgcaggcttccagcagagccagcttcttcagagccaggtggatcctgtttcggtcctgcctaggtgtgtgaccctgggcgaatctacctctctcagcttctgcttcccactttatgaaaatgggactgatgtcacagggttgttatgagattaaaagatatgaagaaccggggacagtgctcagtaatcaatagtctgcagttctgcacccacgtgctcctgggtactctgccgtccccacagggtcctcagctcagcccctgtcactgcctctcctgccaccctttgtccactcggcagtgttctcactcctcatccccccacacccaccacctgtctgccagcctcttgcaccatgagttgctactcctggggtgctggactgtccccacagccatctgtctcccctgctccccatgaagaagagccagtcccctcccaggtagcacatcagagcgggcaggctccagagctcttctggtcctcttgcagtggccagaaagtggggaaaggggcccagagaggggcagggactgacccatggtcacacagcctatttatggctgatctggagccaggccttctgactatcacccatcagagcccctggattcccatttcacccaacacaggtgttggggtagaactgggggccctccacccctactagcctgactgtctcctgagacctgtctcctaagaccacttacctgaccactggccatggggaaggaaaacacctggccaaggctcatgccccaggttcccaggcatgaagttgactgtctccgcccctgctggtgtggtgagggtgactggggactaggcactaggcctttggtgcaggcgcctgaggacgtggttgcactctcccttctggggatatgcccttgagcccaggcagaggagagcacagccagggcaggacctggcagccctggtacagagcccagagggggcatcagttcctgctggtcctgctctgtttacagacaagctgctgtcctccctgcaaaggggagtgggtggggcagagggcaagtgccaggggggcacaaggctgggcatgtggctggcatgagacggtgtctgagtaatgtcaggcacctggaggcattgaccccaggaccttggaccccagacctctgaccggggggcagccagcgtccaggtaccccaacccctgccctgggtccggcgtccccccattagtgagtcttggctctacttatagcatctgacaccagaggggccgaaaatagcccctggagaagggggaggagggggctatttaaagggcctgggaggggagagagaatgaggagtgatcatggctacctcagagctgagctgcgaggtgtcggaggagaactgtgagcgccgggaggccttctgggcagaatggaaggatctgacactgtccacacggcccgaggaggggtgagtgtgggtctgctagagccctgcctctgctcccccagagcaccctcactgagccatgaggccagagcatgaagccctggagaaatttctgggggtgggggcaggaagaatgccccatggggagagcaaaggggaaccacccttcctgcccccaggtcccagcagcccaggggagccccccacccagcctgtgcccagagagcaacagctcccaggagctcactgcccctcccctctccccagctgctccctgcatgaggaggacacccagagacatgagacctaccaccagcaggggcagtgccaggtgctggtgcagcgctcgccctggctgatgatgcggatgggcatcctcggccgtgggctgcaggagtaccagctgccctaccagcgggtactgccgctgcccatcttcacccctgccaagatgggcgccaccaaggaggagcgtgaggacacccccatccagcttcaggagctgctggcgctggagacagccctgggtggccagtgtgtggaccgccaggaggtggctgagatcacaaagcagctgccccctgtggtgcctgtcagcaagcccggtgcacttcgtcgctccctgtcccgctccatgtcccaggaagcacagagaggctgagagggactgtgacttgggctccgctgtgcccgccctgggctgggcccttcctggctaggactgtggaggggagctgctggccatggctgctttgtagtttgcccagagttgggggctaggggaggggggagccagaggccaggatgcctgagccccctgagttcccaaagggagggtggcagagacagtgggcactaagggtggagagttgggggccagcacagctgaggaccctcagccccaggagaagggacaaaaggtactggtgagggcaagaggtgcctgggaggagtggccctgatccaggaaaatgtgaggggaatctggaacgctctaggcagaagaagctgggagggagggggaggtgaaaagggcagaggcaaggatggtggggcccccagcaccctctgttagtgccgcaataaatgctcaatcatgtgccagagttgcatctctttccttgtggttgggggggctggcccatgggtgtcccctcaatgcccacttctgggaccaggctccgcatctgagctaaatatggcagagctaatgggtacaccccatacttggggtgggggtgggggcaggacagagctgtaaacagggtgctgtctccagtctccttcccgtaccctgaccgctgcccagtcctggcttctgtgtccagccccctggcactgggtggtaaccagcaagccagctggcatccgcatccagggtttgtttcaatgatgtctcgtggagaatatggaggggctggtgccaggactgtccttggctttgcctcggggtgtgaacggggtcagtgacctctaaaactaacctgcctctcagttctgaatccagacagaatcaatcctcagctgtgtctcgctccacaccccctgccctggaagccagggaaggttggaggtgctagggggtcaggctcccctctgtgacccctgcagctgttgtggtgactcatgtcccaacctagctgcctctcccaaggagactttcccctggggacaagggggagggaatggcatggaggaggcccacatcaagcggggccaggaacccacggtggcaggagctgggctggtgacctacccagggcagaagggcccgggactcatccagaggggaaggaaggggtcttcaggaagaccacggagatgccacaggcagaattggcttcccatctgggagataggtggggagaccctggcattttgacagccagaacctggggtgctgagcagaatcttcatgcctggcctggccgctccttcggagggaagctggagggtgggctgcgagaggagtggggtcagagcccctacatccgcaggaccccaaatcggctgggccccaaggcccggactgcgctccccggtggccccggcggccctccgcgaatgcgtcctgcccctcccctgcccaagccctctgccctcacccgggtccggcgccgcccccgaagtggcgggaacaacccgaacccgaaccttctgtcctcgggagcccccagataagcggctgggaacccgcggggcccgcaggggaggcccggctgttccgcccgctaagtgcattagcacagctcacctcccctatcgcgcctgccatcggacgggcagtgccgcgccctgctctggggcccccggagcgaccacagcggaggccggaacggactgtcctttctggggcggggtggggagggggtgtcgctggagggcccggtggcatagcaacggacgagagaggcctggaggaggggcggggagggggagttgtgtggcagttctaagggaagggtgggtgctgggacgggtgtccgggagggaggggagcctggcggggtctggggcctcgtcgcggagggcgctgcgagggggaaactggggaaagggcctaattccccagtctccacctcgaatcaggaaagagaaggggcgggctgctgggcaaaagaggtgaatggctgcggggggctggagaagagagatgggaggggccggccggcgggggtgagggggtctaaagattgtgggggtgaggaactgagggtggggggcgcccagaggcgggactcggggcggggcaggcgaggcggagggcgagggctgcgggagcaagtacggagccgggggtgtgggggacgattgccgctgcagccgccgccccactcacctccggtgtgtctgcagcccggacactaagggagatggatgaatgggtggggaggatgcggcgcacatggccccgggcggctcggcggtcagctgccgcccccacagcggaccggtcggggcgggggtcgggcggtagaaaaaagggccgcgaggcgagcggggcactgggcggaccgcggcggcagcatgagcggcgcagaccgtagccccaatgcgggcgcagcccctgactcggccccgggccaggcggcggtggcttcggcctaccagcgcttcgagccgcgcgcctacctccgcaacaactacgcgccccctcgcggggacctgtgcaacccgaacggcgtcgggccgtggaagctgcgctgcttggcgcagaccttcgccaccggtgagcgggggaaactgaggcacgagggacaagaggtcgtcggggagtgaaagcaggcgcagggaaataaaaagaaggaaagggagacagaccaggcgcctaacagatggggaccaagaaacaagagatagctgagaggtgcaaacagaagagaaaaaagagcaacatcccttaggagaggggcagaggagagagaggtggagagagggggcggagagtgctcagaattgagagctaaggtgggggatgcaggacagactgaggtggagatgcataggaggaaatggaggcagatgtgggacaggggtgagaaactgccaggatttcctcgctgagcctggctggtaggtatagttgttttctttctttttctttattttattttcatttatttacttatttttattttttatttgttttgagacggagtttcgctcttgttgcccaggctggagtacaatggcgccatctcggctcactgcaacctccgcctccccggttcaagcgattctcttgcctcagcttccctagtagctgggattacaggcatgcgcccccatgcctggctaatttatttgtatttttagtagagacgggacttctccatgttggtcaggctggtctcgaactcccaaccttaggatccacccaccccggcctcccaaagtgctgggattacaggtgtgagccactgcgcccggccagtaggtatagtcttctagatgtgaaacctgagtctcagagcggtgaagttcccttccgaagggcagcccatgttggagctgggttcagtctaactctggggccaatgctttttccagatggagacacatttgcagaggagaaggaagaactagagagaggcagggagatgcaggggagggaagggtaaggaggcaggggctgcctgggctggctggcaccaggaccctcttcctctgccctgcccaggtgaagtgtccggacgcaccctcatcgacattggttcaggccccaccgtgtaccagctgctcagtgcctgcagccactttgaggacatcaccatgacagatttcctggaggtcaaccgccaggagctggggcgctggctgcaggaggagccgggggccttcaactggagcatgtacagccaacatgcctgcctcattgagggcaaggggtaaggactggggggtgagggttggggaggaggcttcccatagagtggctggttggggcaacagaggcctgagcgtagaacagccttgagccctgccttgtgcctcctgcacagggaatgctggcaggataaggagcgccagctgcgagccagggtgaaacgggtcctgcccatcgacgtgcaccagccccagcccctgggtgctgggagcccagctcccctgcctgctgacgccctggtctctgccttctgcttggaggctgtgagcccagatcttgccagctttcagcgggccctggaccacatcaccacgctgctgaggcctggggggcacctcctcctcatcggggccctggaggagtcgtggtacctggctggggaggccaggctgacggtggtgccagtgtctgaggaggaggtgagggaggccctggtgcgtagtggctacaaggtccgggacctccgcacctatatcatgcctgcccaccttcagacaggcgtagatgatgtcaagggcgtcttcttcgcctgggctcagaaggttgggctgtgagggctgtacctggtgccctgtggcccccacccacctggattccctgttctttgaagtggcacctaataaagaaataataccctgccgctgcggtcagtgctgtgtgtggctctcctgggaagcagcaagggcccagagatctgagtgtccgggtaggggagacattcaccctaggctttttttccagaagcttccttgaggctagcattctgtaccactcattcttcccaaactaaggaaggccaaggtcaggggagctcaccgggcacctgcagtgcaccaggcacttgtgatatgccattgtgtccatcgcatcattcattcctgcattcagcagcaggtcctgctagtctgtttccaggtgaagctcagagaggtgaagtcacaaacagtgcagactgcttcagaccagaacgagggagagtggggatcatgaggagatggaagtagaatctgcaaggtggtggggaggtgggggtgttatgattgaagcacaatggccgagggaagtgaaagggaaagaactggctccagctccctctcacaactggacttgagttctgcccagctctgcctctggggcctgccattccccatgccacgtgcccaggcagagacctcacctctgtttactgcctccagccagctctgggacctgcccctgccgccacaactgtcttctcctgccctccagcccaccctattcacacaaatgagctgaacaagggcaggtgaggcttggaattgatttattaagcacatcccttgccaccctcccaccttaaaagttttcagtatcaaaagaagctagcgcaggccacccgagtccctgaggttggagtcctagcatagctcccctccctcaaagagggacaaggggtcaggggcagagcaaaaatccagtctgcttcaaccacggagactgcctttgggatggaaagtttctggagctccctccattctattcctgtggggcaggaacatgccagggctgctggtaaatggcaggggtcacctttaccagggcgcaggcatagtgtggcccctgcctgccctggggccaccctggaacagtaagaccctctgggaagggaagaaaccagacccagccataagctttctccccttctccctcaaatcgccccttcctcctccccaaaatcaggctatggcaaaggggctggcagcaggggaatggaggttttggaggggaaggccagccatgcgaaggcaaggagaaaaggaggatggagagagccccagccatccccattttccttcctctgcctccgaggggctgcttctggagggcactgttgtgtggggaccctgtgaggtttgcaggaggcgggcaaaggggcaccagacagggaacatgcacacaggcagcctggccatggagagctcctggctgtccgcccaggtggcgccttgggcagagctggcgctccacaagtgattattgatggtgacaggattccctcatcctgctccaacctctcaactgtggacacattcaccggcagtcactcatctcacatgcccaccagcacgcgcacacacgttcccctaacccacgctaacacacccaccccctgcacacacacactttgaagccacacctcttccccgacaacacccgtctccacactgcgcacctaggcctgagctcacacacacccaggcccatgctcacggccctgtcacctatgcactcagcctggcccacactcccgacacacggtggcaggctctcaaccagacagcagcacaggatccttgccctgggcttgctggagccctggccctgaaagggagtatggtgaggcctcctgggaacctggctagggcaatggtcagggtgaaactccttcccaatcccagcagcttggtccctcaagatcccatggggagaatcgccgtgaaccttggctggccaaagaacaagcatccagcaccacctagtggtgtcctggaggagggtggggggtggtaacagaaggggaccccctgtatccctaaggcctgtggtccctggtctcccaggtagacagagggcttcaggacccagccaggcagctggggatgtggggaggaggctgatggggaggaaacaggcagctgtcctcccggtagagctaagagcacactcagttccaccccagttcagctccaggaggtagaggggctgcccactctcgagtcccagatgctgggaggccttccctagaacagactccaaggctggtgagggccaacagggggtgggctggccacatgattctgggcccacatccttcatgtccaagttcaagaagttgaaaagagaaaatcatctcaagggttgaggggagaagggaggccagcagggcgggggcaggatccccactggggcagactcgctccaaggtcttcagtccagcttgaacttgtcctctgattccttcagcaggtacaggctgtcatcttccagaaagctgtgggccaaaggagtagcccattgaggcacacagctctgacagctcgcatggagacaagggtggggtgcatgcaggcaaggtgggagggggcggatgggcacacagagcccccaatctcccctaaggagtgggcaaggaagggtccaaagaaggtgagcaccaggcagggggcagcacccacctgaaaaagaggacgtggacagggatggtgctgatgtgccagatggcatgggcatccaggacccagaagagcggtgggaagtcaagcagctcgagcagggacagcccctgcagcagcaagaccaccaccacgcacttgcgcacgtgaggcagccgccgctggttccacaggcaccaggccagccaccacaccacgttgaccaggcctgggtgccagtgggggcaggagagactcattccttcggctccttctccccaaggccacccccaactccatgctctctgaccccaggatcatcctcggactctcctcccagcctcctctctctcccacctcaaattcttctccattcctctaccccaagagtctctctagaacctccttctccaggaatggcaccaacctcccactcgcaccccaagctagcacttctgcagatggcccaagccccccagggcctcaccaatagccacgttggccaccaggttgtagccatagtcgaagcggatgaggctcaggtaggagacgtgcacggtcagcatgagcagcaggagagcccggaaggcactgaccacagctgggtgctgcagccccacggtcctgccccaccgtccagggttgctcagagggcaggtggcccatccccagagcagcattccctgaagcatctcctccccccaacattggtgcatggcccctgaagtcactacccctctccccaccaaacaggccacagctgggcagcaagtgctacagctccttgtcaggagccagggcccccagtcctaccccagagtcctcacccaggacagctgatgtgttgggggttggggggcgtaggtgttgggagactagtgaagaaggcccccaggggaaggctgggtgacccctttctgcccccagggttcgattttgcccctgcagccacccaggcaggctcacctgacgcagcacaggtagattgagtgtaggatgacagtggaggcacagaagtagtccattttctgaggacagggaagggtggtgagggaccagcatgaggcttcacggagaggacccgcggggatgggggcatggaggagtggcagagaggggccggggtcctgggcctgcctatcactgtttcactctgactgagtcttgtgttcacatcaccatacaagtttttaaaaatgtgcccaggaacaaggctttagggacgctggtggagggttcctgctgaggctccaggacatgaccacgctgcacagaattcagagcacagtgtggagtctgacagccatggggtcacgtcctgtggcaacccttcactggctgggtgcccctaagcatgtggtccccctgtcgaaggctcagctgcctcatcaggcaagaagagcgaatactcatccccacctgatgaggctcactgaggatcaagggcaccaacaggtttaggatgcccaccccatactcctcccagtgctcctcagagggagttggcatgaccctctagagcccctctgcccacttctgggctcctctgggaccaccctgtgcaggagggggagctggaggaatgctcacctctgtgaggtcagtgtccctggtgtggaaaactgtggaccagaaccatgcattgagggacacctaaggagggaggggctggtgagcatgctgccccccaccctgacctcaaggcagggacccccatttgctcacatccatttcacctttgggaaggggctctgcaggacaagaaatgtgcttttcctgcccctggagccctctgaacaaacctatgtccctctacccccacccagccagggtccctggggtggacttcctgccaccccaaacccccaaggccacggggggctgcagcctccacaggttccggcctggcctgggaaccagttccggtatagccaagctccctagttactcaattgctaagacaacagcccccaggggccttgcctcctcctccaaccggcaggtgttgacagcaccaccccacccgggcccaggggagccagtgacctcagcctctgggggcgggaatgaggtgggtggggtggaggggctcgagccagcttggggtgtgttccaagcagcaggggagggagatcaagcagatcccactggggcacaggctcccaggaggagggtgaaccaagcccagcttcctcctggctgggcctgcccaacccgccagaccagtggctgctcccgagcctgggaggagtagagggcaggactggaggggctgtggtgggccagggcccaggggaatgtttgaggccttcttcctggaaattagctgcgtggagagagcacaaaagttatctagcgaatgagcctaagagcttgtgggcgttggtgctggcactttcttcagggactgctgtgtccacagcaaaggcccaaactgctgaaagcagggtgggctgaagggaagggctgggaaatcgtgacaaccaaaggaacagcaggccaggccgggaatggcctggaggtggggagggatgcgctagggtgggacaggcctggcggagatgaggaaaggccaggaactgctcagttggctccaatgtaccaggaaaactggccaggcaggggacagagggagggggcaagaagctacactctgtctggcactgtagcaggcaggtcagacagtaagatgcattccaaatgcaggtctggggagctcaggagagaatgggaggagaaggggtacaggcggggcagaactgctgcacagccagtcaggttctcggggtgccaagctctggaaggcgcaaggctgcctagtgcccctgtctggcctgggctctgggctgagccttgctgcttctgctcctcttgacctggtcaaagggccctgcccttctcagcccaagcttcccccgggacaaatcatggctcaagtgaaacttcagttcctttccagcctggcgttaggtggtgtggtctagggcaggctgcttcctcctttgaggatggccactctgtcccttccaccagactcaaggctctgccctgctgcagccccctccccagagacaggcatggaggctgcacaacaggactgaacctggtggcttctcagacactgctcccacagtctgaaaagcttagagtcagcatggggagaggagcaggcttgggctggagacgggacccaggcaatcacatggaccagttctccctggcaggccaggaacagggacatccttagggaggagagtggccctggagccaatgtgggaaggagaagaggaaggcggcagggactggcagccagccaggcctccttgtcacccacagcaggaagggggaggtgagaagaggactgcaggactgagctaagtggctcagaacaccgaaagcagggggtgtgtgtgcgggcaaacatatgcgtagggccacaggatgggtggggctgctgggtcccctctccaaccgcctccctgggtgccttccactcacagagacccacctgaagcctggcctctgcacccctgaaaagcccctcccccctggggagcatcccactctgggggtgctcctcttctcaccctttcctcagatttgggaggtagtggtatcattaagaatgcaagccctacagccagactgccagggttcagttcctggctctgcatttcctgtgtgtccttgggcaagttatttagccttgctgtgcctcagttttctcatctgcaaaatgggaataatcatagttgataagggtttaatgagcaatacaaatacagcgtacagcacagagcccaggacaggctgaaacatgagtgttctctccacttgcctgaccagcacagaaccccgtcagcttcccatagaactgaggcctaagaggatgtctgcctcccactctccctgcaggccaaggatgtttaggcagataaggggtggtctcctagctgcctaggcccacctccacagctccaggctgggggaagagtgtccagtcttcacaatgagacagagtctgcattcaagtcctgcctcagcccctacgcagctgtgtgaccttggacacataacccagtatgtgtgagcctccactgcctcacctacaaaacaggttcataatgatgctcactgcacaggaggccatgaggacgaggtctgcggaatgcctggcaccaaggaactcctctgaatggctgctggttttgctgcctggtccatagtaggtgcccatcaatgtcagtttccttcatcaggtccagtagactgactctcaccacgcccgttcacctgcccctcaacttccctttccgcaagggtcacaaagtttgaggtcaaactatggggcctcagggtctctccattccagaacggagacacctcagctataggaagagcccctcctccttcctctggagccatgttcccatcaatgtgaaccgaacagatccatttctcctcactcagagtttgtcatcaagagcaagcaaaggggaaagatgggctctggaaggaaggagagttccaagatgccaaggcacggctactctcggactccttgccacgctcaagtgaaggggggcagggaggggaactggccaggagggcgacaggctgcccagcaggcacccagagctttgcgtaaacactgaggagagggggtggccaggggcagggtgccagtgggggtggaataggagactgggtggagggagagcaagaggctgtttcagtctgttggaaataagaaaatcgagacaaaaatatcacagccgtgaaactggttggatgccaagtgagccagatctgtcaggaattcgacccggcgctaagccccagtgctcggggctgtcattgacaccatggcggtggggacaagtggggcttaaaatagctcagtgtctcagaagtgggggaggcagaatgttaaatatgatgcctgctgccatcctgggctcctctggaggccacagtgtctcaccccctgcctcaggcagggcaggccagccccagctcactcctgagagaagggagacagaggtggatgcggatgggagaaggagggctttttccaagatcccagaggatcccttgatttcctgccattgcctgttccactagctcttgtctgaccatgggaagtccttcctgaagtctaaccatcattctactacagctgcaacctacctcttcttgtagtttgcttaacagaggaagagaagaatcagtccccacctacacaaaccactctacagagatggtttgggcttcccaccacttcaccctcctctctacacctgaggacctttcctgactggatgaaggcctggggaattggtttggccttctggctttggcacacagcaggggcccctactccgtgaagtcaaagagacatggtatgcggagctttggtaggctccccacccgccgcctggctgctccccagcccaagcccaggcctaaatggcaaggcaagggctgccttcttgtgccagcgttatcatgagtcctgctggagggcggggtctcctcatttcccagaggcaaagctgaggtacccttcccccaagacttagcccggagcgggtgagggaccttgccttcctatcctcaccccaacagaaatcaggagcctcagtgccccagaaggcccaggtcaaagtccactgccgcaccctccatacagctcaggatccctccctcctgcagaaactcacagggcaactgggaagcccaagagcaactgggaaagccaaactaggccatccacaggagtgtgggttctgaggctttgtttcttgaaggcctagtgagagcatgagggggtcccatgtcccagaaccccacatcccataagacacacagggcccaactatctgccttctaccaccccaacatctaacatctcctgctttttctgtttttgtttttgttttttttgagatggagtctcgcccagtcacccaggctggagtgcagtggcgccaccttggctcactgcaacctctgcctcccaggttcaagcaattcagcctcccgagtagctgggattacaggcacccatcaccacgcctgactaatttttgtattcttagtagagacggggtttcaccatgttggccagcctggtcttaactcctgacctcagatgatccacctgcctcagcctcccaaagtgctgggattacagacgtgagccaccatgcccggccatctgctgctttttctctagggtccttagtcacactggactgcaggctaccctggggaagtgtgacccccctctccaagaaggaagctgagttgcagataccattgaggtgaaaaatccaagaatcagggatgacaagaccagatctgtgaagtgacccctggcctctggcacatgttataaagacaaggggtgggaccctccgatctaagaaggctctaagcttcttcagagttcaggcagggctgtcccatgctctctagtagaggtggggacaagtgggtggtacacgctgtgggcccagacaagcagtgtccgtggaagaaccccaaaggaaagcagacaggtgtaacgtcctcagcttccctgcccttcctgctttcttagccaggactaaatttgcttcgctccaagaggcctacacaggaagtggtggctttatctcacccagcctgtgacagtgtgtgccgatgccaggccctgcctacatcagagcccctagccctcagcctggcactcaggggcctctctgctccatctactcttctactcctattcacacagctacaatggggccaaggtttcctggaatgctggaattcaatcccctgtccccacacatgtatgtgtctaagccttgccccacacatgtatgtgtctaagtcccagattaaacctctcctcctccccgggcttccctggcctggcagacttccccagttagaggacgcggtctccccacctcacgactcccagggctctctaccggagcaccccttgactctgcctgccgtctgctgcccaggctgcccagaactgcacctcccactatgcttagctccctggggcaggggattcagcctccacaagtgctaaaccctgtctccacccccagcaaatgctcaatggacactcatcacaggacacggagtggcctagaagaagagctaagttctcaggccctggagccagacagccctggacaccaaccctgtctttattccttgctaacttgttagctgtgcattttgggcaagtttttttcccctctgaatctaactcagagctcataagggtactatgaggatgaaataaggaaatgtatgtaaagtgcttcagacaagcctgtcacatggctcctgttccttaatttatcacaactgttattaatagttgttgaataggaagtattaaggagggtccatatttcccagaggtttaacagcctccttccctgacctccttcccacgcccacctcccaagtctaaggctcggcctggacttcgcagcacgccccatctatcagcttttctaaggccctagagacctctgtgtctccagattccggggtctccttcagttctcacgtgtacaattcaggacagcagaagcctctctccttcctgtgctcatcccgggaagcacaatccaagcacactatctcccagttctccacctgcccctccggctactccttctgtctctgtgtctggctcatcttcctttagccagccattacattttggggttccccagggctttgccctagatcccttctcttttcactaggctctcctggggtgatctcatccacacccacagcttctatcactgtcttttttttttttaaagacaggtcaccctttgtcacccgggctagagcaacaagagtacagtgacaggatcacagctcactgcagcctcgacctcctgggctcaagtgatcctcccacctcagcctcctactagctgggactacgggcatgtgccaccaggcctggcttattttttttgtatttttggtagagacggggtttcaccatgttgcccagggtggtctggaacttgtgagctcaagcaatccgcccacttcagccttccaaagtgctggaaccgcaggtgtgagccactgcgcccggcctccatcactgtcttataagcagaaacacaaggggtcatcccttactgctctttcctcatctaatccactcttgaagtttatcagcatagccaagatgttgaaagtgtggactctggagccagatgcctgaattcaaaccctggctcggtgatctgtggctggacttaaccttttcagtccttggtttcctcatctataaactggggatgagaataataatacctataagctgcgttaaacaaaaattacgggaggccattgttctggattgagcccccgcactagacccaagagaccagacaaaaatgaagtcactcatgctaaatgccacataatcaaactgaaactttttttttttctgagacggagtttcactgttgttgcccaggcgggagtgcaatggcgtgatctcagctcaccgcaacctccgccttccgggttcaagtgattttcctgcctcagcctcccaagtatctggtactaaaggcatgcaacactatgcccagctaattttgtatttttagtagagacagggtttcttcatgttggtcaggctggtcttgaactcctgacctcaggtgatccacccgccttggcctcccaaagtgctgggattacacgcctgagccaccgcacttgatcttcaaactgaaactttaaggtaactgataggtcccaaaacagaccactttttcctgaaaacaggagagtccagtctacccaagtaaggaagtctcctctgctttaacccttataaaaaaaaacctgatgtgggccgggcgcagtggctcatgcctgtaatctcagcactttgggaggccgaggcaggcggatcacgagatcaggagatcgagactatcctggctaacatggtgaaaccccatctctactaaaaatacacacacaaaaaattagccaggtgtggtggtgggcgcctgtagtcccagctacttgggaggctgaggcaggagaatggcgtgaacccggaaggcagagcttgcagtgggccaagatggcgccactgcactccagcctgggtgacagagtgagactctgtctcaaaaaaaaaaaaaaaaaaaaaaaaaaaaaaaaaaaatctgatgttaaccaatcaggtttctttctattgttctgtttcctggttcccaccttacaaaacccactgttctgctattgcccaatggaaacttgcattctattttgtagaacggaggctgcaccaattcatgaatcacaaattaaagccaattggctctataagtaagtttgctgtaatttgtcttttgccacttgttatggatgaacaagcttaatacttataaaatgcttagagtgatgcctggcatacagtatgagctatgtatgtatttgttaaggaaataaatttttaaaaagctttaatgttacctccaaaacacagctcaagtgtacttctcttcaatgcccaagacccatgccacctctctagtctagctactgggccctgtgctaaaactaccaactggtctactgcatccactcccgcccccttcaatctgttctctacacagtagccagaatgagctttccaaagggcaaatctattcatgaaacaacttttctcctcaaccctcatttaaaatccctccgtaggccgagcacggtggctgatgcctgtaatcccagcactttgggagggtgaggtgggcggatcacgaggtcaggagttcaagaccagcctggccaacatagtgaaaccccatctctactaaaaatacaaaaattagccaggcatggtggcacatgcctgtagtcccagctgctcaggaggctgaggcaggagaatcgcttgaactgggaggcagaggttgcagcgagccaagatagcgccactgcactccagctggggcaacagagtgagactttgtctcaaataaaataaaataaaataaaataaaatccctccgtacttcctgatgctttgagagtcaagatctccaatgtgaggctctccatggctggccccatccaccacccatcagtccgcccagctcacacccactctctgatttcctgcatgtcaggctgcctggaatgaccctccctctctcccacctgggcactttctgagacttctctttagaagccttcccttactcttctcaaatttacctagttaacattcatgcatccttcccaccttacctttaatgccccttccccagggaagccttccctgatggccccatgctggtcttggtctgcctttacacacacccctgaagcacctctccccgactgcactttttcatagttgtactcttacattcaattgtatgattagcaccagagggcagacttctggatctccagcaaagtgcctggcatatagtaggtgctcaacacctgagtgaatggcttctgtgagagcaggaaggtgagtgaatggaaattttttccttaaggcttacaggggcagctccgacctagagacatccgttgcaacctttcattctcacacccttcccaaggccgtcacggtccatatctgcaccccagtctgtgcttatcacacaataccaggccctgaatacagctctttagaccagccgtactgtgaagctgacagccctttctgcacctgcagatgtaaccatacctgggcttctccagggatggtctaagcctaggctgagctcgccaggtgcagtgactcacaactgtaatccctgcactttgggaggccgaggtgggtggatcacctgaggttgggagttcgagaccagcctgaccaacatggagaaaccccgtctctactaaaaatacaaaattagccaggtgtggtggcacgcgcctatcatcccagctacttgggaggctgaggcaggagaattgcttgaacccaggaggtggaggttgcagtgagccaagattgcgccatttgcactccagcctgggtgacacagtgagactctgtctcaaaaaaaaaaaaaaaaaaaaaaaaaaaaagactaggctgagctctacacagagactatggctgtgactccccaccaggcctgggctggaattgagattgctccaagtcctccagaagggcccttggaaagacctgtggtcccagcatcctctttagccccccatctcccctctgtgtttgtaaactgtcctactgggtcttttagtggcttccttcttcaggacaagaaaaatgcccttctttcctctctccttcccaaacagcctgacctagggctctgctggaaaggtaaggcccgattcagcaccctccctgttttctccccaggctttaccaccctgcagctgcaactttagccctgggaaacagaggggaagctggtaagtagaagccctgttgggtgttaatagggatgtagagctccaccttcctagataagaggagacagcaggagtcctgctaggttacctacccaggcgaaggccacacaggtgtggtacatgggggaggaggctggcacgaaggtgcggtagcggcagagcatcaccaggctggccaggccattgagaaacgaggccacggccgatgccggctcttgaaagaacaggaaccgggagaagggccactgaaaaaggagcagatgaaggaggtttgaagggcaggcaaccctcaactggcccagtccacctattcttgacatgctgaagcaacaggtcctcagctgagtcctcagctctggagtttggccaaagcctcaggttcagtacctcttcagactaatgagccaccctccagtgcctagttaagagttatacccccatcctggccagcaggcacagcactgtaagccctgatctctgggaagaccagatgggtcagggtagatgactcagtatggcctggtggaaacagcacagagttgccatccagaagacacaggtcccaacccctcctctaccactgaccacggtcctttgagcctcagcttactctgtgaaaaactggggtgaatacttcctgccaacctcaacaggccagaatgagataatactggattgaaacgtaccagcaggccaggcgcggtggctcacgcctgtaatcccagcactttgggaagctgaggcgagagggtcacaaggtcaggagattgagaccatcctggctaacatggtgaaaccccatctctacttaaaaaaaaaaaaaaaaaaatacaaaaaattagctgggtgtggtggcacacacctgtagtcccagctacttgggaggctcaggcatgagaattgcttgaacctgggaggtagaggttgcagtgagccaagatcatgccactgcactccagcctgggcgacagagggagactccatctcaaaaaaaaaaacaaaaaacaaaaaacaaaagaaagaaaggtaccagcaaactgtgcctcgctagacaagctgaagcatattactgtgaatccagacccctactggagaagcaacaggaaacaagccacagtaggtaagggaatttgtccctgcagtaaggtgggcatctcaaccactctaagaggcccagcaccactctctggggagactccaaagccttccagatattgctactccaaatccagaggcaggacacatgggtcctatccaattctatggaaaccagcagattttggggagaacaggtagctgccccaaacacacacgcattaccccatgcctcagactgcttggacagtgtggtccaaccagggggtatattactcctaccacgctactaccatatgcctaccctgaccctccaactcaccttgccatggaactgaggcactttgtgaccttcctggaggtagagcccaacggtgacccacatacactcatacttacagtcgtcccgacaggtccagcctgaaacagacaaatgtggcctggtgaactccccagcacagagaggaaagagagagcatgaatggggtccaagcgcaaatgtaggccaagagggcctgtaagttggagagaaccaggagaaatctcaaaattctagcttcccctttgaatgaatgagagatgatgagatgtacacataggggaaggtgtatgtacgtatgtatgcatattttagtgagcaattagagatattcgtcttttttttgtttgtttttttgagacagttttgtttttgttgcccaggctggagtgcaatggtgcgatctcggttcactgcaacctccgcctcctgggttcaagcgattctcctgcctcaggctcccgagtagctgggattacaggcatgcaccaccacacccaactaattttgtatttttagtagagatggggtttctccatgttggtcagggtggtcttgaactcccaacctcaggttatctgcctgcctctgccacctaaagtgcggggattgcaggcacgagccaccgcacccggcattttttttttttttttttttttgagacagggtctcgctctttcatccaggctggagtgcagtggggagagcatggctcaccacagccttgacctcctgggctcaaacgatcctcccacctcagcctcccaagtagcgagaccacaatgtctggctaattcttttattttttgtagagaaggcatcttgtcatgttgcctaggctagtcttgaactccagggctcagatgatctttctaccttggcagacatttcctctccttttgctcaagtccatcaagatgttggcatctgatgaactcatctatggaaacctgggtttatatttgtccttcctgaatataggatttgctcttactctcctggaaggagttcttgctatcttactcccttcctatgaaaatgaagcccaaattcttcaacctgacttttgaggctccaaattgcctttccaaccgtattggtcactactcctgttcatgtaccctgctccctgagtaaataaagctcctggatgtgcccacatctgcccagggcatccattctctctgttccctctgtctggaatgcaaagtggtataatagtaaagaggacaagcttgtggtcaaacaggccagaactggaaactccactttactacatactggctgtgtgaccttgggcagggcatttaatctctctaatccccatctgtaaaactgggattagagaaactatctcaaagggtgtgataaaaattacttgacatattgtgacacctgtcacacagtgagtgctcaatacgttggttctttgcccactatggtccaaatcgaatgtaccagtccaaagtccctccttcaaacaaaacgttccaagatgatccctgcccccacgtcttcaaagccggaactgacaccttcctatcccaaatgcttcctaatcaaagagtctttcaggggctcaaatcattctctgccttgcacttgaaaaggctcatgtccccgtggggactgtgagtcccaatgggcgggaccctggtctgatttctgtgccattcctagacattgtggcccgaatgtatttaataaatacccttttgactgaacaaataagtaaatgaaagcttctgggaaagtaagagaggctggtaaggctctcatcaccttaggggcttcactcacattcataagagacctcgtggggaaactaaggttcagggattgcagaggcgtattgggggcgcagggggcgggagcaagacaaatgggcggggcttaccgtgggggtggggcttacctgctagactcatgtagattggctggcgggagcggaagtgattcagagcgcccccagagcagttctgctcttcgcactgcagtacgcagtcgcggtacaccggctcacggtcgccctgggagccgctcgccagcgccgctgccccagctagcaggaccaaccgcgccgccaggccggccatcctttctccctggctcgccgccgggggaggagcttaggagtatgaagcttccacttccggagtaaccggaagttcctgtgttctttattctactctccgctgaagtccacacagtttaaattaaagttcccggatttttgtgggcgcctgccccgcccctcgtccccctgctgtgtccatatatcgaggcgatagggttaagggaaggcggacgcctgatgggttaatgagcaaactgaagtgttttccatgatcttttttgaggtagggctgtttactgtcaccacccctgtcggattttacttcctaaacgtacctgtaactatccacttctctccatctcttctggcaccaccctggttaaagacaccatcatgtgtcgccaagacagccgcagtagcttcttaatggctctccctgcctctacttttgcctcttccaacctgcgctccattttgaaaaattaaaatttgcccatatcactttttttttcttaaaattatttactggctcccaattaccttgggtaaaatacagtctccacaaaccctgcctgatttggcccctgtccactggtctccctcactcccttgctccagacccgcttcagagggctatgtccctcaagcttcctgactgcctggcctggtctgaatcactcactcttcttttttcttctagtcgcaattgaagtaccacctcccgagggtgattgcttccccatgcggggtagaacctttgctgtcctgttcaccactctacctccagcacagaatttggcttatggtaggcgctaactgcgtttgtttgttcttctgtttaatgaatgaacagcatacatcaacataagaacttgacaaatccagggctgtaaaatcatcagtatggttctgcactgagatcggagagaagtaatatttctaggaaaattaggaaccctgggaacaggacgcttgctttagtatcctctccctgctcacctcccctgcactcccatcagcaccgacccacacccaatctcatagaagccttgtagctaaggatcaccctttctcctcccccactctcctcaccccttgtcaacttttctttttcgtcctgggggttggaatgagtaagaagtagcctgggattccattcactcacttaacaaacatttctgagtccttagctctagcaccttgctaagcaaggcaaaatctccaggaggcaccattcacattgcattttctgtgaatggtgctctggggagcagcattcacattgccttttctgtgaatggcaaattcttccagttaaatataacatgaatagtgtcccctggagttgaccacccaactgatactgactgagaagctgaaatgaacaaaacaaccccttagccctccaggagctgaccggaaatccagtgctaatactactttgcatcttacagattagttcttttacaatactgtttttttttcttttttcatttcattttgtcctttctgtgactctgggatgagtctttttatgaggatcctcatataaagatggacatttaggattaaagaggatgaaatcctgacaaaatagggagtctcccctttagaaaattcctaagtaaggctgggggtggtggctcacgcctgtaatcccagcactttgggaggccgaggcggacggatcacctgaggttaggagtttgagaccagcctgaccaacatggagaaaccccatctctactaaaaatacaaaattagttgggtgtggtggtgcatgcctgtaatcccagctactcaggaggctgaggcaggagaatcgcttgaacccagggaggcagaggttgtggtgagccaagattgcgccatcgcactccagcctgggcaacaagagcgaaactcaaaaaaaaaaaaaaaaagaaaaagaaaattccaattttgaaggcctcatcctatattatgtcaaacatactgaaatgcagtaacgccccacattaaataagatttataaataactatacatatatataattcaatctaattgctgttaatagttgacatattgctacatttatatacatttagttaaaaaaaattttttttcccagacagcctctcactctttcacctagactgaagtgcagtggcatgatcacgactcactgcaacctcaacctcccagactcaagtgatccttccatctcagcctcctgagtagctgggactgcagcatgcgccactatgccctgctaatttttttaattttttgtagagacacggtcttgctatgttgcctagactggtctccaattcctgggctcgagtgatcctcccgcctcaacctcccaaagtgctgggattacgggcgtgagccatgccacacggccataaaatattaattttcgcagctttcttatattttagaactaacaatggaaatttgttcgggtctaaagtatttcagaggtccttgaaaacccatgcctacatacctgatggaaaaagcaatcctaggttaatggtggaagtgggagtagagacttctgttctgttgacttcttggaagatggggtactgtctctctgggacagctcttgagaatttccctgccagcacagccccagataacaatctctagatggcgattacctggcctctcttcccaactttctagcctggagcccctagttctcccctgagcctccttagcttgtccttcttcctaacttgtatttggcttcagatgtgatccacagtctgaaaagtcactaattcattccttcaactcaggcttattgagtcctcctgtgtatcagccattgtactcatgggggaaaaaaaagacaaagcatatgttaatagtagagtgtgctggacaggcacagtggctcatgcctgtaatcccagcactttgggagggcgaggcaggtggatcatctgaggtcaggagttcgagaccagcctgacctaacatggagaaactcctgagatcgtgccattgcactccagcctgggcaacaagagcaaaactccgtttcaaaaaaaaaaaaaaaagtatagtgtgctaaaggctcaacggcaagctgaccatgttcttagatcaaaattggtagagagtctacaatgtgggttccttattcatcaaatgtttattaagtttaccatgtgcaagtctctgggaacagagtgatgaacaaggcactgtacttttcatggtcagaggagggaaacaggccataaacaagtgtcaaacaaaagactgaagccaggtgcggtggctcacatctgtaatcccagcactgtgggaggccaaggcaggcggatcatgagatcaggagatcgagaccatcctagccaacatggtgaaaccccatctctactaaaaatacaaaaaaattagctgggcatggtggcacgtgcctgtaatcccagctactccggaagctgaggcaggagaattgcttgaaccagggagttggaggttgcagtgagcctggattatgccactgcactccagcctggtgacagagcgagactccatctacattaaaaaaaaaaatatatatatatatatatacacacacacacacacacacacacacataccctctaacccaggaatttcactcctaggtatacctacataagctccagtatacctaaacaagtgcaaatttgtttaagtacagttatttgtggtagcattagtcattgttttcaatagcaagaagaaaaaggaaacaactaaatgtccatcaatagggaatgaattatattaatggagggagagccatacaatggaaggctgaacagaaattaataggaatggggcagatttgtaatgtactagcatggtaaaaccttcatgatagatatagatatagatatagatatagatatagatatatatacatatacatatacatatacatatacatatatatatatatatatatatatctcttgtgtctcagcctcccgagtagctgggattacaggtgtgtgccaccacatccggctaatttttgtattttttagtagagacagggcttcaccatgttggtaaggctgtcttgaactcccgacctcaggtgatccacctgtctcagcctcccaaagtgctgggattataggcatgagccatcacacctggccaaatatttttgataagtatcaagtgcacagtgcagaacaaaatatgtgtgtgtgtatgcatgtgtatgtacacctatacacttatatacagtaccccatgtgaagaaaaataagggtacgtgttatgcgcgtagtattatggttgttatttttgagaatatatctagaaagataaaaaagaaagtggaaatagttcttgcctctggtgggaagtgggactatgtgcctgatcaatagggaagtaaggaacactttttttttttttttttaaacggagtttttgctcttgttacccaggttggagtgcaatggcgcgatcttagctcactgcaacctctgcctcccaggttcaagcgattctgctgcctcagcctcctgagtagctgggattataggcatgcgcctccacgcctggctaattttgtatttttagtaaagatggggtttctccatgttggtcaggctggtcttgaactccccacctcaggtgatccgtccgcctcagcctcccaaagtgctaggattacaggcgtgagccaccgtgcctggccaggaacgctttttatttttgtacctttaaaagtgtgtaccgtctgtgtatataatcagttaaaaacaaagaaaagctgagtgtggtggctcatgcctgtaatcccagcccttaaggaggccgaggccggcggcagatcacctgaggtcaggagttcaagaccggcctgaccaaaacggtgaaaactcatctctacaaaaacataaaaattagccaggcatgatggcaagtgcctgtaatcccagctggttgggaggctgaggtgggagacttgcttgaacctaggaggcagagattgcagtgagccaagactgtaccactgcactccagcctgggcaacagagcaagtctctgtctcaaaacaaaaacaaaaacacaaagaaaaaatgtaaaacaatttcatgcagtagcaagcatcgagttaaatacagttgacccttgaacaacacaggtttgaattgcacgggtccatttatactcacatttcttccacctctgccacccccaaaatagcaagaccaaccccatctcttttcctttctcttccccctcctcagcctactcaatgtgaagatgatgaggatgaaaacctttgtgatgatccacttccacttaatgaatggtaaatatgttttttcttacttatgattttcttagtagcattttcttttctctagcttcctttattgtaaaaatacagtatataacacatatcacatacaaaatgtgtgtaaatggactgtttgctattgataagtattctggtaaacagtagactattagttttttttgttttgtgacaaggtctccctctgtcgcccagcctggaatgccgtggtgtgatcatggctcactgcagccaaaaacttctgggctaaagcaatcctctactaaaaatacaaaaattagccaggcatggtggtgcgcttctgtaatcccagctactcaggaggctgaggcaggagaattgcttgaacccgggaggcagaggttgcagtgagctgagattgcaccgttgcattccagcctggacaacagagcgagactccatctcgaaaataaaataataataataataataataataataataataataatagggctgggtgtggtggctcatgcctgtaatcccagcactttgggaggccaaggtggacagatcacctgaggtcaggagtctcaattaaaaaataaataggccgggcacagtggctcatgcccataatcccagcactttgggaggccgaggtgggcagatcacctgaggtcaggagtttgagaccagcctggccaacacggagaaacgctgcctctatcaaaaatacaaaaattagctggatgtggtggtgcatgctataatcccagtaataccagctactcggaaggctgaggcaggagaatcactcgaatccgggacacggaggttgcagtgagccgacatcatgccactgcgctccagcctgggtgacagtgagactctgtctcagaaaaaaaaaaaaaaaaaaaaaaaaaaaaaaaaaatatatatatatatatatatatatatatatatatatatatatgtgtgtatatatatatatatacacatatatatgtgtatatatatatacacacacacatatatatgtgtatatataaaataaaataaataataataaaacatttactttggctgctgttgctgcggggagaattgcagggtgtcaaaagtagcactggtggaggggtagtgatcaaagtctggtgctttagcccaaaggagaaatgatagagactcagactagctggtgatggaggtagaataagcataaatgtatcaaaaagaggagttgatagatcttaaagaatgattggatttgaagggcaaaggaagagaagaatcaaccaggtgggttcagtgaatgaaaccatcagaaacgaattgtcccctgaaatcaagactttgtgattgccatagttgtatgcttctcaaaggttcctcgtctcctcttccttggaccaaaagtcagaggcaagaatgccctcattcataccccagtggtctatacctccagcagcaagtcgagtgagcaagtgatgtcctgaaaggcccagtggatcagtggaatgaagcgggcaggaagacttagtgctcctgaaacaaggaatccagaatccaggagaaggatggctcagtggggctttcaagggacaagtatgggggttgaaggggtcactgtccctataccaaatccgaaaatattgtgaccaggaaccattctgtccaactcttctatttcaggtggcaaagcaaagctatattcaagaccacatgcaaagctactccctgagcaaagagtcacagataaaacgggggcaccagtagaatggccaggacaaacgcagtgcagcacagagactcagaccctggcagccatgcctgcgcaggcagtgatgagagtgacatgtactgttgtggacatgcacaaaagtgaggtgagtcgcaggacagaagagtgctttttgtttcagcagagcagcctggggagagataaaagctactcctggggcctgggcctgcattcctgagatgtgggtaagaggggcccagggtcagagtgtctggcaagcttggctctgcccctttgctgtcctggagactagggctaatcctgggctcagggagtggcctccccatggttaggatacaagtgctcatcaagggccacccctaggaaggaccaattttcctatcagaagcttctaagttatcctcctttggcccaaagggacacctcaagcctactctgaggaactctttccaatgaactaattcctacagtcacttccccagcaacctgtgcctcagcctcaaggcactgtggggtaggcctcagtttgtggcctggacatcggactgtggaccagacgactcctcccgatttctgtttgttttcagtcctctgaccccaagctggctggtgaagtaggtagagggaggagactttggtgcatgcatacacacacacacacacacacacacacacacacacacacacacacacacacacacgtctcctgtgccccccagtctccatggctggtcaatgattgactggcatttcacaggccgctggttgcagccccagcctgttgacttagaggtcaccctcggaagctagagccctgtcctgcctcttcagtgtcagtggtcactccactgcccacaggctggggtcttgggcaaaacacacgcatctgccctgatctgagtttgctgccctctgtcccgcagtcagccccactctgttcccactccctctccccagccccctagctagacccctctcaccagcacccctttcccttccctgagggtccccctcgctgtctttgtccctcagacatcctctttcctgggctctcctgccaggccctgctggagggacagttaaggaggaaatcgaatcagcagcgcccacccctgccccccttcctctcctcttgtcagacaccagacgaggttttttcctctggcttcccagctctgaatgggctcattctttttcagaggctcggcccctctcgagcctcctccccagggcgtgagttctgaccccagctcctccccccatccccactccagccccctctccagcttgctccaccctctctaccgcccaccgggactgggcattgtctgccagtccgggtttcttcctgggatttgggatgcagagaggatgggtttgcttgggcgggggggtggagagtgaaggggggaagcaggatctttgtagagggagggacctacagttacctggacttctttcctctgtctcccctcttggtacccttgactggggctcttgagggtaatgggtgaagccaaatctgccatggctcagttcccagctcagctctgtgaccttgggaaagttcctttagctcgtggaatctcaaggctcaaggttcctcttctgcaaaatggggaatgataacacctgcctcctctggagtcttggggactcagtgttctgaggaacgtggctgtaggtcagagtggcacagagtagggtccaatgaagcatggcgtccacagtagctttcctgactggactaacctttccggacacaacagcagggcaggggtggggcctggggagaaaggacacctctaaccctgatcctaacatcccgatggcctctaaggctgcctgcacactcatccaggtgcaagccctccaaggtgtggtgtgatgaaccagtgactcctggagccaggtcagcgcatcctcttcccgcagggctgtaagctgcaggactgagaggcaggttgaccaggtcctgggctggatgatggggtgagagtaaggggtcagttttgatacatgcccaacttttctctctagccctaagacatcctgggcaaattgcttacctcagttcccctgatcctcaccctaaccctaacaccagctcaagagaaaatagggatattgatggccatccagaagggctgctgtgttccatacacagcaatatttctcgaatgtttgtgacagcggtccaaggaataagttaattttacattatcactctggatacctgtacaaaactccaccttatccttactatatgaatgtgctagggttgtttttttgttttgttttttttttttttttttgagacagagtttcgctcttgttgcccaggctggagtacaatggcgcgatcttggctcaccgcaacctccgcttcccaggttcaagcgattcacctgcctcagccttcccgagtagctgggattacaggcatgcgccaccatgcccggctaattttgtgtttttagtagagacagggtttctccatgttggtcaggctggtaccaaactcccgacctcaggtgatccacctgccttggcctcccaaagtgctgcaattacaggcatgagccaccgcacccagccgtgctagggtctttttctgttcaattcctttctctctcttgctctctttctttctttcaatggagtcttactctgtcacccaggctggagtgcagtggcaagatctcagctcactgcaacctctgccctctgagttcaagcaattctcctgcctcagcctcccgagtagctgggattacaggtgcctgccaccacacctagttaatttttgtacttttagtagagatggggttttgtcatgttggccaggctggtctcgaactcctgacctcgtgatctgcctgtcttggcctcccaaagtgctgggattacaggcatgagccgccatactcggccaactttgtattactttcttaaagagagtttcccaaattatataagcttcaggccccacaaaacctagatctgccccagtataactaaatctgggaccatttattgagcaattattatgtgccaagtattgcgctgagtgcttccagagcattatctcctttaaccccagcatagtatgtcagatgctgttttacagatgagccaactgagaccagagatgctcagtcacttgcccaaggtgacatgactgatatggaatagagtcaagatttttttttttttttttgacacggagtctcactctgtctcccaggctggagtgcagaggcgcaatctcagctcactgcaagctctgcctcccaggttcacgccattctcctgcctcagcctcctgagtagctgggactacaggcacccgccaccacacctggctaattttttgtatttttagcagagacagggtttcaccgtgttagccaggatggtctcgatctcctgacctcgtgatctgcctgcctcggcctcccaaagtgctggaattacaggtgtgagccaccgcgactggccagattcaagatttgaacccaggtcctcttggtcccagaggcccctgtttctcaactccctaggatggcatagcaacctgtcccacaagaggtgcctgctttaagtgtgctcagcacatggaagcaagtttagaaatgcaagtgtatacctgtaaagaggtgtgggagatgggggggagggaagagagaaagagatgctggtgtccttcattctccagtccctgataggtgcctttgatcccttcttgaccagtatagctgcattcttggctggggcattccaactagaactgccaaatttagcacataaaaataaggaggcccagttaaatttgaatttcagataaacaatgaataatttgttagtataaatatgtcccatgcaatatcttgttgaaattaaaaaaaaaaaaaaaagtcttccttccatccccacccctaccactaggcctaaggaatagggtcaggggctccaaatagaatgtggttgagaagtggaattaagcaggctaatagaaggcaaggggcaaagaagaaaccttgaatgcattgggtgctgggtgcctccttaaataagcaagaagggtgcattttgaagaattgagatagaagtctttttgggctgggtgcagttgctcgtggttgtaattccagcactttgggaggctgaggcgggaggatcacctgaggttgggagttcaagaccagcctcaccaacgtggagaaaccctgtctttactaaaaatacaaaaaattagctggtcatggtggcacatgcctgtaatcccagctgctcgggaggctgaggcaggagaatcacttgaaccagggaggcagaggttgtggtgagcagagatcgcgccattgctctccagcctgggcaacaagagcaaaagttcgtttaaaaaaaaaaaaaagtcctttcgatgtgactgtctcctcccaaatttgtagaccctcttaagatcatgcttttcagatacttcaaagattccagaagatatgccccgggggtcctggaagccacaaggtaaacacaacacatccccctccttgactatcaattttactagaggatgtggtgggaaaaccattatttgatattaaaacaaataggcttgggatggagtaggatgcaagctccccaggaaagtttaagataaaacctgagacttaaaagggtgttaagagtggcagcctagggaatttatcccggactccgggggagggggcagagtcaccagcctctgcatttagggattctccgaggaaaagtgtgagaacggctgcaggcaacccaggcgtcccggcgctaggagggacgcacccaggcctgcgcgaagagagggagaaagtgaagctgggagttgccactcccagacttgttggaatgcagttggagggggcgagctgggagcgcgcttgctcccaatcacaggagaaggaggaggtggaggaggagggctgcttgaggaagtataagaatgaagttgtgaagctgagattcccctccattgggaccggagaaaccaggggagccccccgggcagccgcgcgccccttcccacggggccctttactgcgccgcgcgcccggcccccacccctcgcagcaccccgcgccccgcgccctcccagccgggtccagccggagccatggggccggagccgcagtgagcaccatggagctggcggccttgtgccgctgggggctcctcctcgccctcttgccccccggagccgcgagcacccaaggtgggtctggtgtggggaggggacggagcagcggcgggaccctgccctgtggatgccccgccgaggtcccgcggccggcggggccagaggggcccggacgagctctcctatcccgaagttgtggacagtcgagacgctcagggcagccgggccctggggccctcgggcgggagggggcagttacacggcagcggctcgagatggcccatccaagagactggcgctttccaggctccgaggggctccgggaacttgtcaaagaagttctctgaaattgttcagaaagttttcccgcaaagggtgtattgcgtagagcgcgcgcgcgcgtttccccccttcttgagccccctcaagctttctcaaagcctttccagttggcagcctccgcctccggactggcctgggctggattccttgggggggtcctctgccctgcccctcctccagcccctccccgctccccttcagacgattttggtttggttgctcctgcttctggcggggtcgggtgtgtgtgtgtgtggtggagtggagggtggcatagcaacctgtcccaaccagagccggggaggaaagggtggcccggagggtggcctcttgctggggtctgggttgggggcgggggagacgtttgctttgaacagattcttggggccagcttagggactgtgctctgtgacttttggagcgcgtggaccatggaggggtgggggtgggtttcttggggtgtaaagtgggagagttcccagagaaggaagctaagaaataaggccagatgggagcctagggagggctgcgttgttctgctgccttttccttggtgctgtgcgtggggaagggtgagtgggggcagtgtgtatcctgacccatctgtccacctgtgtgcattaatcataaaagctaacatatagcctgggccaggtatactctgccaggaactgtttgtggtgttttgcatgcattctcctttaatcctagaacacccctatagtggaagttctgccagcattctggactgagtagcagtccagaggttgagtagcagctagtaagtggtggggtcaagatgggaccccaggcagtgcgacccccaaccatgcattcgaaatcgctatatggatgagtgcacctggagcaatgagggacactgctccctgagtcactgggctgcaggggagacaaaatgaaagtgttctgggagtcgtgggtggtctccataggtcagagggtctggggagggagtgggtgtcatcgtggctgtgtgttgcccgaggggccctctgtgagtgagtgcatggccgtgttatctctgcaggtctacgccagggtgttcctcagttgtgtggtctttgtatttgtgtgtctgggctttgtgttgccaaacagcagtctctctgctgacttggggacacaggctgaactctgtcctctgcaggaactcccttaaggtgctgggccagatctgccataaacagagggaggtagccttctatggccacgccttcttgctgaggaagaaggttcctctcttccagggagtacatccttgccctccctgtttcccagacaagcatcttcacctctcatcttctgatgagaagggtgaggccatactgagctgtcaggctgagctgctgcccttcctcaccttgggctgggagttgatcagggaatggcagttgctgcagagctggatttgagggctgggttctctggatggggcctcctcatgtcctcacccctcaacctgcactattgattgtgttgtgcaggagttagttaaaaagtcattgcacagcctgggcaacaaggcaaaactctgtacaaaaaatacaaaaattagttggatgtgattacacgtgcctgtagtcccagctactccggaggctgaggcaggaggatcacctgagcccaggaagttgaggcttgcagtgagctgtgattgcaaatgctctccagcctgggtgacagtgtgagactccgtttcagaaaaaaagtataccacccagctgcctccagcacccagattttacccaaggggtgaggtctggggcaggaatgtgggggaaggggaggcctagggggagccccagaggggtcaggatttttctgaaatcctttcttagaggtatgggttttacaaattgcagcaaatacatccttttaatcttgcagaactccttcatattttaattccagtatgattcttccaacagcctcctctctttactatacttggggaaagtactcattttatttgtcaagaaaaaaacaattgaaaagatagggatcaaatgtaaaaagaaaaaatacgtggcattccaaagtcaaacacaaagcatgtttaattttctcgtggtttgggattacccatattcctgctgtatgaacctgtcttgtcttaacttttaagaaatgtacggtgtacttcctatatgctaggtttttatccatgctttcatttaatctctgtgacagtcctgtgaagtaggtgcacagatgagaaaatggaagttcagagaaatgaagcaacttatccaaggctcccagctacccagtaatgtccagggaatttttggactctgaagaggaggcattaagaggtggttagagtcttattccagccaacaataatgggttgaacaaagccttaggggcaggcaggtggccagatgggaggagaagcgctcctcttgttcaggcgaatgacctttccatccacttctctaggctgtagaaagtggagctgagctgggggccctgaggttccctcttgacttcagagtcctctcccttcctgtccagccaatgcctgtcttccttttgggccctaccagcatgacagggggctgcgggcaggaggggacagaggccacgttgacacacagggctgtgggtgagagagacagctgaagtgtcagcgtgaggggccagtgtggggctgcggctgggagggctggggtggggcccagggtagttgtgcctgtccttgggtgatggaatgatctggaaagagattccttccctgccctccacctgtgagaagcccctctagagtgacatctccatcttatgtttggccacccatcctccccctgggaagagagccgaggtggggtaagggatgtgtactctttcaaggagtgggagaattattctagcgaatgtttgtgttgtcccagttctgtttacaaagcctcgtcatgtttacagatggctgcgcaattcattacctcatttaactctcatgtacctcctctgagggagtaagagctgttacagccaagtttaggtcagtaaatattcaccaagttgcaggtactgcagggcatagagatgaatccgatttagcttctgccctggaggtctgggaacttgctcaagatcactcagtgagcagctgagctagggttctcaactaaagaccctgggcccaggccctggtctgatgtcaggcctgatacaccaggtgtttgtggtcggggaatcccagtgtcacttgaatgggctgtgacattatgggtctgggagagctgagctttggggacacaggtcattttactgtagtattcatggaaaccaagggaagtattggcttttctgctgtgagcaagaggagcagctggggctgcaagctggtggggaggagagaacccacctgagagaaacctcaggactggggtcaagtcctgaccaccagagtccagagagacatgaaggactgtgaccagctctgagcagagagatggattccatgacctcaactggtcccttttgttcggagactcgtgactggacttcattcatccactcattcattcattcactcagcagacacttatctagcgctccctgtggctggtcctgcctcatactgtctttgctctggagaattggaggttggggttcctgaggggcagggtcctggagacaaggacactcctgggtagaattaggacctaccccccaggaaatcaacggggaccaggtgccgtggctcacacctgtaatcccagcactttgggaggccgagacgggcggatcacaaggtcagcagttcaggaccagcctggccaacatggtgaaacccgcctcaactaaaaatacaaaaattagccaggtgtggtgtcaggcacccgtaatcccagctactgaggaggctgaggcaggagaattgcttgaacccgggaggcagaggttgcagtgagccgagattgcgccactgcactccagcctggcgacagggcgagactccatctcaaaaaaagaaaaccaatgggacagggcagatatggggacaatggtaaggagatgggagagtgggagggaggtgtcaggaagaccttcttgacttcatgtaggctggtgggggtgttagccagcaagcctccagttccctgggaaccgttctcagggtaccaattttaccacctgtctgcaaacactttaagattcttaatcagactcaaattggccacaaatcaggtaaacaaactcactagtggggtggggctaccacccgttctgaccctccagcccaacccagcccagccaccctgccctccgtagagcctgtggtgtttatcggtggcattgggagaattagtgtgtatttatgttggcgtggggtgtggggtggatttgtgtgtgtgcagttaggcctagtggaaggaatgtgggatctgaaggcaggccagcctgagttccagtcctgcctgttgctcacaagctttatgaggcgagagctaacccctgccagcctcagttgtcttctttgcaagatggaggttgcagccccagtctctggagcatgttatgcagatccaccgagagtgcctgccaggcacacagtaggtgctcagctcagttactgtggcggcccccactccccattgttgttgttttcctattgcctggcggccacagctggtatcccttgaaaagggctacagggggtggagtcggaccctgccccagccctgtggagaccctgggcttgggccagggcctggggtctgggcctgcagacagctgtgtctataaagcagctgaagggctgaggccgggggaggtcctggcagcagggcgttattttgggcctggcctgccacccccagctcctgtttctcttgggagtctgttgggggaggaagtgtggggaagaggagggggtgcaagtgggtgaggcatggagtggggaggcctccctcagggacatggacccttgagttctatttctgttcctccctcctgttcctccctctttgtccttatctgcctagagaggtgggaatagaggccattctgagtatcactaggagaccaccagtttgtggccactggccactggcccaggcagggaacctgggggcttgccctaccagcctctcccagcaatctgaaggcagggggtacctcgtattaccccctaggatttgaccttaggctccaacttgctgggagagcagtgcctctggtgtcagaccccaagccagcccttgtgctgtccctgaatctgcatgtagcctgtgggaggcggagcagtgaccggcaggaattctgggcagctcaggcacctgtgggcctgagggtgccctctgcccccacccttccgatctcctgggcaagacacgccaggtgattcatctcaccagagcagaaaaacaagttcaactgggcactttaatctcccctcactggcaggcctggtgtgagctgctaccccggcgcccctcaccaggggtgctttacctcctctagtattcctgaccttagtgggcatttctggtctcagggataccaggctggggtccaagtgggccaggtgtggcagttcagccctatgccccatggctgatggctcgcgctgggcaggtatgcagggctgacgtagtgcctttgtggcagcagtttcgtggcacacattctgccagctggttctggagtcttgccctgaggaggtggccagggtgagggtgccagcgcaggaacctttggcgcatgcttcaccctggcctgggatctgcagcctgggtccagatgcccacaactggaatctgacgctccttttctcttcatgggggactcccagaggtctctgcaatgaccagagccccggttgtcccatgcctcagctgcaactccagctgaccctccttccccactctctgggtggcattacgggggtgtggatcccttgccaagaggttggcatgtgggtgtgctggaatggcatagggagaatgcaccgagtttgtttgcttgggagaggggcagggggtatccagaagattcatgattcgtcatcgcctctcttgggggatttttacccctttgccctgagttgtgcctttgggacaaaggaagcctttctttgccagccaacaccctgtactggcgggcgagctccccagggctggcacgctggggcagcctctgaatgcacagggtgggcctagtcagaagaagcctttcccctgaaatccctctacttcccaagcacgca

SEQ ID NO: 51 - DNA, 157224 bp, Homo sapiens
ggaattccaagaagacactcacacacaacatactcttgttgccaatgggatgtgtgcacacagctgtgcatgcaggctgggatgcttgatgaggtccctgcagcacatatacacatagctcacacatcacccctgcatggagaggaattatctgcacatggagggcggtctttctttccctatccaggacactattgtaaccccagagcaagctggcttctgcaagttgctagcctgaactgtgccccaggtttttccgtggatcctaatttcccagatcctggcagctgcttgagtcagccatggtgatggatctctgcagctcttctgccaggacaggggcagggggaacctgaggtcatcctgtgcacctgtcttggccacagtgtggtgccttctctggtgatcaccaaatgacaggctcagacatctcatctgggagaggttttggaaacagccttggtttcaaaggaaagaaggggctaatgggaagcgagagaggcagagtctgtgcctccttgtgattccctctccttacctatctccaggaggtaggtagcccctcattatcagaaaacattttttgagtgcctgccctcagggagacaccatgctttactttagcacagtgcctcacaattttctggattgacagcagccctcagaatctggatgtgctgtccccattggagggtccacagtaacacacatggtgacatccaccttactcatgttaggctaccaggccaagggatgctccaagaccttccctagaattcctcctccctcaaagaaggagccagctccttcaggggctggtgtggctgccagccaagaggcttggggcaggcctggggcatgcagctgatacctgcccaccagatctccaaggaacaccctcctcccccactcccacagcctcattcagatggccactgggctacaaggagacagtgctcacttctccccactcccagaaaaaacttcaaagctggacagcctccctttccattgtaacctgttccaagatcctccacttagactagatacactaacgacccaccaagcaattttgctaggcaggaccaaatgtttaatatagtaggggttgagctaggcctaggtacggaaacttgaggagtgaggcttgggctggaattctgggagaagttgttgaggtcaagagaggtatgaggaagaacaacttgatgtgagtgaaataggacagggggacatgaaggggagggcctgaaagaatctgcctctctcatctaattatcaacatgtaaataatatgcaaataacacactctttgtctagagaccacaaggccactgctttttggaagtggattacagagggcccaccagacagtatctctgagatcctcagatatgggacacccaggctcaagagagaggccagagtgcagccatctggttcttgcttattccctggattggctcactttctgtgagcctcagtttccctatgtgtgaaatggcaagactactggatggtctctaagggttttttccagtaccgacagtctgggattgtatgacctgggcccagtgccagggcagagtggagggtttgattccattctggggtggaagccaagatccttggctctcttgcccctgctgcccacctcagcagttctgtcatgctgcccccgcagcccgcaacatacctgccatcccaaacatgggcagttttctgaaggcagtgttttcttccatccatgcctttacctacactgtttctctgcctggtatgcccttcctgtttcagcccctcagttggctaagtcctccaactccaacagccttgcctaccttactcctccactccccagttctgacaaggtgcctcccttctgggtgcctctatgcactgtctctttacttctctcttgtcccactagaccatgaacttttggttttgttccagactaaatctccattataagtgtattagtttcccaaggctgctgtaacaaattaaccacaactctggtgtcttaaaacaactgaagtttattctcttacacttctggagatcagaggttcaacatccattttattataccaaaatcaaagtgttggcaggggtatgctctttctggaggctctagaggagaatctgttccttgtctctttcagcttctagtggctactagcattcctttgcttgtggccccatcactgcagtttctgcctctgtcttcacatcaccttctactctttgatatatgtataatttctctctctctctctctttcataaggacacttgtgttggcatttagggcccacctggataatccagaataatctccccatctcaagattcttaatcacatcctcaaagatgaacccattttccagttaaggtaacattcacaggttctggggattagaacatggacatatctttagaagctatcagactaccaaaataagcaaagacattttaaaatttaccatttattaagtaccatatgccagacacctacatacatttttctcacctcaattaagttttacaataaccctgaaatgtaggtattaatgcctgtattctatagacgaggaaactgaggctcagggagattgagtcacgtgcccaatgtcacgtagctggtaaatgacagaactaggatttgaaaccagatgagctgggctccaaagccaacatgctttttgcctcaccaacagcctctgagcctactccaggccctggcacaggtttcttgcctgaatggatgcagaaaaagaaagataggtagacaagagaacagacgatgaggcccagcatttttagtgatactgcttctagctttcttttgccaaagcccccttaccacccctcttattctcccccaccaaccctgacctcttgtttcagaagcctggaataccccccagcttgcagccccctgccaactactgctgcccagaagggtggcacagtgcctggacttcaggcagaatctatcaaatcacagaaccagagggtgtctggaagtcacctcatctagtcctctgttcacatccagccctgctcacgaggacaggggcagacaggttcagggtagtgggcagcagaaggatgaagtgcccatctcccttcagctgccctttctcctttcttacttcttacacaatttatattggaagtcctcactcagatctgactttgcagacatcatgcataatgagaattggccagaatcaggagtcctatggtcataggactgacccagtcctagattctccaaaaaataaaacgagatttttggctaggtcctttcacctctgtgggcctctaattcttcatctttaaaatgggatcgataataggggtaataataatacccaactcacagggcctttgggataataacacagcccaggaaagaagcatccaacccacggcctggagcaaggcaggtgctgcaggaatattttataacaccccccgtcagccctccagccaagcccctttatcctgggtaacacaaggctctgctcacctcagccattctggtctgcctcgcgcgctagactgtgaattcctcttggcaggatcttgttcatttctaatcaccgcccgttcccctccctagtgtctagcctgtgctcgggtacgtaagttcaacacacatttaataaatacggccaggcgcggtggctcacgcctgtaatgctagcactttgggaggccgaggcgggcagatcacttgaggtcaggagttcaaaaccagcctggccaacatggtgaaaccccgtctctacttaaagtccaaaaaaattaaccgggcgtggtggcgggcgcctgtaatcccagctactcgggaggctgaggcaggagaatcgcttgaacccgggaggcggaggttgcagcgagccgaggtcgcgccaatgcactccagcttacccaatagagcgagacgccgtctcaaaataaaataaaataaaataaaataaataagtgagcgagtgtatgagtcggcctcccaagtcctgagaggctcagagcttgacccccaccagcaacctttgcccgcacgaccatttcccctggggtcctggcggcgaccgcaatggaggggaaagaggccactgcagctttaagatttctctcgggcgtcccggttgccaaggcgcggttgccagcgccctgcgcggagctgcgtcctgctttagcgcgcggccttcgggtttccgccatcgccgccgccgccgccgccgccgccgggccgcgccgggctccgctcctccgaaccgtctggcggacttggcaccggcccccgctcctcagtgcccccgcagtgcgtggcaggctgcggcttcattatcctgattgattcctcctgctccccgacaccatgggggccccggacaaggaagggaggcggaggcggcatctgcaggccccttccccggccctcgcccccagccgctcctcaggccaccctgctgtggctggccaggcagggcggggatggaggaccggccccgcctctgctctcttggtgggcggggaggggagggccccaagggagagcggagcagtgtccggtcggtgctcttccaaggttccagctctgggccgcgtacaccctgcctcggcccgccctcagcaaagattttgcgccttctgaaccgggaggatatggaaaggttggggtggggaaagaacacagtggaggactgagaacttcaggaaaacaagccctggtaaaacgggaaaggtgacatctctgaggagcgttggtcacgtgtgtcaaggcctggtgacgcgtgtcttatgtgcctccctgggcatcttctcagtacagttctcagtagaagcaggggcagggtctggacccaaccaacacaggacaccccgcaaggatctaagcttaaaggaaggccaggagtctgtgtgagggagaggaccttttccccagaatccagcatggtgtgcccaccccacgcccaaaccaagtactgacaccttaaaaagagcatctgggccgggtgcggtggctcccgcctgtaatcccaacactttgggaggccgaggcgggcggatcatgaggtcaggagttcgagaccagtctggccaacatggtgaaaccccgcctctactaaaaatacaaaaaaaaaaaatagctgggcgtggtggcgggcgcctgtaatcccagctactctggaggctgaggcaggagaatcgtttgaacccgggaggcagaggttgcaatgagccaagattgcaccattgcattccagcctgggcaacaagagcaaaactccgtctcaaaaaaaaaaaaaaaaaaaaaaaaaaaaaaaaaaaaaaaaaagagcatctggggccagaactgagattggagcatctacttagttccgccacttggtttgtagcctgggcaagtcgctttacctttcttagccatggcttatccatctatacaatagggataagccagttgccaatgactaaatgggataatatgtaatgtgtagatggcaggaccttaagtcctctggcaaaaagaagaaagggagataaggggctgacctctatccctgctgctgttttgggtggataccttgagggaggtgagtcttctccatatgcttaaatccctgcttaactggaagattacctcaaaccttccagccaaagccgccccattgtcacagtagaggggcaaaactgctctttacctcattggcattgcacggattcaatatctaggtttacaccaggctctctactactgtccttctctccttgggtcctctcttcccacaatccctgacagtctccctctcgtgccttgcccctgtcctgtccaagggccagacctgggaagtttcttccatagactccaacctttgatccctctcagccctgggaaagagggaactggtggagaatttgaggccgtttaatgtatacctgtcatgcttgtgaatgtgatctgagcctctctggcaacttcagtgtctatctcagggcctgtttcctcttctgtaaattcattattcttgcaacccacattgactgggtgacaacagcagggcagcatggtgcacccagcaggttgggagtatggaaaaaacacaggatggaaagaactccactgaggccgggctcggtggctaatgcctgtaatcccaggactttgggaggccgaggtgggcagatcgcctgaggtcaggagttgaagaccagcctggccaacatggtgaaacctcgtctctactaaaaatacaaaaagtagccaggcatggtggtgcgcacctgtaatcccagctactcaggaggctgaggcacgagaatcacttgaacccgggaggcagaggttgcagagagctgagatcgtgccactgcacactgcagcctgggtgacagagtgagactccatctcaagaaataaaaccccactgtgaaactactgatctggggacaacagaccaatgcacacagcaggctctccaatactaggggtcggtgcagggacacctcccagattctagagcattccacagtgtcatgatgcttcctcctgtccttcctgagtacagcagactcttcccctagacttctgtcagaggctaattcatttcctacgggaaaagacatcctaaaatttgagtctggggcttttgttcattcccttttgttggaattccctatttttacaccagtcatccagtatctttatattcaaagggaaaacacaataaaaatacttccagtttgccagtagccagaatcaggttagctcatgtatctaggtttgcaaagctgcccaggacctttgttcagtgtggccctgtgtgtggctgccttagtctacccactggcctgtctgcccacccatccctggctggcctgccctatcttcagcgcctatagccctcagctccacttcctattaatacaaaccatgtgggaccctcactgtggcgtctccaggcaaaagatgaagccacagccgcctagtggctgccagggaggctggcaggaaggggcatctctacccggcgtctcctgggaaacagcgagctccccagagaagggacatttggaaataaaatttctgccgttgtgtgtcaatgtgtgtgttgaggcaggagagggagttaagaagcctccccagcccctctgttcctttctcctcaggaaaagcctcttggagcaactctcccactgcctcccaaaactccagccccttgtaggctctcctgggactggacaagtggctgaaaatgttccttcagattcatgatgcaggtgaagaagagcactggactgagagtcagaggccccagttctgagcttcctgacttaccccgtggctctggcctgttatacctccctttctgagtcctaagttcctcctctgtaaaatgaaattttttcatcattcctggtctctacattgggcctcctccacaaagtccaggaatatagttggggcattctaggccattctttcctatacttaggacagataactaatagaagcttataattcctagagtgaccttgactctaggaattctacagcgaccttgaatgagccagggcccttcacctgcccatgcattcattcaggcatttgtaggtgccttttgagagtgaagtctgtgctaagagggtgaagtctgtgctaagagggtctaaagctgccccaaattttttttttttttttgtagagatggagtcttgctctgttacccaggctggagtgcggtggcgtgatcttggctcactgcaacctccacctcctgggttctagcaattctgcctcagccctcagcctcccaaatagctgagactacaggtgcacgctgccacactcggctaattttttgtattttattttatttttatttatttatttttagatggagtctcgctctgtcgccaggctggaatgtagtggcacaatcttggttcacggcaacctctgcctcccgggttcaagcgattctcctgcctcagcctcccaagaagctgggactacaggcgcccgccaccacgcccagctaatttttgtatttttagtagagatggggtttcaccatgatggccaggatggtctttatcttgacctcgtgatctgcctgccttggcctcccaaagtgctgggattacaggcatgagccatcgtgcctggtcctatttatttatttatttattttgagacagagccttgctctatcacccaggctggagtgcagtggcacaatctcggctcactgcagcctctgcctcccaggttccagcgattctcctgcctcagcctcctgggtagctgggattacaggtgcagaccaccacgcccagctaatttttgtatttttagtagagacggggtttcaccatgttggccaggctggtctggaactcctgacctcaggtgatccacccaccttggtctccccaagagttgggattacaggcgtgagccatggcacccggccatttttttgtattttagtagagagggggtttcaccgtgttgccaagcttggtcttgaactcctgagctcagcagtccacccaacttggcctcccaagttaggattacaggcatgagccactgcgcccagcagctgcccaaatttttatgaaagaggcatctcagcttcctcttgctgtcctgtaccagaggtcagctgcatgccacattccttccatgatgacccccttcatgaggagctggagggactaggaaccttctcttcccctagtgtccaaagccaacctaagggagaagccatggtgtctcctgggaaatagaggtgggggtgatgtccctgccccctcctctctcactcccacctatttccctttgctctttcttgctcttgatagtcaagccccactcctagcccaatccactgctctcctgtaaaattatgggatgtccaaattagagacaggagccctttggaaccacaggcagaggtcagaggcgccctagtaaaagcaagtggctctctcccagctggaggccccctcttggtctcacctcctagagcttcccttcctcaagagactccaccttctaggcaggttggggattgctgagagggccctccatgcaggagacaacccccaaaacttggaggagacagaatagctctagggaggaggagggccatggtccctgcagagacccaggggcccaggcctccttccttcccatcttgtggcttctcagcccttgatctacattgaaggaagggtcaggcagtgggaagtcggagagaggaaggggaatgagggggaatgggggacgctcagaagcagggagaggtcctggagatctggattctgacttgtcacctttactgggcatctactgtgtgccaggctctgtcccagttttacatagattatgtcatttagccctcagcccagcgctgtgctgtggcattattattctgctctgacagagaaggaaactgagactcagaggccttatataacttgcccaaggtcacacagcttgtcaggagtgaagccagaatcctagcccaggtctgtcggcctccattgggttctccctgctgccaaaaagtcctcctcctggaaaagcaggtctggggttggggttttcagttggagctcatcaggatccccagaggcaaagctattgtcatctgccttcctcctcctcacccatctgccaggcaagtcgcaggtgagcccccaccaccatggcccctgccctagccccaggtgccagcactgctttgcctggctcccaccctctccctggtgcccccaaggtggctctgaggtcaccccacaccccagtgcctccattctgcatttctacatctccgaatgcttgggaaaaacagaaggagagaggaggtcaattgaaggttggaaatgtggactctgactataggtagagcattcgggggcctggttatcttcctcagttcaaatgaaccctttccccaactcccaccccctcacccccagagacagccagagctttgcttagttaatgaaatacaaaagaaggaatcaggggtggggggtggctccagagccctggaaagcgagggagagagaaaaagttgggtctcttccaaagagttaatgttccacagtatgatcgattaggtgtcagatgtaatttcaaaccaatacaagatgaatggcataattttccctctctcattttagacagaattaagaatccattagctaacacaaatttttggcaagtttaataggagctcaaatctacattcggaggaaatgctccccaaagcctgtttcaagcttttacttctcaggccccctgcctccaacgtcctcttaccaactcactgttgtctgtccacccaccaacccctcctcccccgccgcatgcagcccccactcccttcctctggtccccctacatgcccctccccaagccagcccaagattaactggcctgacctctctcacaaaggccgggcctgcccaccattgtctttcagtggcaatgggtgggggaaatgggtggaggggctggcagtgggcccaggagaggggagaggttgctgaattggccctaggctgcagacaaaccctagggagaggggtatattggggccttgggcagtttgagtctcagctactcctcagtttcacctccagaaaagttgtttttgtcctcaacaaagcattacccagttcatagggaggacacgagccccatccttgttgtctcttatagttacatacattaattcacagagttaacctgaggtaggaagaacagctatcatcccattgcatacatgaggaaactgaggctcagagggttggactttggctctgctgtttgctctcttactagcgccagaaggcacttacctctgggccttaatttcctcatctatgaaatgggaagaacatttagtaaccagctcataggattatcctaaggaacaaatgagatggtacacatcagagctttagcacagagcctagcacattaggagcgctttcatgactgcccacccaggcagaggtgccgcgtgtccgccctacgccagctttgtgctggggttgagacctggaacacagcctgaatcagctctagcctcagcccgtcaaattcacagcctggtaagggagacagacatgcggactgacccctgccctggaagacaaaagaggctggaaaaagaattatggtggcttacccttactaggcatttatggtatgccaaatatgggagcaaatcctttgtatatagtaacatgtttactcctcacaaccaccttatcagatagatactattatcatcacccccattttccagatcagggaactgaggcccagagaaatgaagtaacttgcccaagatcacccagctaccaaatggcagaactaagattccaattcaggcagcctgattctaaggcctgtggctcttaaccccaatggatggtgaagcatgaggatgtgatagaccctgcttggggtctaggaatgcttctcagaggatagaaggcttgaactaggtctttttttttttttttttttttttttttttttaagacagagtcttgctctgttgctcaggctggagggcagtggtgtgatctcagctcactgcaacctccgcctcctgggttcaagcgattctcctgcctcagcctcctgagtagctgggattacaggtgcatgctgccatgcccagttcatttttgtatttttagtagagaacaggtttcaccacgtttcccagactggtctcaaacgcctgacctcaggtgatccacctgcttcggcctcccaaaatgctgggattacaggcgtgagccacggcgcccggcgctgaactaggtcttgactgatgagttggagtttgctaggtgggcaaggagagaaagagcattctaggcggcaagaacagcatgtgcaaaagcaccgaaaggaggctcagcatgggaggcagtgagtaacgcgcttcttcaccaaaacatggggttcgtgcggaggatggcaggaaacaaggttggataggcaggcctgatgcttcattctgacaatcctcggcaagttgggaagttcttcctattgtctgactcctacagacagctttgcatgctgtgctcaagaactatgatttaaatcacgttgtcataataataggcatagctagcatctctcgtatgccaaatgctttatattgattatcttgtttctcctttacaataaccacatgaaccaagtactattatcccatttttcagatgagcaaacagaggctcggagatgcgaagtaacttggcccgagagagacagctagaaagtgacagagctaagtttcaaacccaggtctgacaccaagcccaaactcttaatcgcttgcttgctgtgtgctggtaggcaatgggggaactttggaggaattttcagcagtgaattgaattttagaaaaagaattctggcagagtgtagaggttggattggaacagggtgagactggaggcagagaagccagccgtgaaactgtttctcttgtccagatgaaagttccagatggagaacgatgggaggaaaggcccttccttatccatggggatgaaagagagggccttttggagcccaaggaataataatcatactataggcagggcgcagtgactcatgcctgcagtcccagcactttgggaggccaaggcagggggatcacctggggccaggagttcaagaccatcctggccaacatggtgaaaccccgtctctactgaaaatacaaaattagccaggcacggtggcgcatacctgtaatcccagccacttgggagcctgaggcagggaaatctcttgaacttgggaggcggaagttgcagtgatctgagattgcgccattgcacgccagcctggatgacagagtgagattccttctcaaaataataataatcataatcatcatcatcatcatcatcaccatactattaagtgcctaccatgtcctctgtaaggaagtttttttttttttttggacatggagtctcgctctgtcgcccaggctggagtgcagtggcgcaatctcggctcactgcaagctccgcctcccaggttcacaccattctcctgcctcagcctcccaagtagctgggaccacaggcgcccaccaccatgcccggctaattttttatatttttagtagagacagggtttcaccgtgttagccaggacggtctcgatctcctgaccttgtgatccacccgcctcagcctcccaaagtgctgggattataggcatgagccaccacacccggccaggaagtatttttttttaaataaaataagataaaaataagtgcttactctgtgccagtgagccatttccaacttgcacatgctgcaaagcagatattattagccccatttaacagatgagaaagctgaggctcagagaagttgaccaacttcagagccaggactggcctaaagccccagcctttcccttctaccacactgccataaggtgattgggccatacattagaagtcagctcttccctctcaacctggcttaatattccctgggtacatatggagctggtccttattttggccccagcaaatggcgttgagctgagggaggtagaaaagggatgagggggagtggagaagggaaactggagaggaatgaggtctggagttcggaggatctattgctgactattcaggaagacgtaaaggaaggcacacaggaagattagtggatttaattctcttagcccttaagaggagaagacacctctgccgggcatggtggctcacgtctgtaatcccggcactttgggaggccgaggcaggcggatcacaaggtcaatagatcaagatcatcctggccaacatggtgaaaccccatctctactaaaaatacaaaaattagctgggtgtggtggcccatgcctgtagtcccagctatctgggaggctgaagcaggaagatcacttgaacctgggagtcggaggttgcagtgagccaagatggcaccactgcactccagcctggtgacagagcgagacttcatctcaaaaaaaaaaaaaaaaaaaaaaggagaagacacctcattcctttacttcatttcctaacttttggtaaatccttccagctgtctaactcctatccctcctaatagagtcacaaaccaccccagttgccagttttaaggaagagctcctatccatgctccctaccatgagggcatacttcatcctttcttgtggagtaggaggtaaggagatgggggagtattccacctacttttattttttgagatgaggttttgttgtgttgcccagactggtctgaaactcctgggcacaagtgatcctcccacctcagcctaccaagtagctgggacacaggcatcgtgccagctcatctacttacttttatatcaattaatacccagaggaagctaggttcccagagtattccaccaaaaaggaggaaatgaccaactcttgccccagtagagagaagacagagaatgcttggcaccaggtgggtctcatcgcctgcccctcaagaatggttgccacttttgagatccttgatccccatacctttattattgagtccattcatctactcgctccacatttatttattgggcacctaatatgtacctggtcttgtcctaggtgcagggagtgctactaaaaacaacccccaaccccaaccaaggagcttgtgtatgaagtggggggagatagacaatgaacataataaatgtgtagaatacatagtgtgttagatggtgaaacatatacgaaaaaagaaaaaaccaaggaaggtgggccaggtgttgtggctaacacctgtaatcccagcactttgggagggggctgaggggggcaaatcacttgaggtcaggagttctagaccagcctgggctaagatggtgaaacctatttctactaaaaatacaaaaaaaaaaaaaagctggatgtggtggtggtgcatgcctgtagtcccagctacacaggacgctgaggcaggagactcacttgaacccggagaggtggaggttgcagggagtggagataacacccctccactgcagcctgggcaatagcgcaagactctgtctccaaaaaaaaaaaaaaaaaaaaaaaggaagaaaggaaaagcagtacagttttgaatggggcagccaggaaaagactcttagagaaggtgctattttagtatggatctgaaagaggtcagatatctggggaagaactttcctatcaaaaagaacagccagtgcaaagaccccgaggcaatagctttcccagagtgtctggaagagggaatgagcaaggggaagattgaaggagttgagtccagagaaccctagggtcagactgtctagggccttcaggttttcattctgaatgaaaaggtacaccacttgagggctcagagttctaggcagaggagtgacatcatctgacttagtatttaaaaatcattccagttgcctagggctgaggtattggaaggcaggtggagagagactgctaatgggatgggcttcttattagagtgctgaaaatgctcagaattggccagttgtggtggcgcacacctgtaatcccagcactttgggaggctgaggcaggtgaatcacttgaggtcaggagtttgagacgagcctggccaacatggcaaaacaccatctctactaaaaatacaaaagttagctgggtgttgtggtgcacatttataattccagctacttggaggctgaacctgggaggcagaggttgcagtgagctgaggtcatgccactgcactccagtctgggtgacagagtgagactctgtctcaaaaaaaaaaaaaaaaaaaccaaaaaaaaaaaaaactccagggcttggtggctcacacctgtaatcccagcactttgggaggctgaggcaggcggatcacaaggtcctgagttcaagaccggcctggccaatgtggtgaaaccctgtctctactaaaaatacaaaaattagccaggcgtgatggtgggcgcctgtagtcccagctactcgggaggctgaggcaggagaattgcttgaacccaggaggcagaggttgtagtaagccgagattgtgccactgaactccagccttggtgacagagtgagactctgtctcaaaaaaaacaaaaaaaaaggaaaagtgttcaaaattgtgtggtgatggctgtgcaaatttataaatacactaaaaatcattgtattatacactttattttttatttacgtatttatttacttgtttgtttattattattattatttttgagatggagtttcgctcttgttgcccaggctggagtgcattggcgtgatctcggctcaccgtaacctcggcctcccaggttcaagcgattctcctgccttagcctcccgagtagctgggattacaggcatgcgccatcacgcccggctaattttgtgttttcagtagagacggggtttctccatgttggtcaggctgttctcaaactcccgacctcaggtgatctgaccgcctcggccttccaaagtgctgggattacaggtgtgagccaccatgcctggcctacatatttatttttttgagacaaactctttgtcacccaggagggagtgcagtgacatgatcatggctcactgcagccttcaacttctgggttcaagccatcctcccgccttagcctcctgggaagctgggactataggcatgcactgtcaggtctgcctaatttttaagttttttgtacagacaaggtatcaccgtgttgcccaggttggtcttgaactcctggcctcaagtgataattctgcctcaacctcccaaagcactgggattacaggcaagagccatcactcctggcctgttgtatactttatttattttttattatttgttatttttaagatggagtctctctgtcaccaaggttggagtgcagtggtgcaatctcagctcactgcaatcaccacctcccaggctcaagtgattcttgtgcctcaccctcccaagtagctgagactacaagtgcctgccaccacaactggctagattttgtatttttagtagggatggagtttcaccatgttggcaaggctggtcttgaacgcctgacctcaggtgatctgcccaccttggcctcccaaagtgctgggattacaggcaggagctgtcgtgcctggccctgttgtacactttattttttaaatttattttttattttttgagatggaatcttgctctgttacccaggctggaatgcagtggtgcaatcttggctcactgcaacctctgcctgccaagttcaagtgatcctctcacctcagcctcccaagtagctaggatttaaaggcgtgcaccaccacacctggctaatttttttatatttttagtagagatgggatttcactgggttggtcaggctggtctcgaactcctgatctcaagtgatccatccaccttggtctcccaaagtgctgggattacaggtgtgatccaccgcgcccagcctgtcgtacatattaaatgggtgacttatatctcaacaaagctgttctgttttttaaaaagtcactctgactgttgcactgagaatagactatagacaggagtggatcaagggcagaaactggtcatccaggagagagggaaggcagtgggtagcagtggagggacaaatgcgctgattctggatttattttgaaggcagagcagacaaattccctgatgaatcagatgtgggatatataagaacataaactagaatagttgaagaactggagttctggaaaggaggaagggctggcctgaaggcatgggccttcaagggcagcgctgagattgcccttagaatttaggttctaagaccctggctttttattttttactgattgattgattgattgcttgattgattgatttagagatggggtcttgctctgttgcccaggcttgagtgcagtggtgcagtcttggctcattcaacctctgtgtcccgggttcaagcgattctcctgcctcagcctccgagtagctggaattacaggtgtgtgccactaggcctggctaattttttttgtatttttagtagagactgggtttcaccatgttggccaggctggtcttgaactcctgacctgaagtgatccacctgcctcggcctcccaaagttctgggattacaggtgtgagccacggtgcccgactgaccctggctttttaatatgaattttaaccctattatatttcagaacatctctgagcatcagtttcctcagcttgtactcaatcagctgcagagactgatggggacagacctgactcctataaggtgcttgtggagcattcactccattcctatcctcttcttttctggccttctaactgagactgctctgaaccaggggcccaggaaagaatgagggggaggaatatggcagaacttaggtcccaaagggagtactgggcagggggcttgggcattgttcctagttatctgattcctgcagtggggaaagaagtggaggacattgcccatcgcccttgagcctgacccatccatggtcaccctggctcctgtgcctccaccttccctgggggcagaaggactagtgccttacacatttggggttggcagaagattatcttggagccagttctcttcaacctagtgggagattctaggaaggcattaattaccaccttcctgctgatgctcggttaatgcgatgattcaaaaggtgtatttttcaattacatttaatgaaaagatttatagtcaagtaaaacataattaggaggctgccagcagactggtctcctgagaggaagaaaggtgggaccaagtcctaatgaggcaggttggagcccaggccagaggacctacttatccttccctacccctcttcaaagatgccgaagcattcatcaattccgacattcaacccacatttataagtacttattccatgctgggcccagagtgtacaatggaaacagaataaacactatgatccctgccctcagagagcttacacacgaggagagggggccaaccaaaaaaacaaaaaaacaaaaacagctgacagtttaacaaagtgctgcaagtgctgcaaagaaaataacaggatgctgaactagagaatacctgggggatctgccttgggcaaagagatcagacagtgtttcggggtgaaggggcaagctgagattggaaagatagaaatgagtcagccaacccaagagcgggaggtagttgagggaattggttctcagaaagcagcccaggtggatcatctgaggtcaggagttcaagaccagcctggccaatatggtgaaactccgacactactaaaaatacactaattagccgggcatggtgcaggtgcctgtaatcccagctactcaggaggttgaggcaggagaattacttgaatccgggaggcggagatcgcagtgagccgagatcacaccactgcactccagcctgggcaaaacagaactagactctgtcaaaaaaaaaaaaaaaaaaaagcagctcaggtcctaggatggggctcttagtgtttgcaaaatggaaggaaaagccagtgaggctggtgcaaggagagggagcaggagagacagaaaaggacaccaggaagggaggcagggaccatgattacaatcaggtttgaattctttcatcaccccaagaagcaactatacccattcaaaattactccccattttcctccacacccccaagctttaggcaaccagagttattttattctatatgctaaggactgggggttttaagccagggagtaaaatgacccagcctatatttttaaaagattgcctcaggccaggtgcggtggctcacgcccgtaatcttagcactttgagaggccaaggcgggcagatcacgaggtcaggagttcgagaccagcctggccaacatggtgaaaccccatctctaccaaaaaaaaatacaaaaaccagccgggtgtggtggcgggcgcctgtagttccagctactcaggaggctgaggcaggagaatcgcttgaacctgggaggtggaggttgcagtgagccgagatcgcgccactgcactccagcttgggtgacagagtgagactccagctcaaaaataaataagtaaaaataaaaaaggttaccccagctgctatgggagaatagatcagagagaggcaaggtgaaagactggagcagagactcagggaagaggtgatgtgacctggcttggggggaaacactgaggaagaagagaagagcctggatttgagatgcactttggagcaagatgcagtgattcttagtgagagtctatgtggagcgtgagggacaaggtgagcttaaaggtgactcgggtttctgtcttgaactgggtgctgccatttattgaagtggggaagccaagaggagaagcatatggaaagacatgtggataaagaattcagatttggccagcctaggcaacatagtgagacctcatctcaaaaaaaaaaaaaaatttgccaggcatggtggcccacgcctgtggtcccagctacttgggagtctgaggtgggagggtcacttgagcccaggaggttgaggctgcagtgagctgttatagcaccactgtaccccagcttgggtgacagagtgagaccctgtctcaaaaacaacaacaacaacaacaaagaaaatccaaatgcccatcagtgatagactggataaagaaaatgtggtacatatacaccatggaatactaggcagccataaaaagaatgagatcatgtgttttgcagggacatgggtgaagctagaagccattattctccacaaactaatgcaggaacagaaaaccaaacactgcatgctctcacttgtaagtgggagctgaatgctgggatcacatggacacggggaggggaacaacacacactaaggcctgtcagagggtggggtgggggagggagagtattaggaaggatgactaatgcattctgggcttaatatctaggtgatgggttgataggtgcagtaaaccactatggcacacgtttacctatgtaacaaacctgcacatcctgcacaggtaccccagaactaaaaacaataaagggttcatgtgaggcttccctggccctgagggatggaggcctggatgcccacaccaagggagtctcctctcaccaccacactctattgcttcctggcttgtcctttagcgtttttttgttgttgttgttttgttgttgttttgtttttaatttgagacagggtctcgctctatcgcccaggctggagtgcagtgatgcgatctcggcacactgcagtctccacctcccaggttcaagtgattctcatgtctcagcctcccaggtagatgggattataggcgtgcaccaccacgcccagctaatttttgtatttttagtggagacagggtttcaccacgttggccaggttggtctcgaactcctgacctcagatgatccgcctgcctcggcctcccaaagtgctgacattataggctcgagccaccatgcccggcctgtcctttagcttttttacatgtctaacttccattcttcctgctattcttggaaatgcatctctctagtttggagagggaattttggagagagaattctgtcattctcagttccctttaactgtctaagttcctgaaattctaccacaaaattcatactatactcgtattcattgagtacccactatgggtcagatactatgctagaagcgttggctacattatttcgttaaatcttgctgaccactctttccacagtattaataatacaataataataacagtagtaataaaacaataatagtgaccacttaatgaaaactcacttgaactaagtgctttacattaattgtcattttaaaatctcattgggaaataacctacccagggtcaaatagccagttaggaatgggatgagaaacctggacttctctccagtacaccagactctcttgggggatgaggactttggctgcatgggtggaggaagggcagaggcattgtgatgcctttctcttccttctcatttattctttcaaatggagcacagaggcagcaatatctttccagacttccttgggtgcagagggcaggcacccctgatgacaactccagggcctgccctttgctggggaaatgtgaccatttcttggggagggcacagctctcacaagacttaccagacccttagagcagttgcctggtgtcataggaggtaggttcccatctgtgtagtgcaggatcctgctctgtgatacaaaaggctgattcttgtattcatcctctgaggatggctttggtgtttgtgcaggtgcatttacccttctgtatatgtgtgtgtgcatttgtgtaataattggtgtgcaaaggaccaggtgatttgcacacatgcatgcaagtcagaacagcctggattctgtgcatttctctcaggatatgtgtgtgtgaagggatgattatctggttgtctggggcctcagaaaggcaggtaacttgtaaatttcctcaagcatgtgctggtgggtggagttcccacaggatggaaaaaggggctggccccagagttgagttctgagctcagctctccacctcttcctgcccgtctccagctcgctgcctccccctacttttccccaagctgggcagaatgccctcagcctgtgccggctggcacacatgccacatggtgcctggcgcgcgtctgggcaaggatgacgcccccaggaccggctgggataccaagccacccgctgcctcccccacctccagaacggagcgtccccatcccatcccctttcccagccagggactcggggagcaggcagggacacagcacagacagatacaaacacacagatgcacccagagacgcccacaggcgtgtgccccagagggacacagacacaggcgttcacacaggctcgggtacacacacgcacgctcacacccccccagagaaatttatgagtggtcaccacttgcacggatccagacagaacctgacccgcctaggacatttaggcaaatccacctggtgtctctgtccgtggtgctgaaacaagaatgtttgaacgtcctccctatggaagcactaacaggaagtagaagggagaaaaagacctgggaatgggtggtggacaaaaaagaagcaatggaggagaaagaagagaggggagagagaaatctggtggtaagggagatagaatgtaaaggattccaggaggaccaaggactgtctgaaccctgggactaggagaggaagaagaggatggaagatgatctcagccccatccctgtcccctgaatgtgtggctcctgtggcctccagttactccttccatatgccaccttgccctagatgacctgaaaatagtagggaaaggagatggacctgggaaagccctatagtggacctgcagatagctccctacctgattacttatctcaatttgtgttgggcaagtggacaacactgttgatctggatttgttctggggattgcagggatttagtgactgcttaatgcttatccatcagattggattatgggttccttttgctgtctcctgaggaaaaaacaacaacaacaacaacaacaaaaaaaaaaaaaaaaaaaaaaaaaaaaacttcccttcagagagattgcatccctaatagggatggctctcccatcagcagccccttagttgtggaatttatgtaacatgaggaatgcccactcttctggtggggagacatcttcaaggactgaaggggttatcatataactaggtggaaggggataagggaagacgggagagagaaaaaagagaaaagagaaggagaaagaatgtgtgtgatggatgagaggatgaaagaaggaaggaaagagggaggaagagggtggagatgcagatggcaagagtaaggcagggcttgagtgaaccagacagactcctgtgtccagggaaggggcagggaaagtgtgccagttggagcaaattgctcccctcaagtgtcccaggggcccagataagactggaattccagcctagtcctgcagctgttcacagtggcattcttcacccagagctttgggcaaaaagaccctgtgggccaggactaccgatgtgaggagcagctgctctggcgaggaaggtgaggtcagatgcagtcaagtgcatgtgtggtttcctcatgggtggggtgaggacagtgggtgtctcctggggtgtttccacctattcatatgtaagcagtggcaggaggcagatgccacatgcttgggtaggccctggagagtgggtactgggttaattgaggatgaggagcaggcagaggaaaaggaagaagagagcagagggagaggagtaagtaggaagaaaaggatattggatcgtcttctagaaagttctggaccttctgttattctcttttcttcctacaatttgagaaaaaggcctaggctcagctgggtatggtggctcatgcctgtaatcctagcactttgggaggctgaggcgggtggatcacttgactctaggagtttgagaccagcctgggcaacatggcgagactccatttctacaaaaatataaaaaactatctgggtgtggtggtgcatgcctatagtcccagctactcgcgaggctgaggtgggatgattgcttgagcctgggaggtggaggttgcagtgagccaagatctcaccactgcactccagcctgggtgacagaacaagatcctgtctcaaagaaaaagaaagaaaaagaggaagaaggcctaggctgccagctgggcacatctacctcagtgtctttgtctgtggtataagtataatgacagtcccaagctcatagggttgttgagaggattatcaactcatgtataacgctgagtcaattactaacatatcacaagctccaagtgtatgttaccttccatattgttgttgttgttacatcttggttttgcactggatcattggggatttctttttttttttttttctttttttgaaacagagttttgctcttgttgcccaggctggagtgcaatggcatgatgttggctcaccacaacttctgcctcccaggttcaagcaattctcctgcctcagcctcccaagtagctgggattacaggcatgcaccaccacactcggctaattttgtatttttagtagagatggggtttctccatgttggtcaggctggtctcgaacccctgacctcagttgatctgctcacctcggcctcccaaagtgctgggattacaggcatgagccaccgcacccggcccagttcaggaattcttcacgcataactagaccttcttgctatgcccttaggttcaacacttttaggtcttcctttgcacacatggaggactgtgatttcttagatcttcaaatttactcctgaagagaggcagccaagaggttttctggaatgcaaagcgaataccccatgataagaaaagtctagggtacaggtcactgagttttcccaccagaggctgtcacggaggttttcctggattcctgaagaaattggaccctggacctacatcagtgcctccctatccagcctggagcctcagccatctgccccatgcagtgctcctgtccgggccccacccaagcctgtgtgggtttgggtcatttcttccagactcctcttccaatcccaattccttctcttcattcactttcttcaactcaccctctgctcctttcttgtcccttttcttattctcaggaatctagttggaaggaaaggaattccctcactacttagagtgggattcccccaccctgcatgggcagaatggatggtctcctgctggaggtcaaagaagcatgtggagactggcctaggaggggcgaggggtggcagggcagtccccatgtccccctattctccccagctcctgtctcatcactgtcaccattcaatcatagcagatgggctgcagctgtgagcgccagcccggcacacaggctggtccgtgccacttgggagagaaggaagagaaagggagggagggaaggaggagggatgaagggaggagggagagaggaaagggaagaagaggaggaggaggaaaggaaagagagtggaggaggagagagatggcttggaaagaaaggagacttagtgccttttatgcctctctcttcccagcagaagagcagaggccagggctgggctcacaagctgggcagtgccaggcaagatgggcatatgcccttgattactaccaggaccgcaggccaagcctccacagcctccacggcctcataaatcagtttttaagtagcaaccacatggacatttcccagccgagaggcctggcctctgttggtgcagctagggcagccctggtggaggggcaggtgccaggccagggcaccaaagagagaggggtggtcattgaggtttggcgggaagtgaggctggagcttcttcaagtaaaacctggggcaggggctcctgccaatagagactaggtaagaaagtggcaagtggctggcagtgggtccaggactccctgctgggtcccccagaccctgtgctggatttccccggtgaagctgcttacagaggagggggagcgtgttgctactggaactccttccctccagctcccacccctctataagaacaaagagtcagggtgagtgtgagggcaatgtgtgcgcctatgcacttgggtatccgaatgtgcgcaccaggccttgaggggcaggaaggtgtttcctgatacccagcccaggcctggcacagacagggcacccaataaagttgcttgaatgaataagtgatggagtgggaaaggggccagttatgcagacttgcgtgcgttcacaggaattggagatttctatccgagtgtgtcctgactggagtctgtgtgtatgtgtgtatgtgggggtgtctgtgggtgctctggtatgtgggagggggtggggaagcaggaggtgagggagctggcgaaggggatctatttcagccaacgtccctccacatcctccctttcaggacgtcttccctacacagccctccccagagccacgattctccccttctaagaatccatcagtggggcggcagctcccgcgcccccaccccctgcccctgctggatcccgcggttgacgccctcctctcctcctccccgcactggccgcgtaggtggcctcgggtgcggaggtcccggcctggcgcaatcagttgcagagcggatggggcgggggcgcccagccttcttgcgcgcggtgtctcctccctgggtgaacagatgtctcggaattttagatgtgctctccgcccctcctcgcaataactccccccaccacccccgcagctggcaccggctgtggcgtggcgccctcctcctcccccaactcccaatagcaaaaccgggtgatggatccgggagcacggctggaggcttgggccaggaggcccgggaggcccgcggcgtggcagtggcggctcccagcgcggagggaaccattgggcgctgttcggacctcttcccttgtgtccttccttcccttctcccgcatccactcactcccatctctccactgtctatgtccttctcgacctctgccccaccctacagcccatcccagccaccgcgtctacgaagatcctctacacggaccctcacacttcacgacagaaactcctcctggcaactttggaggaattctttcctctagagaccccttttcctgcattcctgagccgccccccatcaccatcaactggctgcctgccctcagtagaaaccccgagttaatccggaaaacgtggggggaggacgggaggggagtagggattgagattagggaggtggagaagaccgggttggccctggctgagagacacccaaattttctaatcactgctaattaatgaataatccaattccacggacccccaactcagggaagggggcgggacccacagcgggcaggagggggccttggcagggcttcgcagtcggggtggtgccaggagccctcccccccacccgccagcattccgaggtaacaggcatttgttacccagctcgtgccaggagcgattggcaggttcgagcagcacagtcattccgcacacagatgtccctgcgttcactcttctgatatgaattctgtcagctccgaatccgagagagacaagcagacagctacacagacagagtcacagacagacacagacacagatagagcaattgtctggaagacgcagaactctacagatatttttcttccctgaaaacatattttaaaaaagaaagaaaaataagaaaagctcccattaatttggggggacagtccccgtgcccccgatgaatgccccccttcctctcctccttgtgttacctgcccagacatttcagcggccccaagggccccacaacatcatcacggagcttcaaagttaagtggtggcagagagaaactctaaagtccgcgagatctgtcccctcacgcaggacccttttgtagttctagaaatccagtatccctgagagttctagaacaccaccaaggtgcaagttccagcattctagaacctctgaaattcaaaattccagaactcccatgaattgcaaatcgtgctgagtgcccagttcttatattgccctcttcgtgggtgcgcgggaagtggatgctgtccggtgccccgagcggttcgcactgcatgcctggtcctcaccggctgcctccagaaccttggccaccagccaaaagtgcagcctgccctttgatttaggaacacagaaaggtcaagtctccctggctactgtccctttctgacgttgccttccagagcggaccccattcctgctcctgtcccaccctggccctccacgcctgacctggctgtcctgcctctgcccctgccagcggctgtgggagtgagctggttggtcactgggcatctgtgagctggctgggcatgaacagccctggggtttggttctccctggtcatccctacttagtggacgaagaaaaagggggcaaagaaactggtcacgacagaggagggggcacagaggggtttgggctgtggtttgtggggttgtgttttttaatctttcctactttctttttttaaaagaaaaagcccccatcctgtgtcatcatttttatgggatctgcaattctggcaaaaatctgtctttaatttagctgtccatataaaaatcctcactgtataataatgaacagatgccatggaatttaagctggagcctcggctcctccccgccttccccccgcgcctggcaccgggcaccgggcaccggctgagtggcacagactggcaccaacgcgcgagggtgggcagggggcgacctgggctcagcgccagggctctggggtggtgaaggggcgtccgggcgctggggttggccaggagggagcttttccgtggtggtaccagggagaagtgtctgcgggatttttctgtctttttctacaagattatcagtagttaaggattttggtttggttttgctttggctctttgtggttcttccgatatattttttaaagcaccgccctccattccatataaacccaaatgtttttgatattttaattgagttgtttttaaccctccccctgcgccgcgccccagcctcggcctgggagcccggccgagcgcgagttcgctgcaagcgggatccgctctgagcccggccggccggcagcctccgcggtattcccggcgcgggcccctccaggggctcccctgcggctcctgggggcaggggtaccctgctgccctccaagactgaggctggatgtggcatctgattgggaagtgggagagatgaagggaagagagaaagccccagtgccctcactcccattctcgggctgttcccaagggagaaggaaaaaactatgtgagtccgttgtgccctcctgcctccgcctgcggtcaagaaagggggcaccggctcaggcttgaggggttggttctgagccccccacccccacccctcgcttttaatgcgactctggcgagaacagatgtcccaaaccgggcgaactgcccagaccccgcccagctgtgcccttggtgaagacttggctaagagtaggaactggcatgcaggtccccaaaggggttcgggggttcccgcgacccctgtgggacctgacctagcagccttggcctcctggccagctcagcctcaggcgggaggcggaagagacccggaaagacccgttcctaattcaattaattccgaaaagaggaatgagacgcagacagatactgacagaagctgggagagaggtttaaatacccgaacaccagacacacactctggtatggaactccgcagcccctgtcagcgcggggagacctcgctgcgctcccgcgctggagagggcaggagagttggctgcgctagagccataccctggctcacatctgggcagcgtctccacccaacgctgtgccccagctccctgggcatggccggcgcctagaggttccctcttctcctcccctcggagcgccccagcttcccttccctgccctagggaactaaggtgactccgctcctcgcatctccctcctgaaatccgttgccctccttcctgtgaacccagccccggtcttggccttcttctcacgtccacactcccagggctggcgcccctgtcccagtgctttaggttggagaaagtttccagagcagaacagccctcccaaggcagctgcgccctttcttaccacttctcacccagggaaactttgtcgagaatttttaaagctgcaggacagaaaggcagaagctgcttcaggattcagaaccggggcagggttttaaggtttctcacagttcaggtgtcatttctgctctggccccgtggccagcgcctgggtatcccagccctgaaggatggaaaaatgacagtgtcttgggctgtgagttggggagcctgttctgacagcagaggcccatctgcccctcccacttttcgcaaaaagcagcatcctcctttgagcacactggagcaggtcagatgcagtccctccgcgctgcccctctgttgtcatggaggggttgggagggtaggtcaggctaaagctgctcagtcctggcgtctgccttctctttctcctcaggtgccttaaggactaaactgcagaatctagaaccataccttagtctcaatcccccctcaaatcaatggctctcctcagagcagatgaattcctgtcaatgattctggggaagaggaggaagcaaaggttgccaagagagaacgaaatctctgacctctgcccagaaattcttgtatccaccagcttgtggactttcccatgaaagggaaaaagagaagcaggcacagccccgtggagcttccagagtatcagggttttcctgccactgatcctcctgggggtcggtgtcccgcagtgatttatcgggctgtctccccgagtcacaaaatcagggctgggggttcactgggggtccatagctcactgtccgagtcatggctggaacgcagctcaacaatgaagggacaggaatggagctcaacagtgaagggacagggagtaactgctttccttccctttcccgccagatgggcaaatggcctggactcggagatacctctttttctctgtcatcttccaaatgctggacttggaatggggtctggaaaatcaagaggaagatgtcctcctgattgaacttggatccagccgtcgggttcagcggcccaggggttgagctgagccggctggtggacgcttggagagcctgccgctgaggctagggcaagaagggcgtcctctctgtgccttctccccaggccaggcacagcgctggcccctttcctcctccctcccctgcttctgttcttggagcatctctgggtgtgtgtgcgcaggcgggagagcaagcaagagaaagagacctgcgaggggacgtttggggccgcttgtccgcgcacatcttcttctcctgctcatcacaccatctcgccagggaagttgagcactggggaggagggtgatgagaggctagagccagccagagtgcagggaatgtggggggaagggtcagaaatcgggaaaggggcgactggtgtggatgccgggattcaccagaagctgagtcactcggggggatttctgtcccaaaagggacctgtgcacccccacccaatgtgatcacagctcacagaggcccaaaagtcatcagcatctttctaaaagggctggaatctggcttcaaaaacagaattgagccacgtagggtagctgaagaacaatgcatagaaagaagtctgtggtctggccaggagagccacatggaggggtcctttgcttcaggccccaagccacctggatcccgcccagctctggacttctgagcgggttctaggaaactgactgagtaggggagaagcccaattaaccttgttctcagggcaggataagaatcaggcctcgggataagtgccaagttccttttctctgcaattgcccctgccaggccttgctccacgccatgagtgcagatcagacttttgcaggttaggatctggggtatgtgccttgctctacactccctgcaataagtgagggggaaggaagatgggccaactcctttcttccatgaataggagtgattcagaggtttctaagatgctgaagacagggacacatccgggggatgaaggccctagtctgtgatctcactctagagaggcgatgccgggagaattccagagaaggcagtgaaattttgaaagaatgctggtaaatgttctgaaaactgctggagaattccagtgcagcattggaaagggcctcctgctccatgttcccctgggtcaggcaaatggacctccctctgcagccagaagaaaagacactagacgagggtcagcatgccacagtggacagctcctggccttggcgcctctgccgacagctgtcctgaccaccgggagggtattctttctactgggggacagaagaggtttgaggacagacatttaggggatgcaatgagctcaagttcagagtataatttgatccacccttcaatatataggacttccttcttcaacaatctttccctttcctgcttgtcagggagatattattttgggttcttggacccaatctttaaaagcctttgcatgcctgaccttaatcctcaaccccaacactacaaaccccacttcagccctaaaatgagtcacagtgtttggagaaatcatttaaatgagcagcatcagaaacagcctctttgggggactcctaaatgtgttcaggctttaggatgggagtctttggggctcagaaccctcttcaaatattctagggctacagcatgcactgagggctgagcagggggagtaggagggactctatcagggaagtcagttaagagctgcccctgcctctcaggttcagagaaaaaagaattgtgaggccacattgtctgagcaggagatgctcacccagtgcccttcctcccttctaagcccttagggttccctctgttcagaactgtaccagacaggaagaaatcagcccagatttggactgggtgggcgcctgctgccctgtcccagggagtacatggttaggctcctctctactgggtgggcgcccagactcagccacctcacagacctctaggggtgttcctccaaccttgtccacacccctaaacatgtcaacattcctgagaccaaaatggccgattcccctgagtccaccgaaatacaattttaagatgaaaaaggggcctccctcattaatatttcatcttcatgaccttataatgttttgttttgttttgttttgttttgtttaaaaatacccctgtctgattcaaatggttgtctctttgtctctgcccacttgctttttgcaacagtgggcagagagttgtaaaatgactggctgttcccaacttgatcatttttcagtgatgaaaaggtattttgttttcaagggaggtgcctgtgcatgttcaggaatgaagaagtgtaaggatatcagtgctttagtgctgggaaggtgcgagcctgggttgggtctgggaggggtagctagtatagcccagtgggtgtatggggggtggttagggagagaatactacccaagaatgtccagggtccctctgtttggcctctgcacagtcacttgacactctgccttcatcaccccagccccagctcaaaccttctctcccccctcaatgaaatgaggccaccgtgagaaaccggtccggctttgcatctcatttacataaatatttattaatcgtcattaaactgaacagaaacacgcaatgcacttcgggtgtccgacgggagtttcatcttcgctacaagaggaaggtaaaattgcgtgtgtgtgggtgagtgtgtgggtgtgtcgcctgtgggattgcatttttgcatcgtgtatttggatgcctgatcccctgcctccggtgggcagagggtctccttttgcccctttttgggggaacctccagtaggagccctcagacctctccccgcccacccaccagctaaagccaagaggactccttggaccaaaaaatactctctccagacaccggaaatcgccaggtggcacccaccgaggcacagtccgggcaggggtggggctgcccccaggtctccatccccacccctcaccccaggaggggacagaatggccgcggggaggaggagccggcgagctcacctccttctgccccccggacgccggcgccgggcctgcttgtgcgtgcggtgtggtgtgcgtgtgtctttcatgcaaaccctccctccccaaaccgaccccccaacagtttgccattccatacaaatttggaaacaggtttttaaaaaacagcatgacgcacaacggggacggggcgggggagggcagtggcactggggccccaaatctccgagtcactgattgtaagaacctggggagggggagggggcggcgcgggcccccacttcaccaaagtgcacagatccgcgctcgggcggggcggcccgcaggccgggcggggcatcccggggccgggccgggccgcgaggctcagtggagcctccttgcatagatatttgtgtctttgattattggtagtagtggtttttttttgtttgtttttttgttttttgttttttttgccttttattgcttctaaaagtccttactgcgttttctctccgatccggactctgcgttcggcttccgtcgcctcttagcttttttttttttttttttttttttttttttttttttttttgtatgtttgtttgtttaaaaaaaggaaaagggaaaaacggattctagttacaaattgtcttggcctctctctttcctctcaatccacttcccctcccgccaaaattaaaatcgcaaaacgcggagactggaggttgggggtgagggcgttccaggcccgggctccggcgccctaacttctaccctcttcaagaaagagggagcgcctggctcctttttgcctcggcagctgggtgtctgtttttaaaataataatgagagggggaaacgcgttccattgctcagctgcccccttaccaacgccttgggcctgcagggaggagggggaggaggaaacctcagcgaagatattgggaatgggggaggggtgcctccagggagcccccggagagaggtccctggagaagcactccttgggagagaggaggagggaaccccttggggagagagaaggcgagtcccctgggggaagcgaggcccctgggacaggccacccacaggtaacaggactgcgctgccccaggagagcggcaggaccggtggcccgctccccgcgcccggcgccggggtaggatgggggtgtccctgcgctctgggggctggggacaggggggcgggcaaaggcaaaagaaaaagaagggagccggcgcgaagtctcagttatgaaaaaacgcattgagctcctcgtacatggggccccggtcgtggtgaaggtgcatatcgtaagacaagagattctccgagtggacgcccccgcgcacagccgacgagccgaagactagcccgtggcccgtgggccgcgaaccgggcagcgccgagtagtgcatagagtagtggtagcttttctcgtggtcgggcgaggagtcctgcttgagtgagaagttgccattgagacagagcggggggctgagcgggccctcgtactcggagctgttgtagtccgggctcgcgccgccaccgcctgccgccgcatacagcgtctcgtaggcggcgcagtagccgtgggtccgcagggcgtgcgccgcgccgccgcccaggccgccggccgcctggcactgtgcgcccgccaggcgcgagcacgggtacgggtaggggtgcatggcgaacgggccgcccgagccgtggaagcggccggcaccgtcggcgccttgctccgtgaggaagttgcgagagttgagctgcagacagccggccaccagattggtggtgggctgcgacagacccttgcacagagtctgcacgtaggacactaggtctggccgcttgccggagcgcaggatctccgagagcgcccagatatagttcttggctaggcgcagcgtctcgatcttggacagcttctgcgtcttggagtagcagggcaccaccttgcgcaggttgtccagggctgcgttcaggtcgtgcatgcggttgcgctcccgcgcgttcgccttctgccgccgaagcttggagcgctccaagcgcgccttggtcatcttgcgcttcttgggcccgcgcttcttgggccgctcgccctccgcctcgtccagtccttcttcctcctcctcttcctcctcctcctctccccccagctcgccttcctccttgacctcggccaacgtggcctccgtcccctcttctccacggagagggactggcttggccgcccgggctggccccggagcccctggcccgggcgcaggcggtggcggtggcggcgcgtcgcccttgtcgctcctcggctcgtcgtcttcgccgtcgccccagctggcgaacttgggcacgtccgagagaaggccgggctcgctgaacaggcgggtcagcatggtgcctgagggcgccccgcgggcgggaaggggagacagacagcacaaagtgaggggcgcgctggggtaccgacgcccccccacaaccctcctccacccccgagtctcgtgcgggctcctgcctaggctaccctggatgcccacctccgccgcctgccccgcccagagccggcccagccctacccggctgccggcctgggatctcggcccaggccctctccccggcgctgggccccggctccgcccctcgcttgaatggggggctgctccccgcgcctgcttcttctcagggtcagggcagggaccgggtgggggttttagggaccagatatctttgccaggggaggcggcgcgctcgccctgaaagcccgttctctcctggcggtggagagaggctggtcggccgccggtggggacagctgccccgctccgcgctctcgcggcccgggccccccggcccagctccctcacccctcccgtggctctcacccccacgctccctaatccaatttgcaacttggctgcgcgccgccccttgctcggcccccacccccgcacccccaattccagaggcgggaggatcgtctcctctagccgatgcgtccccagctcccggagccggctctgggcggcgaggactgaagcagcggggcgtggggaggagactgagagaagcgagcccagtccgtcccctctgcggtcagggacccccttcccccttcaagctgactccctcccacaaggctcttcagatctcgttgtattttgggattgatgggggaaaaatccaaatttgtttgtttgcttcccttttttcggtggtggggaaaggtggcaggctttttgggacaaccatggaggggtcctccgtctcggcctcttcgcatatccccctccgtgatcctgccttccccccccaccgagcccatcgcaggcagagacacctcctctgcagccccctgggctgcagcccctaagggagagagaacctggggcccctccgatgcccacccaatgaggggggcatcatcccaggaaggaggtatttgaggaccctcctgtcggccgaagctgccgcccctcctcccaaccggcgggtcagatctcgctccctttcggacaacttacctcggagaggagtcaaggggagaggggaggggagggggggagggggcaagagagagaggggggagaagagggatcttctcgcttatttcattgttcccccatcttcagggagcgggggcagcggctcctcaaggcggcgggcgccggcgtcttcagagcgccatgcgaaccgcggagcgagtgtggcatctctaccaggcggggtaccagcctctatgccaggccatatgggcttggcacgtcacgggcagcagctatcacatgagagacggtgattggcatgcgtctgcactgggggagagccggctcccccgggacccgccgccatctgtcactctctactccaaaaaaaaaaaaaaaaattaaataaataaaggaaataaataaatatttctgccgccctcccctccccgcccaacgcagggaaagcagggattgagaggaaggtgggaggagttgccccctgtatatagagaccccctcacgggaacaatggggtggcaaggctggacactgggggctcgtggtggccaattctatgctccctcagggtcccgctctgtccatttcctcccctgcaggcccccaaggtgggtcagggaccagaccccgggttggggagaaaggacctctgtgcttgcccccactccccaggagggtccccttggccacaaagggacagctgagaccccctcccaggatggctgtaaggggcgtccctggcccgagccccataggtagatgttggcaccatgccatccctcatccctgtctgcccctcccccacccaccctcacgcacacacaacatatgtggctaaacgaaattcaaaccaagggaaagacagagaaagggaaagatgtgcctggatgtctgtgcctctgcatgggcgtgtgtgtgtctgtggggacatgtgtgtatctgtggagtcagccgatgggagatctttccttggttgttgggggcgtatccatgttagggtggagtggggaggggccgcgagatgagcctgtgcaccacccatctgggggtggaggggagggtctaagtctggattcctaacctagaaacctctcactctcctcctcccactgccagacaggtgaccagtccaccagcggctttctctcctggtcttcagacttggttatttgagggaggaggagcaggcagtgctgagaactgcctaagttcctggatgagactcaagcattctcctccccttctgaaaaatctgaaaatactgaagccaaccccagtaatcccaagagtggccaaggggaggtaggtcagacagctgtcttgataagggaggtaggaagttgctgttttatcttgtggctcacctttcaacactctcattgggccagacacagatacaaatggcacaggttgaagaggtggctttggacacacacacacacactcatgcacacacacatacacacacacacggatgcatacacatgcacacatatacctgttcctcaccctgtggtgtagaaaaatagataacatacccctactcagatagacacatgtatgtgagcaggtaatcacagcctggtgtagacagacccttgcccacaccccatttggagcatttgtatgttttagacccacatttctgcccctccagacactctagctgacatatatacacaacttcaattatactttcagcacacacattttgatgtctaccatgtgccaagcactgtggtggtacaaaaatgagcacggggaggcctttaccctcaatctgggtgggcagggctctctccctctaggaggctccccagggaccttgggctggtaagacactgatctgatgttgggtaggttggattaagttctaaatagagacacacatcaggaggccttggagataggggtgctggtgctgcctgggactcttgagtcacttggctgggagttgaaagtagcctgagaatgtacctctccaactcctcatcttacagaggcccatggagggaaactgacctgcctaggaacacacaggggaaacacagaactgggcctagaattcaggcacttgacccacagaccagtactccacttataagcccacaatctgcctcagtggtctctaaaaataagcctaccatgcttcccttcattcacgaatcctgggtctgcaaggcgaatcccatctctggcagatagtcgtggtggggagattctgggcatggcagagaaagaggccaaaggatgggcttcaggtagggcagagactcaggagtgctggccagcctccaccaagtttgggcacagcctccaaggctttgcaatccttttactgaagcagggtcctcaatcctgactagtagcctttttcctggagtctcctggctctgtgatatttcaattacatgcccatgctctgggcttctgattcctggccaaccccattaccaacttaaaaaaatgttggtcccagccaggcatggtggctcacgcctgtaatcccagcactttgggaggccgaggcgggtggatcacgaggtcaggagattgagatcatcttggctaacacggtgaaaacccatctctactaaaaatacaaaaaattagcagggcatggtggcgggcgcctgtagtcccagctactcgggaggctgaggcaggagaatggcgtgaacacgggaggcggagcttgcagtgagccgagatcgcaccactgcactccagcctgggcgacagagtgagactccgtctcaaaaaaaaaaaaaaatgagaggcccagcatggtagctcacacctgtaataccagcagtttgggaggctgaggccagcagatcccttcagctcacaagttcgagaccagcctgggcagcattgtgaaaccctgcctctgcctaaaaaacaaaaattagccaggcatggcggcgcatgcctgtagttccagctactcgggaggctgaggtgagaggatcgcttgagaccgggaggcagaggttgcagagagctgtgatcacgccactgcactccagcctgggtgatagagccagaccttgtctcaaaaaaaaaaaaaaagtgctgaatgctttgagcaagttatataacatctcttggtcttgatttcctcatctgtaagatgggataaattatgctacaccttcatagggttgttgttaatactaaatgggataatccattccatgaatgagcctccaataaatgccaactcttaattaaaacaccttgggaactgtaaaatgctttacaatattaattttttttgctcatacccctccccacacacattcagaatgcttggtctatatagaaattgaatttttgttgaattgatgggcgagtgaatggatgaataagtgaataaatgcttccttaggggagaaagttttctctccctgccttctcccttggaccctgagggctgggttaaacgcttcaggggtctcacaggcaggaggcaaaaacttgttcaagataggggagcccttggttggggggttcctgccacccttccggccacctgtcaggaatgacctcaactctctgggtctgagaagctcccctcagtcacccagagaaggaggtctgaggttgggggtgtgcacctggggacttcatccctttcgctctgtctcctgcccctgtcttttcttccttcagaaaaatggaacaagtttttctcactcgacacatttcaacttttttttagaagatacaataaaaaccaggggaaaattggaacagagggaggtgtgggatgggcctgcttcagacatgggcttgaaagaggcacaacacgtgtgttcacatacacacaagcaagcatgaacacgcagggacatacgcgcgcctctctgtgcaccagagatgcagagatgcagtgacggagagacagaaagagccagaaatggaaggaaggagacggaaggagaaggacacccagagatgccatctgttcctccccctggcattgggggaagggagttggtgaggggcctggtcccctccaggtctctgagagaaaaaagggagtgatgggcacctcagccaggcctggaaggcccccattgctgctgcccactcctcttggaaggagctaggagctggggggcctgaggttcccatggagacatagccccatcccaagggaggccacagtctgggcacctaaaatggctgcctcagaggggtggcagccattttgtacaggctcaggtcctgggggcaggggtgaggggggcagagtgtgtgtggaggggaggtgggaggtcatacctgagcagtctgggggactcttgctcaggggacaggaagagtgttctagaaactgctcttgttatacccccgctccaccaaaatacatacataaatctttaactgctccactccattctgacacccagaaagacagctagccagtcaccaccccctcaataagattggtgggggcaaatgtgctgaaggagacttcatttcccaccaaagctccaggcagggagaggggcggcaggtggatcaaacccaggtgtccagcccctggcctcagccacacatctatccacctcctggggcctctctgggctgagtggggccagcaggtgagaacccagcgagcttgggagcacggggagggaaggggccacctgtcttctcacccccctcctcagatttgaggggaagggcaggaatttggagatccttgagggacctgtgttcctgccattagccgtgctatggggggaggaggaaagggagggggcaggctggcactgcccagcagtgttccagcagttcaggatgctcgaagattcctcctaaagcatcggagcacctgccacctccctccccagcccctgcctcacatcaagtccaaaggatgctgggggagggggacctgcagcttcttcctggctctggggtgggcacctgccccactgccccctcctccccgcccgccgcagtatgccggggagcggcgggcacgccagatggcgtggctgagaatgcggcgacgttgccgggaggtgagggctggcacgggtgatatgcggctgcgtgccttgtggtgccatgggggaggggagggcagggccagtgaggtgtagccccctcctccgtgctgacctcctgtcctgacctccactcaccgccaggattctcttcaacttcctccgcctgctccctgggctcccactgtgggcctagaccccacccaaagatgggtgggaccagcctgatgctgagagaccgaggtcagacctctgttgcatccttgtccccctgtcccacccccaatcagggacaaaggatggatagaggagacccaccagtcctgcaccaaagccagccccctccgaattgtttccttgctctaaaggtggcgtgacctttgctcccgtaacctttgacttctggcctctgaaccctgtttttctgagaagagctctttccctgatgggcactggtctctgagtttccctttggtcaaatgcattctcattcctcactaagatgcttcctggacacctcctcctgggagccttccctgacctccccaggcaggggagcttaccaccctttgttagaaggacccatttacccatctgtctccttgcctggaccctggtgacgacttgttctgtatctctttagtctcaagcttcgtgctgggcaacatagtgagactcctgtctcttaaaaaaaaaaaaaagcccaagaaagagtccgcaccctttatgccaggcagtccttcccaggtccatgcctggggctgattcaacctgcctggtgccacgcacatagctctcactgagttggtgcttaataaatgcttgttgcattaatgcccagctgggccagaaactttgggtcctggaacctttctcctgagactctcctaaagcagaaaggctgagggtcccggtcaagcccagagtcctcagccccttcccttgccttttgcacaaattgcagtctgaggaggtggacttgggatgggggtcacagattccccccaaagtagggcgaggaggctgagcctgggactgccagactcttgctccctggtaccaggccatgatcctgaggccacagggcctgccctgctgtggaccccctgcttggtcaccacaccttcacctttcagcaggctcagaaccccctccttcttaccccacgacattcttgccctgcatggggcactctgaggagagatgaggtccagggacacagctgcgtcctgctcccgctgctgcatctctgctgatgctgctccccagtatctcagaacccttcagccttatgggcctggcccaggccctcctcctccgggaagttggccctgacttctgtttttttttttgagacggagtttcactcttgttgcccaggctggagtgcaatggcgcgatcttggctcaccgcaacctccgcctcctgggttcaagcgattctcctgcctcagcctcccgagtagctggaattacaggcctgcaccaccaagcccggctaattttgtgtatttttagtggagatggtgtttctccatgttggtcaggctgatctcgaactcccaccctcaggagatccgcccgcctcggcctcccaaagtgctgggattacaggcgtgagccactgcgcccagctggccctgacttcttaagggcccttgctcctctggcttacctcacgggaccaaggctacccaccctgcacatcctatccaaaatgcaaataccatgcaaacatggtatttgcctactctggtgccttccatggctcccagtgtccctaagatgaggccatgctctttagggacacccctgatttggctgctgcttttatctgtgccctcagcagctccaactatttctggatttacaagcctcatgcctagtaatctttgttcaggctgttctgtcttcctgaggtgtccagtccagcttcctcaccccttaagcctaagcatcacctcctccaggaagccgctctgggcagcacatttcacgaaggcaggaactggacccagagcctggcacacagaatatcctcaatatatagctgtggcaccaagatctgtcctgctcctgttgggagggtggtggtgtcagttcttctgcccccaaaatggaaggctgcaagccagcacaggacctctacccacaggaagtccctcctcaaaatcttccctcttttctcttcagcttccccaccaatatcagcactgacatggaatgtcagttttcccctctgtaaaatgggcgtgctaataagcttcaaatgagctaacagctctctccagaggtggctgattttgcctcaggcaaaatcagtgttatttttttccttttttcttattgatttatttgtttgtttgtttatttttgagacagggtctcactctgtcacccaggctggaatgcagtggcacagtctcagctcactgcagcctccacctcctgggctcaagcaatcctcccacctcagcctcctgagtagctgggactgtaggcgcacaccaccacgcctggctgccttttgtatttttggtagagatggggtttccccatgttggccaggctggtctcgaactcctgacctcaagagatctgcccacctcggcctcccaaagtgttgggattacaggcgtgagccctgcacctggcccaatgttatttttttaattttgttcctgcagctctcttcatcaccatatctttgttctgcttctcttgtgagttttccatggagaagttgatatgtcttgttccagcccctcccaaacccactcccagagtccatacaggaaggcagaggaacagggagctcaaggtggcaactgtaccagagttagcagcgttgtgaccttggtcagatcatgtaaccccctgcttcctcatctgtaaaatgggactagcaccacggttcacctggtcacctgcagttcagcactgatgggaggaacaaaaggacggcaggttatgaagtgcgcacttgggtggccaagtgctggcggatgggggttggggaactcctccctgatgctgcagcgcagggcagtggggacagcacaggaccaggctgcatcctgggccctctttccttagggcgggctctgttgtgaccttccctgtgacctgggcatttcccagtttctgcccctggaaatcagagccagggatctgggctggggaattttaggggcttggtgctggactattccctgaaacgtcccttgagcgcatgggtgcaggggacatatgggcctgacagtaggcacggatgacccacaccatagtggtgatgctagtgctcaggaggacagccccaaaaggtcactggggcagaatgtatggtgtgtgcaggacactgtggtcagggcaggaggtcacaatttaaccagagatctcttgagtcagccccaggagtggacctgggaaggactgcctggcatgaagggtggagattctttctttctttctttctttcttttttttgagacggagtcttgctctgtcgcccaggctggagtgcagtggcgccatcccagctcactgcaacctctgcctcccggctcaagcaattctccagcctcagcctccagagtagctagaactacaggcgcacgccaccacgcccagctaatttttgtattttagtagagatggggtttcaccatttggctaggcaggtctcaaactcctgacctcaagcgatccacccactttggcctcccaaagtgctgggattacaggtgtgagccaccatgcccagccgttttttgttttttttagagacaagagtcttgctatgttgcccagactggactcaaatacctggcttcaagcaatcctcccacctgagcctcccaagtagctgggactacaggcccacaccactgtgccctgcctgactttttaattggggtccacagggagggaagggaatagtctagagaggtagggtctcatgggctcactccccattttacagatgaagaagccacagagaggggaagcaacctgccttgtgtcacacaataagtgagtggcagagctgggactggaaaccaggactctgttgccactttggggtcctctcattcccagagcctcagcactctgtgtgataacatacttattaatgtaataatgacaatggtgagtgctatctgtgccaggcactggccttcacaggaatcattttattcttgacaagacatctgtgggagggattcctagtaccaccacttaaagaccaggatgctgaagcacagagaggttgccgtcaaggctgatgtgtcaaggtcacatagctagaaagtggcagagctgggatttgaaccaagtttgacttgactccagggctcatgctcttactattataaagtgtgtccctttctctgaaaccgctgtggtctccacaccgtaggaccagcagaccccgcaatggagagggaaaggagggtgccctgggaaggacttgtgcccagggtttgccctctggcaactggcctctggccaggtccccaagtcacaggagccatgatgccctggcctggatctatcaagttctgctcatgggtgggtaggtgggtggaggctgcttctaaacacagagagggagcagtcacattaaccatggagtttttccaccctgtatataccactttcctcagcttcttcagaagactccctcctagcccttgcagactcagtgaggtgctgcctccaccaggaagtcctccctgatgtcccctgatggcgctccagcctctggcccttggcaccgcgttgaacatttggggatggacagaccagcttcaggagccccagcttcaccacttgctcaccagctacctgcagcccccgcccccgtctgccctcctgtctgtaaaatgggaataagaagccctgcctcacaaaatctttgcaaggaggagcagcggcgtcctaggagcaagcacctggcgcccggtgagcccccgccactcgctccttctcctccttgtccttctcctggcttgctcccggttctctcctcgccacccccgccccgcgcctggcacggcgcccggcgcgccccagccgcccaatcccggctcgcagccctgacttcctgcccgccgggctccctcggcacgtgccccgcgccccatgggaccgcgcgccctcccggggcggcctccccgcggcctcccgcttgggggagccgggcttgggggagcgggtcgccccggctcggaggtggggtcggcgggggccgggcgggccggccgcggcggcgggaaggggacgctgcccctttaaggtgccaccgccgcgtggcagggaaacagcttgtgccagccccattccgcccggctccgttcgctacaagaaacacaatgcataacaatcaggcgcgcgcttggagccatgccacgcggcgggggcggggcggggccgcgcgccgggcggggcgggggctccggggtctcggcccccgacctgcgtcctgggcccgcaggggagtcctgccccatgctcccgggcggggccgccctgtgccccagcgaggtgccccggtgccccccgcctcgcccgcgcttgcccctccctccccgccatctcgctccctacaaagttcattcccactaactcttttccaggccacttccccctcacatctgacaatcggggcccctcattctcccagtaatcactccactgcactaattgcacatgcaaatatgcaaatgcgtattaattaattactatactaattagttctgtggtatttgcgagtaataaatcattggatgggagcgaggaagctggagacctggcccattttcattctgcataaaattttaatggtctctctggctgatccgggacggcagcgcgcggagaggctcttaaagggccagtggcggcgggaaggggcagcggtggggatcgccgttgaccccggcggggactggcaccctagaaggagttggagatgcggcctcacattctgcaggggccgtctccggcgtgcggtggcttctgcctccccctctggggctcagtgtcctccttagtggcttctaaggagagaacctgggcggggaccaggagctgaactaggattctttaagaaaggaaagaggtctaggagatgtgagaggccaatgccaaggctttggggccccaggtagcctgggagacaggaatgaagactccatctcctggatggctgagtaaactgaggcacaggacaggcaaatcttagctcccacccctcttctcccaaggggaaggaagctagaaggatgttctggttggccccagccttttcttatatctggtgggcgccacaaggttgggggtgcctccagctttccccttccacacgatcaaaccgctgccccgcccccatgggcaccagctggcaccctggcagagtagtcctgggcttgagtgggccctggggaccctgctttatttccaggaggtagtcaggacccgggcacagggagggggctggctgctttgcagggccattgactgggggaggcagacagaaccagttgtgctcatgccagggcgtaggaggatgccagaggtgggcaccttaaggaggtggggactgtgggcctgtcctgagccggtattccccgtgccagggtctctagtctggttctgctcagcctccaaccttctgccatcaacaagcccctggataaggcacagcctaaggagggtcagtgctctagtgggggccgatgataatgacagcaactaacaagactattaactcggcaaacatttatttagctggagaactgttcagcaagctctaggtgcctcacgaccccccagtgacacaagttctgttacagtctccgttttaaggatggagaaacaggggcacacgaaggttaagcaacctgctcaaggtcacccagctgtgagtagtggagtggagtttgaacccagacagtccagctgtgtgtgggttctttccagcacaccacctctccccaccaccatttctgcagctcctgctctgaaccacatcctttgctaagaacttcatgggcagtatcccatccaaaccttgcaacaacccagaaggtaggttctggaattatctccatgtggaacacaaggctcagagaggttgactaagctgctctggaacacacagggaagatgtagcaaggccaggctcacacctggcttgtgtgagggcagagtccaacagagtcctccaggccctctgatccctccccatctctgcccctgctgggatctctgcctcctggaagagcaagagggcgttgtggtagcccctgatgactagagaaatggaagggctttcagttagatggtagagagaacttgcttcttgaaaggtgggagctccaggggctggggtgggatggagccttttcttcctttcccagacaggccaaggaagggccttggctgtgtagtgggagatgggtggggatgggggtggaggggtgggggagaacagaagggcccagaatgataaagccttgtgaggaccacagaactcaggaatcctggctgggttttaaaaattttgtccctgataggccggacgcggtggctcccacctgtaatcccagcattttgggaggccaaggcgggcagatcacttgaggtcaggagttcgagaccagcctggccaacatggtgaaaccctgtgtctactaaaaatacaaaaattagccgggtgtggtggcgggcatctgtaatctcagctacttggaaggctgagtcaggagaattgcttgaacctgggaggcggaggttgcggtgagccaagatcactgccactgcactccagcttgggcgacaagagcaagactccatctcaaaaaaaaagaaaaaaaaatttgtccctgcattcctacctgccccccacccattgcccctggaaatgtcttgggcacccccacctcaagaattgctatttgggtttcctatttgggttttccaggagcttcggtctccagcagggggatgagaagataatactaagcaacactttgtaataaatcacttgtttttttaaactgtgtgcttatgagcatcaacttgcttagttttcataattctattgttatccccgttttataaatggagacaccgaggaaggaaagacaggttaaatgatgtggccaaggtcacacagctactaagtggtagaactgggacttgagcttctgagctggggtgcttcaccaccctgcacacgctgagccagattgacccccttgcccagcagtcagggatcatggtggcaggtggcctttcaccctgggtccctttggaacttgcagatgcaaggagaaagaacaggcctcaagcccgcagttcacatggcccctccccatgtgaattttcatggtgctgtttatatgctagcagaagctgggcaaagtgagtattcaggtggccctgatccctccacactggagcctcaggacgggtgggcactgggagctccagaacaggatgctatcccagcatctcttgccccctgccagcccacccttgagagcacagcagggtcagggagtcagtctattagcatctgtcagggggaccaccctgagacagaacactgggattcccatgatctcagggtccccttacctcctggtggctcagggggacttccccagggaatctggacaccctcatttccccaaaactagagaaacctttgacacccaccttctggacctgaaagtcgggtgggatatgggggttgtgggacttagggagggatggcccttgggctgcagcccattaggaaagaaaacccatccctgtctcagcactccactgaagaccagagaatcggggttcatcagggtccacacccctgcccccacccacctgccctgcaagatgcccagtttctgggtgaatgggagcaagttggagaggttgggggaagaaggcaggaagggcaggctggcggctctgagcttctccatgcagcccccggggccgggtgcctgggcaggaggacggggcagagcagctgctggcgatttattaagcagtcacggaaaaattggtttataaattaacagctgttttaactttagggcctcttcttcagggaatggaagcagccgactggaccgggattggagtgtgtgtaaggctggtggagggagtgggaggcggggggctccggcagctggcattcttcgggggcagcctcagctggcacctcggggggcaccaggcagtggccagagcagggggtctccaggtgccggggactgaggctacccctgctgtgggctgcagcttgctctcttctcaacttcccagctcccacctgggggcgccagagggcacatatactgctgtactcgtttgtgccaccagagggcagcctccgcacatcgatctctactgcttccgagaactgtccaaaccggcgggactgagagagagaaacctggtccagggcagagaaagagaggagcccactgcagtgcgtgcaagcgatcttccacgcgtccatcctgaatgtgttaaaagcagcagttaaagagggagggctctggagttggactgtttgcgtttgaacccagactctgggcaaaagctgctgaacctctctgaatctaatagcctcatctgtgaattggaaggatactagcgaggattaaatgagagtgcataggaagggcctagccccggtgcccagcacagaggctccatatgtgtcaccgttgtcaatttctgactcatgtattcatctattcattcacttctcaaaccatcctctcggcgtcatgcagtgcctgctgtattctgggtactgtggcaggtcggtgatgatgtaaacagagatggcggccagggacggtggctcaagcctgtaatcccaggcctttgggaggctgaggcggaaggatcacttgagcccaggagttcgagaccagcctgggcaacaaagtgagaccctgtctctacaaaaaacaataataaaaaaaacattagtcaggtgtggtggtgcacatctgtagttccagctacacagaaggctgaggcaggaggatcgtttgagcctaggaggtcgaggctgcagtgagccgtgatggcgccactgcactccagcctgggcaacagagcaagatcctgtctccaaaaaaaaaaaaaaaaaaaaaaaaaggtgagaaagacacgtatcaaaatagtgtgctaagagttacgatacacccaatgaggggagaagggagattgacttggatggggcaaaaacgaacgttctggggtgacagaaacattatatatctgtattgtggtggtcaaatgctatataaatttccaaaaactcattgaaatgtatatttaacactttattgtaggcaaactgtaactcaacaaagctgatttgaaaaaaagcacctaagcacccaatgtgaatttactgaatgggcaaagggatggacgatgggtgaatgaatgaatgagtgcatgtgtaaatgagtgtctcagatggttgtccacctgtcttggtgccaccactgctcctactgagggtgtccttgccctctcctctcgggtacacgggtttccccagagaggtgggtcttggaattcctcttcctcccgcgtccccccttctcccttcccccaagggcagggaaagacaccccagtgctcccagccagcactccccggctcctctaagggtgtttcctgggacttccggggcctcccttccagctgccacatgccaacccagccggctccggctcagctctgtggtgccaaggtcacgggtgtgatgcccaactccagacccacagtgcctgcagcagccacccaaaccctggccgactccgccacctgccggctctttctggaagcgcatcccgagagctctaagcgggaacctcggtcaagggctatcaggaaccctgccctggcgggggctttatttttcttcctattgaatagtcacagccaccatgtgaggtgggctctgaagcataaggaaactgaggcacagagagtagctaagaaatgtgtccaatttcacacagtaaattacagatctgaaattctacccagggctgggacttcccagttgatgttctgtccaggtaaacacatcttgcttgggaggagggagggacagatcccagtgtcccttctccccccatccggggaagagggcaaaggcctcacaccaccctcccagattttccctccaaaggtgaatgcagggcctcctgcacgccaggccccgcggcaggcatccagcaatggcgtgaagatacatgatgggaaagaaacgcctcaaaatagtgtgctcagacctatggtacattaatagacaccctaccgtcaactttttctgtcagtccaagcagagagacccacagttcaatcagagttacgtcaaatgaggtcttgaatttgttccttggacccaaccgcctgtgcttctaacccaagaataataaccaaggagtggcatattatttttacatcttatttgcatatgattaattctaagtcaaagtgaatgcagggcaccctggccccttgcttctcagtgccctcccacccccaccctgtgcctggtcctagccatctcccccagcccctgccggactccactgtccccagcagcccctccccactccttgcccctgcccacccctcctccagctctcaggagtcccattcccttcctcctctgtcgcccacacagcccccaccacctggccgcccacctgaaaaacttttccccaagttcttgagaagtcgcgtaggatccaggagagaaaaatcaaagtaataaaacctcatttaattcctaacggagggcagagctgcgagctgcaattatcttaatgctgagctatttttactctctctccatctctgtcttctgcctttctctgttgtgaggttcgctgtctctctctctgcctccctttgtctctccatctctcaaccatgttttctgtctctctttgctttctcctctctccccccaatctctctctcacgtcctgtctctgtgcagtctcttcctcctccttcatgtctgtccctctgtcagccagtcttccccacccttcttggccccaggatttagatgccagcctggccacaggctgggggagatgggcaaaaaccctccctccgctcccaaagacctcatcttccaggcctagctgagagggaggcttctctgccctcatctcccttctcagctgccccagcctgggatccggggaatgtttcctgatctggggtctcccagagctccaataagttcagcagagcctccgtaaataagccctcctgctcaaatggggctcagctgccatgttccctgaggccttttcagctcctatgggctctgaggtgcaactggtgctgatgcctccctgtctccaccctctcatcaccctcccagctatcctctgtccccttcatccccacgatccttccccacactgccagcactggaagccacaagccccttccccacctctgcccacccagtggctgtccgggccactgcctgggccatgcccttcccataccccttcttcctttcaggacctccttatttaccctccgaaggcactgccaaacaggtctttgccactccccaccacaccccatcttcgacagaggttctgggccaagcctaggggctgccagagatgcctacacccctgggccaacaacttatcatccagctgtttcccaacaagtatataagtcaacaaacatacagggacttgagccaggcctggggtgggctgatgtggagctggatggccaggacatcccactcctatgagcaacactctggacctcctgccaccctttccctcacccccagagtgggccctgaccccaattccagaagattcctctggcctttcactccacccaggacccagatgctggggctgggagtggaaaagctgcaggaggattgggggtttcaggcctgagagtgaccaggagagaggacgccaacacaaacagagccccaggaaaacatgcatgtacacgtctacacacaccctctcagtgctagacagaagcattcagaccctctgcacagctccaaggagggaaacagcagctcctgcaaaggcacccaaggcccggacaaatagaccaaatagacagggacattccacccacagggccagctcctcccgctcccgctccagagacacacacaaatacctctggagagagagaggctcacacctgtctcccccaaccctgcttctgaatgcaccaaattcatgcacgtgatggcacgtgtacaggcagcccccaaacccaccccaactctgggccggccctgtcctccccaccccattagatccggagaggaaagacaggagccacgtgaatctacagtacatcatggcagggcacattccccttctccctcacaggagcgctcacacatccacaacctcataccccagcaactgcacagcggagctgtggatacagtcccccaccccctgcaagctggcacacgcctgcccatcaccttgacagcctctgacatcctcccccacacccacaccctcccccgcacacacgcagtcctcccacaccctgccactcacacctgcatctttgacactctgacacacttacacagacacactcacaccacaccggaccccccaaaacacactccctggctatgggcaccacagggccccggcacacccctgcacactctccctgccacgatgactgacacgtgtcctcccacacacaactcggtcacactcgctccctttccaggacacccccattcacagcgtgacaggctggtactctccccacgacctcgcaggcctctctgaaactcccagtaccaggaccacgaaggggttaaagccagagtcctgcctccccgctgcccctctccccctccctccccctttatcctctctgctggactccatcaataatgcagcttcaagttctggggagaccgcagggggccccccagctggctccccaggccttggctctaactcccaccctcctcccagccccaggagaacacgattctccatgctcattggccagtttcccctaaaccctccctccgagcacccgggcgccagtcccaggcggaggggacgggctggggaccccaaagctgggaccggagggtgagcccggcagaggcagagacacacgcggagaggaggagaggctgagggagggaggtggagaaggacgggagaggcagagagaggagacacgcagagacactcaggaggggagagacaccgagacgcagagacactcaggaggggagagacaccgagacgcagagacacccaggccggggagcgcgagggagcgaggcacagacctggctcagcgagcgcggggggcgagccccgagtcccgagagcctgggggcgcgcccagcccgggcgccgaccctcctcccgctcccgcgccctcccctcggcgggcacggtatttttatccgtgcgcgaacagccctcctcctcctctcgccgcacagcccgccgcctgcgcgggggagcccagcacagaccgccgccgggaccccgagtcgcgcaccccagccccaccgcccaccccgcgcgccatggaccccaaggaccgcaagaagatccagttctcggtgcccgcgccccctagccagctcgacccccgccaggtggagatggtaaggggcccgtgccccaccccggcagcgtacccgacacaccccgcggggcttcttcgccctcccaaggcgctgccccggccggactggcctgggggtgggggcgcaaggagagccgggctctgcctcggtcaggacggggcgcggggccgcgtgtgaagttagctggagactcgtgcaacttttccccgcggctttggtcctgatcccggggcaagagagttcctggcagtgaggctgggggtgcgggggtggggggacaggccgattccagaccgcccaggagtggggtgggggcgtcctttggtcccagcacagtccccaaagggtagtcagtctcctaggctaccaccgggaccgctccgcctggctctgtcccagagctggtcagatgtgagcagcggtggacactgaccttgtcacccagggcaggagtatgaggctgccaccgggtgaatccactaccctgcccctctctaatcccgcgtgtgtgcctgggctggggtctccagaacctggctctggcctcctgctgtcaggccccagagccccaaccccaaggagggagaggtggggagtcatcacaaagccagacctcttcccacagactactgagtcctcctgagggccttcttgggggttgaggggcttccaaaggctggcgggtgctgtgacagagagctccacttcccatccctagtggagcaggggtcacttgttgctgagctgagatgcagctggctccccactgagcagtgatgagggggccaagtcattatggggggagatagagggcagggggtacagtcctgggcctaagcagctttgggtcatgagggtgtcatggggagcttggctggggaggtggcagtttcagcttaactcacctggttctctttgtgcatttccctggagctcaacagggacctaattaactgacagttggtctgattgccaagctgaggggcggggcggggaggggggcggtcagttgctgcttggctcacgtagcaaggagggcaacttttcatttctcacaaggactgggtgaagagttctgcagccttacagagactggaaaagaagcccaaaccaaggcccccagagaggtcccccaggcccctttgggtccctgagcctcagctggaggtggggggtgcctgcagtgcgctggctcagtctccttctgaaaagctggatccagcttgtttgaagcccttgagctgatcttaggtgggcagggccacatgggtgccatggcccgtggggcatcttccccagagggcccagccgtggcagctggagctgtagccagctttggcttccgaggtctgatgttttcagaaactggagagaggaagggccttggtgggagaagataggaagggagatgtctgttctggagtagccatggagtgggacaggcatgggctgggagtcagtgactggggtttttctcgtcctttggacttgttgtgctgtgtggccttaagcacattgccaaatctctctgagccctgctttttcacctctgtaaaatgagggggttaggtgagctacagagttccttttggctctgacagactttgattcaaaggttccctggggactccaaagcactgtttgttccctgctgcctgggggtgggggagggctgcaggtgtccatccagtcacccctccctccatctccttagatccggcgcaggagaccaacgcctgccatgctgttccggctctcagagcactcctcaccaggtaggcccctccctgcccacttagccctggccccaccctagctctgatgccttcctaggggccctgccaaagtcccatgaacaggagtcaaagctggagactggggagtggataaggtctgggaacccaactctattggctttatttattgacatgacacctcccagccgcaggagggagagggcacactttccctgtccccagagattgagaccctggggaaaataactcggattctttctctctctccctcttctcttttcctcctcgcttggttctggttcggttggctttggtggccttcctcagaggaggaagcctccccccaccaggtgagtttcctggggcagctggaaggagggatgcctgggccccttggggtggggtggacgggtgcctgcagtgacaaccaaccagtatggggtgccacccaagaggacacattagcatatcaatgggcagtcctctgagagtgcctcatgccagggtgccaccagcagatcctcctctgctcagactcagggtggaacctcctggacctagagtcctgccctgaaccaggccatggcttatggggggccccccctaaagccacagggtggggaggctcagcctaggtgcaggacccattagcagtggctaaatcagtctgcttgggtggccatgggtgggatggaatggagggatggtgaaggcaagggcctctgctgagcccctttaacctggcacttcccctggcagagagcctcaggagaggggcaccatctcaagtcgaagagacccaacccctgtgcctacacaccaccttcgctgaaaggtactatacccccaccgaccttcctggctgtccgcctgatccctggaactgggcagacgctaggggagcttttgtcagtggggagggattgtttcgccacacatagcccgctgtcagcgtggcgcaacaacccaacgtaaagaccaattttttctcagtctggccttgcaaaacacaggagtcccgaggctgcaatgggcagctatgggccttaacatcgggttgtgggcttgaaagaaaagagatggctggcctaagacaaccagcaggcatccgcgtggaagggactccacctgcagctcctcttcaccagcctgtggtggaccacctcccacccctgctcatccagggcgccttctcctgtgggcttcacccctggcctcccctcccatttgcatcccatttgcacagatctgcacactggtctcctctttcctgcttccctttctccatggaaaagcaagccattccttttgcacacttactcaacacctagtatatgccaggccaagttggtgggcattgggcagaataagatgagtcagatttggtccctgcccccttggggctctttgcctcaaagggtcagggaggggccaagtaaggtggctcacacctgaaatcccagcactttgggaggccaaggcgggaggactgcttgagcctaggagttcgagaccagcttgggcaatacagtgagacccccatctctatgaaaaatttacaaagtgagctaagcgggccgggcgcagtgactcacgcctgtaatcccagcactttgggaggccgaggcgggcagatcacctgaggtcaggagtttgagaccagcctgaccaacatggagaaatcctgtctctattaaaaatacaaaattagccaggcgtggtagcgcatgcctgtcatctcagctactcaggaggctgaggcaggagaatcacttgaacccgggaggcagaggttgtggtgagctgagatcgcaccattgcactccagtctgggcaaaaagagcaaaactctgtctcaagaaaaaaaaaaaagtgagctaagcatagaggtgcacacctatagtcccagatacttgggaggctaaggcacaaggattgcttgagcccagaagtttgaggctgcagtgagctatgatcgcaccactgtgctccagtctgggctacagagtgagagcctgtctcgggaaaaaataaaaaaagaaaagggtcaaggaaggtacacaaagatgtttaagcttggatttgaaggatcataggaatttaacaggcaggcaagggcatcccaggtccaagaagagggaagaaggtgtgcaaagagaaagagatgcgagtcagagggggacttctgggccaacctggaggaggcttcgtttctagtcagggagctggggagatatacctgaaggacataggagggcctcttcctgactaagccctgttgcctaccaaccccccacctcaactcctgcctggggctcttcctgcccggccagccccctccgctcctgcggaggttgggagggagagctaccggaagagtatgctgggaagtggttcgggggagggtttaataagttcccagcaccagccaaggtcaacaggtatacctgtcagcccacttgccagggttgggaacagagaggagaggctgggaagggaggagagaagggaaggggttattttgctttccccaggacaggaaaatgaagggtcagagctgcagcaagtgggcagtgtggctcagcacctggaaggacctccccacctagaggggtgtgtggaagggccccaaagcaggcatgagggacagagtgtcatcttctcaggagagaatttaagaaatccctctccctcccaccttgggctgggtagggagaggctgggtggatgtgaggggaagacctggctcttgactgcaagcatgggcgaacaggccaggatgaagatgttagggccagggtgctaccatgcaccgtgcagtggtcaaaattgtgcaccccctcaactgcccctttaggccacatcttaggagagtccaggtgagtagaggcagggaagaggaaagggatcaggagaggggtggccagtctggggcaaggctggggaccttccaactgaagaaggaagacttgtggtggggggagtttggggccccacagagtggggcagagaaggagacagcctggaaggagtgatggggagaccccagagagcccaggaggcatgagggaggtgggggaagcgagggaggctcacggggcaccagcgcaagcaccgcacacaccttctgttgtcactgtggctcacgaagtgaactctcctcccccgctgggggagaaggaagctgcctgggctgccacctgctctcctgccttacctccccccacagccctcatggatccttctctaccaggagggcactgttttgtaggcttcagtccttttgtgggcaagggaaggtgcccggcagggttggggcttgtcagggaagaatcgagggccctagagagaggggcacagcactaagtcttagcttgaggggttgtgctccaaggctggagctctcacacttggctcaagatgaagctctgccgcgtccccaaggtcagggtagggtgatttattgtgcttttattgcctggatagcttgcccagagccagcaggaggtactgggctgggagctgggggctgggtggggcagcgggcacatacaaagcaccctctgtgcctgtccccgagttggcaggagcatagcaccctgctcactgtgccggaggtttccagcctggccctacccctctgggccttctgaggggaggggccactggcagaccaagaaggaactgcagcaactccccattccccacccccagcccctcctcagcatcttgtctgtggcctgtgaactttgtgtcgcatatgttctaagatcctgccagctcctgcagcctctcctcagtggcccctcaacctctgccatcccccagaacccctggccttggcccctttctctaaccccttgctcctttccatcttttggaaacttgtctccagctgcccacactgttcccttcccagccctatctgagcaggtctttggaggctgggggggttgctttctaggtcaccgcagagggagctgggaacctggggatgtgggtcaagattgtgggggccgcatctgagcatgccgcatcccccggcacagactgcactggctgcagactattatgtcctcagcctcggaattgttctgtcccttggagcccggggcaggagtatgtggattggcatctatgactgggcagtgccagggagtggggactatgcatcgcatgggaggtaggatcagggtaagcagtgagccctcagcaggctgggcacccccaagaaatggaaagtggcaaatccccaggccctggttcctacgccctgtgccttctgcctgggcttgaagctgggagacactgtctcccgtactgggtacttggaaaatcaagctctccagccagggaatgttaagctgctgctgtgcccgcctggtcttgcccagcctagtgccctatggtgtgggggagctgcctgggggctagcatcttaggacagcttaagagccaaacatgatcaaatctacccctggctgcctctgccctggtctgacacccatcaggctgacctgtcaactttggcctttgaacttgggcccctgagggggtattctctgccccaggcctacgggaaggaggctgggggctaggccacaggctatctccagatccatgggctgtgtctagctgacccttgctttcctcggtctcctctgtgccagctgtgcagcgcattgctgagtctcacctgcagtctatcagcaatttgaatgagaaccaggcctcagaggaggaggatgagctgggggagcttcgggagctgggttatccaagagaggaagatgaggaggaagaggaggatgatgaagaagaggaagaagaagaggacagccaggctgaagtcctgaaggtcatcaggcagtctggtaagctgaggggcctgtgacatgtggattagctgtgggtcctccttgagtatacgaggacgtccccttctagttcagtgtctcatacacgcaaactgtagtgacaccacaggggcctccctgtcttctcgctccatggggtgccccgaactcagccctacctgagacatgggtttcctccatccttggctcagtccctctcccaatcaggttttccctaataattcctctcttccctgagaattaaggccaaggccgtttggggtttgaggctagagccaaaagaggacttcccacctatggcagtaagggggcgtgaggacattcagggatggaggaccaggagagtccaacacccctgtcacctgcatttcacctacatttttgaacctaggatgtggtctctgctggggtgcagagggctgcctcatttacttgccctctccaggactgttgtctgtttctcctctttttccttcctaggatggagtgggagggtgccctctagtgtttagatgtagaatttaaaattcaagaaccagcccggcccattaacctttttagtctcattatttatgggaatactgaagagtcaaccacccctactagaagctgtcagctcttccacacaaacaaaaggccttgggcctcctgcctgcatatctggcagtgaagagattggccatgggggcaaaagctgttgctgggcttcagtccctttgtgggcaagagacagctggaagacctgaatcagtcctcactgagacccctccaaaacagtggaagaggggtgagaggagactgttccctcaggaaaagcagcaggtggctgggtgcggtggctcatgcctgtaattccagcactttgggatgccaaggctagcggatcacttgaggtctggagttcaagaccagtccagccaacatggtgaaaccccatctgtaataaaaatacaaaaattagccaggcacagtggcacacacctgtaatcccagctgcttgggaggctgaggcagaagaatcccctgaacctgggaggtggaagttgcagtgagctgagatcgcaccactgcactccagcctgggcaacagagtgagactccatctcaaaaacaaaaacaaaaaaccaaaacaaaacaacaaaaaaaaacaaacaaacaaaaaatgcagaagggcaccgggtcaaatgatagtcctatgatggagcaatataaaccaccacgactcctagtggctcctgggtgctggcgctgggctgggcagggtattcactattacatcttgtttaaggtaatctacacaatttccccctttctatttccttcagaaaggtactaactgacttacgtaagccatatggctagttgctgggagagctgttctagcccagttctctctccatgcttccatgatgcccctggaaagcttaacctcagccatcagacacttagctcacactccaggacagccggatggatacgcagagcctgtgttcttatctcttctttcccatccccagctgggcaaaagacaacctgtggccagggtctggaagggccctgggagcgcccaccccctctggatgagtccgagagagatggaggctctgaggaccaagtggaagacccagcactaagtggtaaggcttgggagtgtgaaatggggaggaggggctgggatcttggtgggtggggccaggccctgagtccctctctgcttgcctttcagagcctggggaggaacctcagcgcccttccccctctgagcctggcacataggcacccagcctgcatctcccaggaggaagtggaggggacatcgctgttccccagaaacccactctatcctcaccctgttttgtgctcttcccctcgcctgctagggctgcggcttctgacttctagaagactaaggctggtctgtgtttgcttgtttgcccacctttggctgatacccagagaacctgggcacttgctgcctgatgcccacccctgccagtcattcctccattcacccagcgggaggtgggatgtgagacagcccacattggaaaatccagaaaaccgggaacagggatttgcccttcacaattctactccccagatcctctcccctggacacaggagacccacagggcaggaccctaagatctggggaaaggaggtcctgagaaccttgaggtacccttagatccttttctacccactttcctatggaggattccaagtcaccacttctctcaccggcttctaccagggtccaggactaaggcgtttttctccatagcctcaacattttgggaatcttcccttaatcacccttgctcctcctgggtgcctggaagatggactggcagagacctctttgttgcgttttgtgctttgatgccaggaatgccgcctagtttatgtccccggtggggcacacagcggggggcgccaggttttccttgtcccccagctgctctgcccctttccccttcttccctgactccaggcctgaacccctcccgtgctgtaataaatctttgtaaataactgctgagactcctctttcaggggaagcaggaggaaaagggaggtaatggggcgtcctgatagggaaggccggtggtcaaccaagggttagggttttgaccctactgtccaatcctctagtctaggagtctttctggcagacagcaggctcggggcactcagaggaagaactacagaagttctagctgctgcttgggatggctgaaggaggcaggtggggtggggaagtccttctcgaataactggattcctccaaagatttccccatccccacaggactcccctcgggaaattcccctttttccctcagtgccaggcctgtgtggcctaataacgacggccctggtcttcttcccactcccctacccttaggtaggcccttagactccggcctttgagtccgcttctgcgcagggccggggctggaggcggggcgaaggggcggggccgcaggcgaacgcaagtcccgcttcgctctcgggggcggactcagcggcggaagtggcgctgccggaagatcttcttccgctctgaggcgctactgaggccgcggagccggactgcggttggggcgggaagagccggggccgtggctgacatggagcaggtgggtcccggagcggtcgctgggagcgggtggcgtgcgagggccgtcttccgccggtcgaacccgcttcgccgcccgctgtccgtgctgggttccgtccgacccttcccacacccgctgcgtctcaggttccgcccccttcctctgtctggcctcgcgccgccccgcgcgggttggggtctccagcaatgactcttggcgaccccgcctatcctggggagcccggggaggacgttcgggatctccttccaaagcctccgtcttaactgaggggagaggagagggtgaggtgtctgggtgttatgagcaggggcaggtatggggaggggtcggaatctggggtgagaggaaaacatctacgcattccggtagctctgcgtctcagtgtcatcccgtgtctccccaacttcctttcgaaacggccgtgaataacttcctaattggtattaaaagggccctttgaagtcttgagttcttagaggtgcatagtaccattgacactcatttctaatgacacgttccctcaccccgcatttttgggttagtcaatgtctcctggttttcttcgtaccgctctgacagtcggtcaaagtcccgcttcacgttttcctctgtcgcccaacccctcgctctgtacactgaatctcagtggtcttattttcccccacggcttcagctttacaccaactaaatacccagatccacatcttcagcgcagcccttccctggagctccacgcttgcccatccagcggccattgggacagctctgcttcacatggagctcactgggtccaaacttgaactggtcttttccttgcagattaattcttcctctaccccaacccagccggaagtctggtaatttccttacactttctcctctctttcaagtcccacatcttaaaagtgacctagtactgccaacttcctgaacatccttcaaacctgggccagctccatctcttctgttaccacgctgttgatgtattgtcaattcccaacagtccagccctggcagcttgcaacccagtctccaaactgtaactcttgtgatccttttagaacacaagtcttacggtgccagttccttgctgataacctttttctggctttctattgcctatgtgctgaacccctagcacaatttacacagctctctgtgatctgacctagcagtctcctgtgtgcaccctaaggtccaataatacggcactgcagcatgcgccatgcctacccttgctgttcgtatcttcatgactttgcacacaccagcccccgctgcttggaaacctcctccttctcttgtctgctgggctaccttctacatgtttttcagcgcaggcagcgctgcctccgcctaacccccaaggttaattgcccttctgtgtcctgtagcaccctgtccataatagcatagtagctgagaatacagactcctggatcagactgcctgggttctgacctgtttggtaaccttgatgaagtcagtgcctcaatttcctcacttgtaaaatggaggtaggaatgtctctacttcatagagttgtgaggattgaatggaatattgtatgtttaggtcttaaaccagtgctaggcacaagaatgctcaataaattaaagtgagttgcctgggtgcagtggctcatgcattaatcctagtactttgggaggcaaggcaggatgatcgcttgaggccaggggtttgcaactagcttgggcaacatagtgagaccccatcgctacaaaaatttaaaaaactagctgagcatggtggtacgtgtgggaggatcctttgagcccaggaatttgaagttacaacgagatatggttgtgccactgcactctagtgtgagggacagagtgagatcctgtttctaaaataaataaataaaaagttattactattatgtaaggacaacatagttcaccagttatgatttttaatttcataagttgcctgaggatggttgaagtggcttactagtcattggatagagcctggctctttgccaataaataaaatgctggagtggaggacactgggggcagggtctggatttattgagtgaagattcaagagtgaaaaaggctcagacctggtctgctcaggaaaaccagtctggaagtgtgtgtgtgttacatggcaagcattaaatctagagaaatgtatagatctgggaactagagggagaaaaagaccaggggcggcttctgaggagctgacagttaatggggcctataaagcgatgggaggattttatcagagggaggcagaggctggagtgggctcagagatcagaaagctgggtcctctgaacagagctccagtagatggtggctgggtgggggaacaggggagacggagctgaggaagacagaggcagcgtcctttgctgacgctggcaattcctttcctgtattggccatgaggaagcatcccttgacttgggagccagcagggaccatgcctgggggcaactatgctccggaggcctagtacctggtgtttgggaccaggccccctgggtagggccattgtgcatgcctttgggctgggccttctttggagctcttttgcctccctgtaatgcccaccctccttgcctccagctgatagatgctgactcttcaaggccagggtcagatggcccctcctccctgtggcttttctgacttcactcattccagcctgggtcagatgatcccttctctgggagcccacggtcctttgttcattcctccctgaaagcgctgatcacagcatggtattatttatctgccagtcttcctcaccagacccagagtccctgatggaccagaacagggtcctgtggccccaggacttgcactgtgtccagcatactgtaggcccttggaacccgcatgttgcattaagttgagctctcacacagctagacttgttaagggagagcggtgcgggggagataaaaaatccggcacatctggcagcttgtgcctgttccactgaatgcgagagcctgttggctccactttacagatgaggaagctgaggttcaggggaggtaaggtcaagatcactcagcagggatttaaagagctgtctcctgactccaggtctgcatgtctcccagaaactgccttggggtcccagcctccaagggggcaggtgccacatcagtgggacaaaagaaaagtgtccctttttctggctgaggagaggctaatcctggctttgtccaggcagggttggtgcctggaggatcctgtgctgaaaccggctcccttccatccccccaacccccccaccccttgtcccttgccctatgggggccttttcttgagagggctgagatctctcctggaagatgactagccgtttccagactaaccttgggaacttgacctcactggtttacatagcagcacgaagagggcaggtggggcctgattcactggccctgagtgggtcaggggtcatggaatcacagaactgggggcatccctgatgattcacagggcctggcacaagggggaagggagggcaagtagatctcagtgtgttagggtcttcctgtacactgcacccgcagagcctccccggctggggggagaagtgtgtggtggtgagtcttgtttctatttggcttaactcttccccttccgcttcctcagaaggaaaggagaaacagagccaggctttggctttgggtcttatttgtcactgtagctgtgtcctcctctccctacactcccacttctccaggggatttcccaaaccctctgtggagggctatagtagggccagtcagccaaccatcccgaggctgatggcatgggccagtaaccctgaatgtgccatcctagccaggcgcagtggtgcacacctgtaggctcaactacttgggaacctactcccaagtttttgactccaggattgatgtccaaccccaaacccacaccctttctcctgttccagggtggacattacggatccacagactagctaacttactagacatgtaccgtggccaggcactgtggctgtgacttggacctcaagggcttaggacagatggccttgaaacatctagctgtgataagggaaatgctgacccagagttacttgggaggctgaggcaggattgcttgagcccaggagtttgagaccacagtgtcctatgatcgcgcctgtgaacagccactgcactccagtctggcaacatagtgagacctgtctcttaaaaaaaaaaaaagtgtcattctgggtcagccccctgaagccagggtctacccttccattctgcagtactgctgggactctcagtttgggcaaagtgctatgctggacctgcctggccagggtcctgcctctaacactgtccccatgggtaatagtagtaatagctgctattaattaagcacagacactgtgcatgtgttgtttctaatcccttcaagctctgtgaagtaggtactatattctccccattttacagaaaaggagactgaagttcagagaaacccagtgatttggtcaagggcacacaatctaataaggaatggccttaggtttttgcctccaggactggtgtccaaccccaaacccacacccttttccctgttccagggtggacattatggatccacaggctaacttactagacatgtatcatggccaggcactgtgactgtgacttggacctcaagggcttgggacagatggcctcgagacatctagctgtgataagggaagtgctgacccagagttctgaaaggtcaggggagtctggagggtgaggagaagctctgccccggaggtgacatttgaactagtctctgaagcgccagagttctccccaaaggaaggaggtcattcaagaatgaggaaacagggcgcccaggcgatgggctgtggtgtgtcctgggagcagccaatgatcagcagagtagaggcagcgagtgttgacccccatagcaaaaaatgagtgctggggtctggagtcctccctcctccttaaccctcctctgttatcaaagactcaaggttaactcaccttacgtcttctccctacaagtcaggctcagggaggggagcagataccctgcttgaggacccccaggaaaccagttcctctttccttcttgtggagggagtgcctgggctctgggcagggaagacccccacagagggtggagtccagctccaggagaggcagcctgggcagggaggggctgctctcccggctgggcgtgagtgtccatgtgcacttgtgcatgtgctgctgtagggaagggtgtaaatggccgttcagtgcatttcctggaaacccactctgagcctggtacagttctggcactgggcatgcagcagggagcaaagcacaggaagtccttactttcatggagttcgcatgccagtgggagacgatgggcagtaaacacagaccagtgaatgtatcatatgtcaggggtgacaagtgctgtgaagaaaaatacagcagggtaagggatggagggtgggggctaaatagaggttcaggaatggtctctacaaagggacatttgcatagggacctcattggaatgagagagcaagtcatgcaaagacctggggaggagctcccgacagagcagcaggtgcaagggccctggggtaggagcatgcttgatgtgtccgtggacagcgagggaccagtgtggctggagtagagggctcaaggggaagaggaaaggggaagaggaggacttgtaggctagggtggggacttacgcctttattctggggaagccattggaggttggggcactggggagatgtgatctggcttttaacaggatccctgtggctgctgtgttgagaacaggctgaaggggtgaagacaagaaagagtggcaggtagaggtgatagcctggacagggtgacatagtggtaggtgagcagtgggcagatactggccagattttgcaggaagagacaacaggatttgctcatggtttggatgtggaagggaggtgtgaccagatgaatgctaagcccaaagagggcctcttgacacactgtcccccagctagcaaggactcttgcaggcagcagcatttgtacttagaaggtcccagcctgtcatgggggaaggtcatgttcctctggggtcggctccgctctgcctcttcctggctaggggactgtgggcagctctccttcccatgagtcatcactacagcttctgggaaggggtgtgatgcattaaggagatggtgtctgcatggtgccaccgcaggccatggccagctggatctgtgtcttctgcaccagcccatctggatgcagtgcaacctgtctggtctgctatcctgcgttcccctaactggcaccctcctgggccagccagcagcaggacatagaccaaggccaacctcctccacacccagggcctctgccttctaccctctgtggagtctccattaacttggcattgacagggctgcttgactcaaaacaaccccagccctgccctgaagccatctcgccagtcagtcagagctcaagactctctctttctctggagaagagcaggaaagtaatcccagctaaccctcatgcagccaccactctgtgtcagaatctcttctaggccattgcattgaataagtcatttaatccatataaacctgcaaggagtaggtgatattgttaaccccattttataggcgaggaaactgaggcatggtgaggttaagtgaccagcaaggtggaaatctgaggtttgacccatctcctggtgtggagtccagttctctcagcttcactgatccttcctgatttgtgctgagttagggaccccttgggaagcccccatgggcagggggtgctggtgctagcatttcctgtggattatgggagggggatgtgtggaggacctgtgtctactgttcctctagcctctgggggatttggagaacccactctgcccagagatgtaagtcatctttggatatagatgagacttgttccccctccccctgaatcccagggcacagctctatggaataagctctagctggaacttgtaaagtttggcccagccctccctgggaggctaggaggtggggaagagccaggagactcgaagtggtggtggtagttaatgtctatgtggttagacgttaaccagttactctgtggtgccaggcactgtcctaggcacgctatagttatcattgtctcctttggtgcccccagacagcccagggtcaagacaggtagcctcagtttacagatgcagcagtggaggcttgcacaatgagtaggtggctttgttcaaatcacagacctaggccaggtataaaagcctaagtgtggtgtaattccagcactttgggaggccaaggcggggagattgcttgagtccaggagtttgacaccagcctgggcaacatagtgagaccctgtctctacaaaaaaaaaaaaaaaagaagaagaaaagaaaagaaaaattagcctggcatggtggcatctgcctgtagtcccagctactcaggaggctgaggcaggaagatcacttgagccagggaatgtttgaggctgcaatgagctgtaatcacaccactgcactccagcatgggcgacagagtctcaaaaaaaaaaaaaaaaatcgcagacttgccttggctaggaaacgcctactgagagctgccgtcggtcagctgggctttggagccgcctccctgaagaaaggtgtctggagcttctggcctggggtatgacgaagggctagcaaggaaccctgtctgtggctctgcagcctgagatttgtggaaattgaaaattggaggtgggtgagtgggaggcggcttagccatcctgctgtcctcctcttctgtctgcgggaaggggcagccgatgctgttccctgggtgggagcttgcaattgcagaggggccggtctcaagaggaaggagtagagatcagcccctgcactcccctaagagcctctgccaggagccaggacagtcctctacttcctgcccctcccccaacctggaattcacctctgcctgcagctggataacctggcctttctatagatgaaggaaccaggctagagggttagggagcttgctctgagccacacagcaggtgaattgtagagttcagatttgaacccacgccttttggggtgatttttattacatgtcactatagtgtatttaacctccctcgctcacaatttccctcttacttgaaaggtttttgttttgttttgtttttttgagacagagtctcactgtgtcacccgggcgggggtgcaatggtgtgatctcggctcactgcaacctccgcttcccgggttcaaatgattctcctgcctcatactcccaagtagctgcgattacaggcacacgccaccatgcctggctaatttttttgtatgtttagtagagacgaggtttcagcatgttggccaggctggcctcaaactcctgacctcaagggatcctcccacctcagcctcccaaagggctgagccactgctcctagccccatcttacccgaaaagtcttgccagctacttaatctatctcaaccaccactgaccaagcggttaccatactccctcctgacacctacctcaacacccatccctgtgacatagggattcttgccttttttttttttttttttttttttttttgagatggagtctcactctgtcacccagactggaatgcagtggcgggatcttggctcactgcaaccttcgcccctcaggttcaatcaatcctcccacctcagcctcccaagtagttgggactacaggtgcacaccaccacacccggctattttttgtaattttagtagagacagggttttgccatgttggccaggctggtctcaaactcctgacctcaggtgatcacctgcctcagcctcccaaagtgctgagattataggtgtgagccaccgtgtctggcttcttgccttttcttgtcatggtaaaatatacataacataaaacttaccattttaaccttttgtttgttgttttttgttttgagacagggtttctctctgtcacccaggcttgagtgcagtggcacagtctcagcccactgcaacctccacctccccggctcaagtgatccttcctcctcaggctcctgagtagctgggactgcaggtgtgtgttaccacgcctggcaaatttttgtattttttgtagagacggggctttgttgtgttgcccagactgttcttgaactcctgagctcaagcagtccttcctccttggcctcccaaagtgctgggattacaggcctgagctaccacacccagcctattgttgcctgttttaatgcagctgaggaaactgagtctcagaagggttatgctttgccccagagcacacagctaggaaggggacagtctgagatttgaaccatgaccttagagtccattcctttttccatgataccagccacctcctgtttgtcctgagtccaggacaccacccaaaaccctattacaagtggggctggtactattgtatcctagggtgaggaagagaaggcctggaaagcggtgtgggggcgtgtgcccaccccttccctttgcctcatgaataatccgctgttccctggcacctgacttcccccctccccacccgcttccccctctaacccaggatggtaaaacctccacttttgcccggcgtggtggctcacgcctataatcccagcactttgggaggccgaggtgggcggatcacaaggtcaagagatcgagaccatcctggccaacatggtgaaaccccatctctactaaaaatacataaataggcaggcgtggtggcgggcacctgtagtcccctctacttgggaggctgaggcaggagaatcgcttgcacctgggaggcggaggttgcagtgagccgagatcgtgccactgcactccagcctggtgacagagcgagactctgtctcaaaaaagttaaaaaaaaaaaaaccctccactttcccccctacctcccactctcactccctccccaagcagttcagcttctgcagacactcgactgtcaagtctgcagccatcccaggcagactctttcacaccacacgtgctgttcccctcctgacacttctgaaggtgcttgggagaggccagtcacagcaaccagtgggctcttttggcagtgggtggggtgctgctcccagggggctgggctgtctctgaattgtccattcctgcctccccctcatcaggagggtgggtgtggtgggtggaggcctgcgctagctgtgatgcctccagggctaggcagcctacagtcagccagagaatgagcactttggggactgcacagggcagttccacgccacggtgggttttcatcacttagactggcaggtggtctgatggagctcaaaggcctttcaaagtcatctgagtgagccccattttcaaaccctagccaacgaggcctcactcagggtgatgctggagtttgaggaaaggctgacaggtgggattcagtagctgcttttacccatagcagtctggtttttatctgttttatatattgaggttccaagtaaggtattactcttttaaatgtttctcttgctttgcaaaggaggtggtttgtagctgggtgtggtggctcatgcctgtaatcccagtactttgggaggctgaagtgggaggatcgcttaagcccaggagttcaagaccagcctgggcaacatagaccttgtctctacaaaaaatttaaaaattagctgagcatggccggccgcggtggctcacacctgtaatcccagcactttgggaggctgaggcgggcggatcacgagatcaggagattgagaccatcctagctaatacggtgaaaccccatctccactaaaaatacaaaaaattagccaggcgtggtggtgggcgcctgtagtcccagctactcgggaggctgaggcaggagagaatcgcttgaacccaggaggcggagcttgcagtgagcctagatcgcgccactgcactccagcctgggcgacagagtgagactccgtctcaaaaaattaataaaaaataaaaaaataaaaattagctgagcataatggcatgtgcctgtggtcccagttactcgggaggctgaggcaggaggatcacttgagcccaggaggtcaaagctacagtgagccatgttcacgcctctggactccagcctggatgacagagtgagatcctctctttaaaaaaaggcagagggagatgattgaaaaaaaccactgactttcccccagataaacagaggcttggtgagaaggacttgcccagagttaggcggaattactggttgcccggagactggggtacaggttccttaactctgggccagtgctctgcctactgtacaggctgtcatttggactttgagctgctttcggtgggagggtgatatcaaaccccctttctttgactcttggccaactgtccccgcccctgccttcgagcccccatgcttggctcccacactccctggcatatttcaactctcccgggctcccgcaacacctctgctctagccccatctgcgtctctcgcttcgacagggacgtctgggcatgtgagtgtcagtgtggttgccactccaagtgcgtctcacacccaagctgctgccatccaagtcctgtccccaaggagagagaaagtcagagggaaagacagacagacacagaagtagactggagtaggcgagcgacagcacctggaagtgaggcaaggaccaaggagggagggagggaggagagaggcagatagagaagagagagagaaatgtggagaaagtgggagagactgatgggagtggagagaaagactcataaatgggagatagattgagaggaagacccagatggggaaaaataaagacagacatggatgacgatatgttctgtgggctgtggggaaacaggcattcttgtacattgctagtgggagtgcaaactgcaaagggaacttggcaatacctcacaaaaccacatatgcaatttgacccagcaataccacttctaggaatctgtcttgaagatgtatttccaacaacgggaatatatatatgcgctcaaggttattcactgcagcatttctggaattacaaatctaagtgctcattcatgggagactgaataaactatggtttgtctataaaatggagtaccaagcatctctatcaaagaacgagaaagacaatgtaaaactgacatggagtgctcaccaggatatactatttagtgaaaaaataacaagcaagagcccatctgtagtaagctactgtccatgtaagaaagaaaggatataagaaatataaggctgagcgtggtagctcacgcctgtaatcccagcactttgggaggccaaggcaggcagatcacctgaggttgggaattcaagaccagcctggccaatatggtgaaacctcatctctactaaaaatacaaagttagctggacatggtggcacgtgcctgtaatccaggctacttgggaggctgaggcaggagaatcgcttgaacctgggaggtggaggttgcagtgagctgggatcgcgccactgcactccagcctgggccacagagtgagactccgtctcaaaaaaaaaaaaaaaaaaaagatatacaaagaaagcatattcctttatacaaaagaaatataaaaaggataaagcagacactaaagctgtaagttactgctcacacgtgtaatcccagcactttgggagaccaagaagggaggattgcttgagcccaggacttcaagaacaccccatctcttaaaaaaaaagataggttactgttaggggttgaatcgtgtcccccgcaaaaaggatacgttgaagtcctaaccacctttacctcagaatgtgatcttatttggaactggggtcattgcagatgtgatcagtcaaggtgaggtcatcttggaggagggtgggcccattatgactggtgtccgtatcaggagatggcagtgtgaagacggacacatgggaagagcaccatgtgacagcgaagaccggtcggcgtttgtggctacaagctgagtcacgccagattgctcgcacaccgtcaggagccaggaagaggcaaggaaggggtcagagggagcacggccctcccaatacctttctcagacttccagcctcctgaactgtgagatgataaatgtccatgatttcaaacaaacaaacccaaaatggcagacatgggagagggagagggagacagctaaaaagataattacaaaggaaataggccaggtgcagtgactcacgcctgtaatcccaacactgggggaagccaaaacaggaggatccttgagccagggagtttgagaccagcttgggtaacatagtgagaccctcgtctctaaaaaaaataaaataaaatgaattagcctggtgtggtggcgggcgcctgtggtctcagctacttgggaggctgaggcaggaggatcgcttgagcttagaagttgaaggctgcagtgagccatgatcgtgccactgcactccagcctggttgacagagcaagaccctgcctctaaaaaaacaaacaaaaccccacacagatggaaagttactttgtgaaacagatacaaaagatgaggagagatggagagagtgaggaagggagacaggtctggctgcaaacaaaagggctgtcagaggcagggaaatgtcacctgccctggagctgcggcctgtcaccatgagggatgcactgagcatgcagtctggcacagatctggctgatagatgttggggatcccattgccagcggcctgtcacatcccctccccatcgcctgtttccagagctgagcccagcttttccgtagcactgtggagatgaacctgtcatggggctcagagtgtggtgttgggagtagccttggcctggtgcctctgcctcacctgccctccgactctgctgcaaacagtcagttcctgtttgtgggggcttgcacaggggcagagggatggacgagctggcttgctcagaacctcctgccagccacaaactgagctgcgcttgttttggacgtggtagactgaggggcccaggaaggtagtccacatagtgaaagtgtggcaggacacctcaggaggggagagtggttagatcttgcctcccaagatcagggacaaacatctagagcttcccttcctctagaccccaaactactccctggtgctgggatgtggggagactcagggagcctcttggtcaagtcccagaagctcaggcccccaccaagctggtgagtttttgcctccccgcttcagctcctctgactttcttttttttttgagacggagtctcgctctgtcacccaggctggagtgcagtggtgtgatctcggctcactgcaagcttcacctcctgggttcacgccattcttctgcctcagcctctcgaatagctgggactacaggcaccggtcaccacgcctggctaattttttattttgtatttttagtagagacgggtttcactgtgttagccagaatggtctcgatctcctgaccttgtgatccacccacctcccgcctcccagagtgctgggattacaggtgtgagccaccgcgcccggcttcctctctgactttcagtgggacctttccttctcacccaagggacggggcctcttagagcccagcacatgggtggggcagagactgtaggcctgggggctacatggcagggagggagtgccagagttccttttgtctttagggttcctgagagcccgatgctggcacaggatggtaagggattgggtaaatccattcacctctctgggccttggttgtcgtatctgtaaaagaagaggaaccgtccctgccctgagtggacgtgaacgtgggtgtggatctgtgggcatggggtggggggcggtagagcactgggctggcctccagagtggctgcttcctactctctttagggtttgccctgttcctgtctgttatgtagcatggagctgagggccaggagacctactgagcattcatttattcaacaatcaattacaaagcacctattgcatgccaggcattgtgctgggcaccagggagacagcagtgaccatgtcagataaagcccgtgaggccatggagtttacagtctagtgagagaagggtaaacagtgaaataaaacaataaagatcgtttcagatagtgacccacttcactgaagaaaggaaggcagcttactatcatgttatgctgtgatttggagcaggagggtgggaggctttctgaggagaggacttttgagctgcctgttgaagggtctgtgggagaacattccaggcatggggagagccagatcgaaggtcccaaggcaggacagggcagctgtattgagggatgtaaaaaaggccagagtggcggtggcagcaagacagagagaagggctgggcagaggccacctgcaggcctggactgagagggcctggtgaggagactgttagcctgagaagggtgggaaaccgtgggagggcattgcaacgcattctctaggccggctatgtgaagagcaggagggtgagagaggcagcctggaggcccacccgtgagaagcagattgccatggtccaggcagagatggtggtggttggacctaggcagggcaaggggtggtggagctgagagggaccaagatgcctgctctccatagctccaagcacacagacactgctctaggaaggccctcccagttgccatggattagggggtgggaggggaagactggctgctgggagggaatgtggctttgtgcttggaaaacaaagaacagagcttggggccctcttctcctgggggtggtggcaggcccagaggctgttgacaggaccagaggctggagctcagggctaggcctggtaggagcaggctacagccccagggatccaggagggggtaggtgcccatgcagagggaccccagagccctccaggggtgaaccctgtggctgctgggcttggggcagggagcaccaggaaggaggacagataattagcggaatgctcaaccctgcagcctgggagccaggctggtggaggacatttgggcaacagtgccctgggccctgggcttgggacccagtgtagagacaaatgcgtttgggagccagtggtggccctggtggctgtgtgggagggacaggaggagtttgacaggactctgcctctgcctcgcccccagccctgctgctgaggccgcgccctccccgccctgaggtgggggcccaccaggatgagcaagctgcccagggagctgacccgagacttggagcgcagcctgcctgccgtggcctccctgggctcctcactgtcccacagccagagcctctcctcgcacctccttccgccgcctgagaagcgaagggccatctctgatgtccgccgcaccttctgtctcttcgtcaccttcgacctgctcttcatctccctgctctggatcatcgaactgaatgtgagtgggggcgaggtgggggcacaggccatgttgcaggccacccgggcctcagtttgtccatctgccacatgggagggctgcctctcccctggggttggttagctgggtaaaatgaagactgggaggaacaacaggggttctcatattctgaatgaaggaatgtggaggggttcggaggggttgtgtcatttggccaaggtccctctgcacccaagtgtgtgaaggcaacggccttgaacctaccctccagctgagttcatgctcttggcctctgccccatactgccccctagtggaggctcccgagagaggaggagggggagacccagctctggcagagctgttgaaacctttgtcttctttctgcctgccactgccctctggctccagttggttcattcattcgtttgttcgatcattcattcattcattcattcattcattcagcaaacattttttgagtctctgctgtgtcccaaccactgtgctaaaaccagacgctagccaggtgtggtggtgcacacctgttgtcccagccgtttgggagtctgaggtgggaggattgcttgagtctagaagtctgaggctgcagtgacccatgattgcaccactgcattccagcctgagtgacagagtgagaccctgactcaaataaataagtaaataaaagcagagggcacagtgggaagcaaaacaggaaaaactcccagttcccagtggctctaatgagatgctgccgggcagcctggagaccagagctgccccacccccaccccacgcagtgcttggcccaccctcaggaacacagtctagttggcagtggcctgatctggtctccaggcagggccaagcccacataagcaggagccctggaagcagggcaccccaggctcagttctgtcccagctcctcctcggctttggcccgatgacctcagcaagggactcagccccttgagtcctcccctcgttttccttctgcagcatgggctccccatcagacttccggatggcaagggcccttcctccaggtctcatgcttatgtgacaagaaaacaatgtcttgttaatagaggtgatgagctcagagaaggggccagctccgggcaaagagattaagtttgattctgggcatgttgagctggagggagagacagggctctgagggtgactgtcgattgtgcaccagagatgagctggcaccttcagtgagctggagccatggccatggatggccctaggggccatcttacccatgaaaaagctgtggcccagcaggctcaggaccttctgcagagcttctaaggtcttaggcagacttccttttcaaggtcccatccaacatcaaagcaaacactaaaacttacctgcatccttcattgaatacttgtttccttacccaaaaagagctgaaaagattttgataattttactttcgttttgttttgttttgagacagggtcttgctctattggccaggctagagtgcagtgatgtgatcatagctcactgtagcctccaactcctagattcaagggttcctcccacctcagcctccccagtagctgggaccacaggtgcatgaccacatttggctattttttttttttttggtagagatggagtctcactatgttgcccaggctggtctcaaactcctgggctcaagtgatcctcccatctcggcctctcacagtgctgggattagaggcatgagccactgtgcctggcctctgtaattgtgcttttgaagttatttggctgtgttggctgcgattgctctgcagtcctcatgcgtacctgggaattcttgcaaagtgagaagatctaacttactaattgttttcagatgtcatgaaacatttcagaatcctgcactgaacaattagtagagtccacatgatgtttcccttggcagacatttaattaaaattgtattgattttcagtcttgtagttttacttttgtatttgggagcatatatttttagttcgctgacagactgtgtctgtgttgcccagtggttacaaggactcagtagggtcgtgctgagcagggggtttggagccagagagtggcaaagcaggggctgagacttggctctcccgagtcctgatcggtcagcaccggtgggtgcccaggctggaaagaggaaggaggacagagctctgaggcctagtgactgagggtggaaggggctgcagagcccagggcagagtctgaggagcaagaggagtgctgggtggtgtgggttgggtgggatggggtgggtgggtggcaggcctgggggcctcaccggcagccagaggagaggtggcatcagatttcatggagctggggtgggcttgaggaagaggcacatggtggggctgtgtgctcagtgggggagcatctgtatctttaacaagcccccccagatttggctgccctgctggagagcggaagccccagtctaggcggttgtgaggggtcttcctctccagggctcctgggctccatcgcccagagtccctgtgtcctcccttctccagggtggctggtgccccacctgaaggagcctaggcccgtcacccccgtcattccaaggagtcaggtcgcagtctggcctggtgtccatccagttccctcaaacctctggacattggagtcagggccaaggcctcaggggtcctggtgaaaatgtctggtgggctggggtagggacaggggcaaggacacatccactccgtctccacttcaccctctcaagcagcgtgatggattttgcccattaagcataaacctaatcaattgatttgccacctgaggctccgtctgacaccactgcccacccccaccccccatcagcccagatggattatggctgggaagatggagcaccgcagtgctgggagggagatgggattctgtcagaggtgggctttcggcgcccttctgctggccctgtatagggcgcattgcctcccctgcacagccccgaagcctccaagcctgccccttcctgggcagggtgctggaagctagccctgcccatcggggcggcctggatccttagaggactggtattggtgcctgaggtctctggccgtgggctgagatcccttggtgcttccagggccccctgggtggtggcttagcatcaacagcctcccctccaggttcctccatcccctacctcttgccccttccgggaggtgaggggcagccccaggcccttgcttctacctgcagagctcttcctgtctccctctcacagaccaacacaggcatccgtaagaacttggagcaggagatcatccagtacaactttaaaacttccttcttcgacatctttgtgagtggccttggctgatcctggggaccccggaggcagagagggagcagggaaatgacttctgctgggttctcttttggcagcatatatccagtctgatcagagactcggctcccatccttcgggagccatcagtcattaaaacctttgctccacaaggctgggcgcagtggctcacgcctgtaatcctagcaccttgggaggctgaggtgggtggatcacttgaggttaggagttcgaaaccagcttggccatcatggtgaaaccccgcctctactaaaaatacaaaaaattagctgagcatggtggttcgcacccataatcccagctacttgggaggctgaggcaggagaatcacttgaacctgggaggcggaggttgcagtgagctgagaccgtgccaccgcactccagcctgggcgacagagcgagactctgtctcaaaaaaaaaaaaaaacctttcctccacaaagcccccttcagagagccccaggtgggagagggaagataagacccctgtgcaaggttacatccaaattgtcccagagacatgctgactcagtcgttgtcccctgaggtgtgcatgcccataggaagggaacgtgggggcaggaccagaggggaggtcagcctgcagcagggtggggggcagtagcttcctgtgactgccttgctcccgtcccccaccaggtcctggccttcttccgcttctctggactgctcctaggctatgccgtgctgcggctccggcactggtgggtgattgcggtaagatgccactttcctggcagcttctgggccctggcagggctggtggaagggatgggatggaggaggactcacttcccagcctctgccttccccttcctccctccctcccctgggcaggtcacgacgctggtgtccagtgcattcctcattgtcaaggtcatcctctctgaggtcagtggctcagggtctggccagtctggtgggcatcagacctgagtggtatgcttctagagaggagcatttctctaatttggggtgtctgtccctgttgtccgggttagggggagagggaatcctgtcctttggtatctataaggaatcatccttcacccgcttccctgacttagccccttgcagctctaggaatcagaaggttctttctccagcctaaccccagtttatcctgctgcagacttgagagggttcccaagcagctgctaccaggaatggggtgtatgccagtttggctggctagagttggtagccacagaagggggctctgggtttggggtgacccctgccatggagctcagccccctcccttcacagctgctcagcaaaggggcatttggctacctgctccccatcgtctcttttgtcctcgcctggttggagacctggttccttgacttcaaagtcctaccccaggaagctgaagaggagcgatgtgagtgcttgcgggtaggggggtgcagcgagggttacccacagccccaagagaggggagttgcgggcatgagagtcagtctgaagcatctcgccacctctgagcagcctccagtagcctgagggggagcttgggtgggggtaccccaggctgctagggtgtaactgtcctcggtccgggaccgagtctgctcctccagggtatcttgccgcccaggttgctgttgcccgtggacccctgctgttctccggtgctctgtccgagggacagttctattcacccccagaatcctttgcaggtgagggctggtgtgtgggggaactgctttcagggaggggccttgtgaggaatggggtaggctgggtctgttctttctattccttctatcaggctccctggggaaagccagcaaccctctcccacacacttttatcccccacatccttgcactcacatacccgaaccccactacctccccacactctctccccaccccttgccattgtcatctgtgcctgttttctgcagggtctgacaatgaatcagatgaagaagttgctgggaagaaaagtttctctgctcaggtatttgcctgcctacccctaacccctgcccttggaatgggtgcctggaggagggcgggtgcaggggtcagccggggtgggcaggggtttcccagtagaggctgaacctcgggcaatgcccatccgagtgtctcccccaccaccagtccggcccccctggtctgcctcatgcctgggcacacaggtggagcagccacaagcctgcagggcccagggagaccagcccagatcccacatgtggctgggccaggcccctctgggaagcatgtggtatgtctagagagagaacaggccacgaacatggtggactgcaggccccaggctgacccctccctgcctcctgcttccgtccaggagcgggagtacatccgccaggggaaggaggccacggcagtggtggaccagatcttggcccaggaagagaactggaagtttgagaagaataatgtaagaagccctctcccacctgaccttcccatgcgtgttaggagtttctgttctcttttctgaggcctgaggaagaaacccaaagattacatgggttggagccatattcctgccccaagagagggagctgggccctcgggtcggcaggaggctgggctggattggacgtttcccccgtgccccttggccccccttccccgcaccccccatgtttacttccctgctgttctgcccccttggctccaggctttgaaggggaagccaggcttctgctctgcatccgttgtttcgtttcatgatcaaaacaacattatctacaaagatcgtagagagcttggaaaacagagagcaacatgccccagtccctctctctggccagttcttgtggcagccccattggcctggagacatggttttttgtggttgcagctgcagctgtccccccgtcttttaactcgacatcaaaagcctctctcctgccagtgccataggtttgttagagctactgttttgtaacagctgctcaggtgtccccaaactcctggagttttccaccctgagctgttaaaaacctgccctgcctgtcacccatttctgtgccaccagcccaccccctgcctccactctcctccctgccaccttctgtccctgccataggaatatggggacaccgtgtacaccattgaagttccctttcacggcaagacgtttatcctgaaggtgagtgaggggagcgggtgtcctggagccccagacagcacaggaggctccaggaaggtgccgaggggccctctggtgggtgccccccaccaagagggaagggttggtctgcccgagcccatctggcaccacccagccctctgccgccctgtcccagaccttcctgccctgtcctgcggagctcgtgtaccaggaggtgatcctgcagcccgagaggatggtgctgtggaacaagacagtgactgcctgccaggtgagcccagtctggctgcctcttaaggcacagatgggggcacagccacgcctcagtgggatcactgaagcactcagcgcctcagctgccccatctgtacagtgggtgtgatggtaacagtgcctgctcgggagggtcgggaggagggcaggaggagtgctcatcaggcgctgcccagggcctgcctgtggcaatagcagttagtaaaggggcctggggtgttcccatccctggggttttcctggggcgacctgttccaaaagtctccgttgacggccctcagatcctgcagcgagtggaagacaacaccctcatctcctatgacgtgtctgcaggggctgcgggcggcgtggtctccccaaggtgagtccatgccgggccccctcctttcagccaggtcttctgcactttggccttgggtcattgtcccctgaactaaccctccctcccgcagggacttcgtgaatgtccggcgcattgagcggcgcagggaccgatacttgtcatcagggatcgccacctcacacagtgccaagcccccgacgcacaaatatgtccggtgagcctcactttgcctggggtcacccctgccagcccctcccctgggagcattgagcagtgcagggtacagcatgtacagctgggcacttcccctgctgaggctgcgttcctgttccctgtcccgctgggctctgctcctcctggctactaatcctgctaatcttgctgctctgtctgtggagatggggggtggtggacagctggaaccaagccaccaaggctggacgggatgtgcggcggtggctggctggggtagaccatggatggggacccgtgcagggaaggggcctgagagccatgtgctcactctgggctgattgacctgagcaggaggctctatgctctgggtttcatcttcctgcctaaggagactcgggtcccctttcgtcctcctcaccctgtcctcactccgtcatctttctctggagtggctcaggagttcccccaaagataaagggattatggccttcccgcatctgtgcctgggcttctggagtcttcccttttgtccagtcaggctgtggtgctgcgggtggccccctcccatagaccccactcttccccatcccctcctgggttccagcaggagcactgttctttgaataggatgccaggctctgctttgggcactggacagacttgctgggtgcagggaagctcacttcctctctggatgccaacttccttatctgcagaatgggcttaggtgtgctcagtggagctgagggagaatgaaatggtgatgggatgtgaaccgtgcctcccaggcttagccttctcctgagcaggtgtcccctcctgaaggggaaggggtaagaagcgccagcccagcctactctgccatagcagggctgacctagaatctctggacagagtgtatgagggctgggaaggtggtgagctctctgtccctgggggtgtgcaagcaccaacaggccgttgtaggaggattcaagcatcacagagtgggtgggggtggagggccgattctgcagcccatgggacacctgtgctaagccttgttcagatagggtagctctgcctttctgcttccagcccagtcccagctgggccaagaatggagtgtgagtggtaggggctgcgggggggtgtcagggcctcactctgttccaaagtccccccaatgatgcctctttccataggggagagaatggccctgggggcttcatcgtgctcaagtcggccagtaacccccgtgtttgcacctttgtctggattcttaatacagatctcaaggtggggtgctggggggctgccaggtgggttctgtggagtggaggggaccctgctgctgacttggttgctgcatgactttgggggctctctgccatgcctgggcctcccctttgtcagccacctttcttacttgaaaatttgggtcagggtccagatggtctcttagccctgggttgctgtagggcatgtgcccccccttcttacctctgagtcctgaggccctgaggaagggtggctggtggccagcccggccccaccctggtctgtttgtgttgctggtgccaagagccaggcccagcatgttcttcctgccaggggtgagtgggagagggcgacccaggctggattccagagctgcacctgcattctggcccagagcccccctgctggtgccagctgcaaggggagaccctgctgagggcaggccatcaagtgtgacttctgcctgccttcccccagggccgcctgccccggtacctcatccaccagagcctcgcggccaccatgtttgaatttgcctttcacctgcgacagcgcatcagcgagctgggggcccgggcgtgactgtgccccctcccaccctgcgggccagggtcctgtcgccaccacttccagagccagaaagggtgccagttgggctcgcactgcccacatgggacctggccccaggctgtcaccctccaccgagccacgcagtgcctggagttgactgactgagcaggctgtggggtggagcactggactccggggccccactggctggaggaagtggggtctggcctgttgatgtttacatggcgccctgcctcctggaggaccagattgctctgccccaccttgccagggcagggtctgggctgggcacctgacttggctggggaggaccagggccctgggcagggcagggcagcctgtcacccgtgtgaagatgaaggggctcttcatctgcctgcgctctcgtcggtttttttaggattattgaaagagtctgggacccttgttggggagtgggtggcaggtgggggtgggctgctggccatgaatctctgcctctcccaggctgtccccctcctcccagggcctcctgggggacctttgtattaagccaattaaaaacatgaatttaaaaaaaaaaaaaaattccagcccctcccactgccttgcctcttgagggaagagaaaggcaggcagcagcttggatgaagagggaagacccctcacacagcctctcctgggctcacaggagggcggagcccggggagccagttcctgaaacatgccccccattccccccccgcccaccccccactccccgctttcctgaccagttcaactgagcagatgactggtcagaaaaaaatgccccgccccctgccaggcttcagcggggcaagtttaaagtctctagtccaggaatggaggtgggggtatgggcacctggcagtgcccacagcaagccttgactgtgtggcctggagatggggcctgagcttcagggtcactgaggcacctctgggatccaggccacctggagccccggacctcccagactccactcacccattccctctccccgcacggcactcacaccaggggcggcctggagcccggatcgcagggcggggccaggccactgcctgccttcctcctccctcccggctggcctgcccccttgcctgcctgcatgcaggcttccagcagagccagcttcttcagagccaggtggatcctgtttcggtcctgcctaggtgtgtgaccctgggcgaatctacctctctcagcttctgcttcccactttatgaaaatgggactgatgtcacagggttgttatgagattaaaagatatgaagaaccggggacagtgctcagtaatcaatagtctgcagttctgcacccacgtgctcctgggtactctgccgtccccacagggtcctcagctcagcccctgtcactgcctctcctgccaccctttgtccactcggcagtgttctcactcctcatccccccacacccaccacctgtctgccagcctcttgcaccatgagttgctactcctggggtgctggactgtccccacagccatctgtctcccctgctccccatgaagaagagccagtcccctcccaggtagcacatcagagcgggcaggctccagagctcttctggtcctcttgcagtggccagaaagtggggaaaggggcccagagaggggcagggactgacccatggtcacacagcctatttatggctgatctggagccaggccttctgactatcacccatcagagcccctggattcccatttcacccaacacaggtgttggggtagaactgggggccctccacccctactagcctgactgtctcctgagacctgtctcctaagaccacttacctgaccactggccatggggaaggaaaacacctggccaaggctcatgccccaggttcccaggcatgaagttgactgtctccgcccctgctggtgtggtgagggtgactggggactaggcactaggcctttggtgcaggcgcctgaggacgtggttgcactctcccttctggggatatgcccttgagcccaggcagaggagagcacagccagggcaggacctggcagccctggtacagagcccagagggggcatcagttcctgctggtcctgctctgtttacagacaagctgctgtcctccctgcaaaggggagtgggtggggcagagggcaagtgccaggggggcacaaggctgggcatgtggctggcatgagacggtgtctgagtaatgtcaggcacctggaggcattgaccccaggaccttggaccccagacctctgaccggggggcagccagcgtccaggtaccccaacccctgccctgggtccggcgtccccccattagtgagtcttggctctacttatagcatctgacaccagaggggccgaaaatagcccctggagaagggggaggagggggctatttaaagggcctgggaggggagagagaatgaggagtgatcatggctacctcagagctgagctgcgaggtgtcggaggagaactgtgagcgccgggaggccttctgggcagaatggaaggatctgacactgtccacacggcccgaggaggggtgagtgtgggtctgctagagccctgcctctgctcccccagagcaccctcactgagccatgaggccagagcatgaagccctggagaaatttctgggggtgggggcaggaagaatgccccatggggagagcaaaggggaaccacccttcctgcccccaggtcccagcagcccaggggagccccccacccagcctgtgcccagagagcaacagctcccaggagctcactgcccctcccctctccccagctgctccctgcatgaggaggacacccagagacatgagacctaccaccagcaggggcagtgccaggtgctggtgcagcgctcgccctggctgatgatgcggatgggcatcctcggccgtgggctgcaggagtaccagctgccctaccagcgggtactgccgctgcccatcttcacccctgccaagatgggcgccaccaaggaggagcgtgaggacacccccatccagcttcaggagctgctggcgctggagacagccctgggtggccagtgtgtggaccgccaggaggtggctgagatcacaaagcagctgccccctgtggtgcctgtcagcaagcccggtgcacttcgtcgctccctgtcccgctccatgtcccaggaagcacagagaggctgagagggactgtgacttgggctccgctgtgcccgccctgggctgggcccttcctggctaggactgtggaggggagctgctggccatggctgctttgtagtttgcccagagttgggggctaggggaggggggagccagaggccaggatgcctgagccccctgagttcccaaagggagggtggcagagacagtgggcactaagggtggagagttgggggccagcacagctgaggaccctcagccccaggagaagggacaaaaggtactggtgagggcaagaggtgcctgggaggagtggccctgatccaggaaaatgtgaggggaatctggaacgctctaggcagaagaagctgggagggagggggaggtgaaaagggcagaggcaaggatggtggggcccccagcaccctctgttagtgccgcaataaatgctcaatcatgtgccagagttgcatctctttccttgtggttgggggggctggcccatgggtgtcccctcaatgcccacttctgggaccaggctccgcatctgagctaaatatggcagagctaatgggtacaccccatacttggggtgggggtgggggcaggacagagctgtaaacagggtgctgtctccagtctccttcccgtaccctgaccgctgcccagtcctggcttctgtgtccagccccctggcactgggtggtaaccagcaagccagctggcatccgcatccagggtttgtttcaatgatgtctcgtggagaatatggaggggctggtgccaggactgtccttggctttgcctcggggtgtgaacggggtcagtgacctctaaaactaacctgcctctcagttctgaatccagacagaatcaatcctcagctgtgtctcgctccacaccccctgccctggaagccagggaaggttggaggtgctagggggtcaggctcccctctgtgacccctgcagctgttgtggtgactcatgtcccaacctagctgcctctcccaaggagactttcccctggggacaagggggagggaatggcatggaggaggcccacatcaagcggggccaggaacccacggtggcaggagctgggctggtgacctacccagggcagaagggcccgggactcatccagaggggaaggaaggggtcttcaggaagaccacggagatgccacaggcagaattggcttcccatctgggagataggtggggagaccctggcattttgacagccagaacctggggtgctgagcagaatcttcatgcctggcctggccgctccttcggagggaagctggagggtgggctgcgagaggagtggggtcagagcccctacatccgcaggaccccaaatcggctgggccccaaggcccggactgcgctccccggtggccccggcggccctccgcgaatgcgtcctgcccctcccctgcccaagccctctgccctcacccgggtccggcgccgcccccgaagtggcgggaacaacccgaacccgaaccttctgtcctcgggagcccccagataagcggctgggaacccgcggggcccgcaggggaggcccggctgttccgcccgctaagtgcattagcacagctcacctcccctatcgcgcctgccatcggacgggcagtgccgcgccctgctctggggcccccggagcgaccacagcggaggccggaacggactgtcctttctggggcggggtggggagggggtgtcgctggagggcccggtggcatagcaacggacgagagaggcctggaggaggggcggggagggggagttgtgtggcagttctaagggaagggtgggtgctgggacgggtgtccgggagggaggggagcctggcggggtctggggcctcgtcgcggagggcgctgcgagggggaaactggggaaagggcctaattccccagtctccacctcgaatcaggaaagagaaggggcgggctgctgggcaaaagaggtgaatggctgcggggggctggagaagagagatgggaggggccggccggcgggggtgagggggtctaaagattgtgggggtgaggaactgagggtggggggcgcccagaggcgggactcggggcggggcaggcgaggcggagggcgagggctgcgggagcaagtacggagccgggggtgtgggggacgattgccgctgcagccgccgccccactcacctccggtgtgtctgcagcccggacactaagggagatggatgaatgggtggggaggatgcggcgcacatggccccgggcggctcggcggtcagctgccgcccccacagcggaccggtcggggcgggggtcgggcggtagaaaaaagggccgcgaggcgagcggggcactgggcggaccgcggcggcagcatgagcggcgcagaccgtagccccaatgcgggcgcagcccctgactcggccccgggccaggcggcggtggcttcggcctaccagcgcttcgagccgcgcgcctacctccgcaacaactacgcgccccctcgcggggacctgtgcaacccgaacggcgtcgggccgtggaagctgcgctgcttggcgcagaccttcgccaccggtgagcgggggaaactgaggcacgagggacaagaggtcgtcggggagtgaaagcaggcgcagggaaataaaaagaaggaaagggagacagaccaggcgcctaacagatggggaccaagaaacaagagatagctgagaggtgcaaacagaagagaaaaaagagcaacatcccttaggagaggggcagaggagagagaggtggagagagggggcggagagtgctcagaattgagagctaaggtgggggatgcaggacagactgaggtggagatgcataggaggaaatggaggcagatgtgggacaggggtgagaaactgccaggatttcctcgctgagcctggctggtaggtatagttgttttctttctttttctttattttattttcatttatttacttatttttattttttatttgttttgagacggagtttcgctcttgttgcccaggctggagtacaatggcgccatctcggctcactgcaacctccgcctccccggttcaagcgattctcttgcctcagcttccctagtagctgggattacaggcatgcgcccccatgcctggctaatttatttgtatttttagtagagacgggacttctccatgttggtcaggctggtctcgaactcccaaccttaggatccacccaccccggcctcccaaagtgctgggattacaggtgtgagccactgcgcccggccagtaggtatagtcttctagatgtgaaacctgagtctcagagcggtgaagttcccttccgaagggcagcccatgttggagctgggttcagtctaactctggggccaatgctttttccagatggagacacatttgcagaggagaaggaagaactagagagaggcagggagatgcaggggagggaagggtaaggaggcaggggctgcctgggctggctggcaccaggaccctcttcctctgccctgcccaggtgaagtgtccggacgcaccctcatcgacattggttcaggccccaccgtgtaccagctgctcagtgcctgcagccactttgaggacatcaccatgacagatttcctggaggtcaaccgccaggagctggggcgctggctgcaggaggagccgggggccttcaactggagcatgtacagccaacatgcctgcctcattgagggcaaggggtaaggactggggggtgagggttggggaggaggcttcccatagagtggctggttggggcaacagaggcctgagcgtagaacagccttgagccctgccttgtgcctcctgcacagggaatgctggcaggataaggagcgccagctgcgagccagggtgaaacgggtcctgcccatcgacgtgcaccagccccagcccctgggtgctgggagcccagctcccctgcctgctgacgccctggtctctgccttctgcttggaggctgtgagcccagatcttgccagctttcagcgggccctggaccacatcaccacgctgctgaggcctggggggcacctcctcctcatcggggccctggaggagtcgtggtacctggctggggaggccaggctgacggtggtgccagtgtctgaggaggaggtgagggaggccctggtgcgtagtggctacaaggtccgggacctccgcacctatatcatgcctgcccaccttcagacaggcgtagatgatgtcaagggcgtcttcttcgcctgggctcagaaggttgggctgtgagggctgtacctggtgccctgtggcccccacccacctggattccctgttctttgaagtggcacctaataaagaaataataccctgccgctgcggtcagtgctgtgtgtggctctcctgggaagcagcaagggcccagagatctgagtgtccgggtaggggagacattcaccctaggctttttttccagaagcttccttgaggctagcattctgtaccactcattcttcccaaactaaggaaggccaaggtcaggggagctcaccgggcacctgcagtgcaccaggcacttgtgatatgccattgtgtccatcgcatcattcattcctgcattcagcagcaggtcctgctagtctgtttccaggtgaagctcagagaggtgaagtcacaaacagtgcagactgcttcagaccagaacgagggagagtggggatcatgaggagatggaagtagaatctgcaaggtggtggggaggtgggggtgttatgattgaagcacaatggccgagggaagtgaaagggaaagaactggctccagctccctctcacaactggacttgagttctgcccagctctgcctctggggcctgccattccccatgccacgtgcccaggcagagacctcacctctgtttactgcctccagccagctctgggacctgcccctgccgccacaactgtcttctcctgccctccagcccaccctattcacacaaatgagctgaacaagggcaggtgaggcttggaattgatttattaagcacatcccttgccaccctcccaccttaaaagttttcagtatcaaaagaagctagcgcaggccacccgagtccctgaggttggagtcctagcatagctcccctccctcaaagagggacaaggggtcaggggcagagcaaaaatccagtctgcttcaaccacggagactgcctttgggatggaaagtttctggagctccctccattctattcctgtggggcaggaacatgccagggctgctggtaaatggcaggggtcacctttaccagggcgcaggcatagtgtggcccctgcctgccctggggccaccctggaacagtaagaccctctgggaagggaagaaaccagacccagccataagctttctccccttctccctcaaatcgccccttcctcctccccaaaatcaggctatggcaaaggggctggcagcaggggaatggaggttttggaggggaaggccagccatgcgaaggcaaggagaaaaggaggatggagagagccccagccatccccattttccttcctctgcctccgaggggctgcttctggagggcactgttgtgtggggaccctgtgaggtttgcaggaggcgggcaaaggggcaccagacagggaacatgcacacaggcagcctggccatggagagctcctggctgtccgcccaggtggcgccttgggcagagctggcgctccacaagtgattattgatggtgacaggattccctcatcctgctccaacctctcaactgtggacacattcaccggcagtcactcatctcacatgcccaccagcacgcgcacacacgttcccctaacccacgctaacacacccaccccctgcacacacacactttgaagccacacctcttccccgacaacacccgtctccacactgcgcacctaggcctgagctcacacacacccaggcccatgctcacggccctgtcacctatgcactcagcctggcccacactcccgacacacggtggcaggctctcaaccagacagcagcacaggatccttgccctgggcttgctggagccctggccctgaaagggagtatggtgaggcctcctgggaacctggctagggcaatggtcagggtgaaactccttcccaatcccagcagcttggtccctcaagatcccatggggagaatcgccgtgaaccttggctggccaaagaacaagcatccagcaccacctagtggtgtcctggaggagggtggggggtggtaacagaaggggaccccctgtatccctaaggcctgtggtccctggtctcccaggtagacagagggcttcaggacccagccaggcagctggggatgtggggaggaggctgatggggaggaaacaggcagctgtcctcccggtagagctaagagcacactcagttccaccccagttcagctccaggaggtagaggggctgcccactctcgagtcccagatgctgggaggccttccctagaacagactccaaggctggtgagggccaacagggggtgggctggccacatgattctgggcccacatccttcatgtccaagttcaagaagttgaaaagagaaaatcatctcaagggttgaggggagaagggaggccagcagggcgggggcaggatccccactggggcagactcgctccaaggtcttcagtccagcttgaacttgtcctctgattccttcagcaggtacaggctgtcatcttccagaaagctgtgggccaaaggagtagcccattgaggcacacagctctgacagctcgcatggagacaagggtggggtgcatgcaggcaaggtgggagggggcggatgggcacacagagcccccaatctcccctaaggagtgggcaaggaagggtccaaagaaggtgagcaccaggcagggggcagcacccacctgaaaaagaggacgtggacagggatggtgctgatgtgccagatggcatgggcatccaggacccagaagagcggtgggaagtcaagcagctcgagcagggacagcccctgcagcagcaagaccaccaccacgcacttgcgcacgtgaggcagccgccgctggttccacaggcaccaggccagccaccacaccacgttgaccaggcctgggtgccagtgggggcaggagagactcattccttcggctccttctccccaaggccacccccaactccatgctctctgaccccaggatcatcctcggactctcctcccagcctcctctctctcccacctcaaattcttctccattcctctaccccaagagtctctctagaacctccttctccaggaatggcaccaacctcccactcgcaccccaagctagcacttctgcagatggcccaagccccccagggcctcaccaatagccacgttggccaccaggttgtagccatagtcgaagcggatgaggctcaggtaggagacgtgcacggtcagcatgagcagcaggagagcccggaaggcactgaccacagctgggtgctgcagccccacggtcctgccccaccgtccagggttgctcagagggcaggtggcccatccccagagcagcattccctgaagcatctcctccccccaacattggtgcatggcccctgaagtcactacccctctccccaccaaacaggccacagctgggcagcaagtgctacagctccttgtcaggagccagggcccccagtcctaccccagagtcctcacccaggacagctgatgtgttgggggttggggggcgtaggtgttgggagactagtgaagaaggcccccaggggaaggctgggtgacccctttctgcccccagggttcgattttgcccctgcagccacccaggcaggctcacctgacgcagcacaggtagattgagtgtaggatgacagtggaggcacagaagtagtccattttctgaggacagggaagggtggtgagggaccagcatgaggcttcacggagaggacccgcggggatgggggcatggaggagtggcagagaggggccggggtcctgggcctgcctatcactgtttcactctgactgagtcttgtgttcacatcaccatacaagtttttaaaaatgtgcccaggaacaaggctttagggacgctggtggagggttcctgctgaggctccaggacatgaccacgctgcacagaattcagagcacagtgtggagtctgacagccatggggtcacgtcctgtggcaacccttcactggctgggtgcccctaagcatgtggtccccctgtcgaaggctcagctgcctcatcaggcaagaagagcgaatactcatccccacctgatgaggctcactgaggatcaagggcaccaacaggtttaggatgcccaccccatactcctcccagtgctcctcagagggagttggcatgaccctctagagcccctctgcccacttctgggctcctctgggaccaccctgtgcaggagggggagctggaggaatgctcacctctgtgaggtcagtgtccctggtgtggaaaactgtggaccagaaccatgcattgagggacacctaaggagggaggggctggtgagcatgctgccccccaccctgacctcaaggcagggacccccatttgctcacatccatttcacctttgggaaggggctctgcaggacaagaaatgtgcttttcctgcccctggagccctctgaacaaacctatgtccctctacccccacccagccagggtccctggggtggacttcctgccaccccaaacccccaaggccacggggggctgcagcctccacaggttccggcctggcctgggaaccagttccggtatagccaagctccctagttactcaattgctaagacaacagcccccaggggccttgcctcctcctccaaccggcaggtgttgacagcaccaccccacccgggcccaggggagccagtgacctcagcctctgggggcgggaatgaggtgggtggggtggaggggctcgagccagcttggggtgtgttccaagcagcaggggagggagatcaagcagatcccactggggcacaggctcccaggaggagggtgaaccaagcccagcttcctcctggctgggcctgcccaacccgccagaccagtggctgctcccgagcctgggaggagtagagggcaggactggaggggctgtggtgggccagggcccaggggaatgtttgaggccttcttcctggaaattagctgcgtggagagagcacaaaagttatctagcgaatgagcctaagagcttgtgggcgttggtgctggcactttcttcagggactgctgtgtccacagcaaaggcccaaactgctgaaagcagggtgggctgaagggaagggctgggaaatcgtgacaaccaaaggaacagcaggccaggccgggaatggcctggaggtggggagggatgcgctagggtgggacaggcctggcggagatgaggaaaggccaggaactgctcagttggctccaatgtaccaggaaaactggccaggcaggggacagagggagggggcaagaagctacactctgtctggcactgtagcaggcaggtcagacagtaagatgcattccaaatgcaggtctggggagctcaggagagaatgggaggagaaggggtacaggcggggcagaactgctgcacagccagtcaggttctcggggtgccaagctctggaaggcgcaaggctgcctagtgcccctgtctggcctgggctctgggctgagccttgctgcttctgctcctcttgacctggtcaaagggccctgcccttctcagcccaagcttcccccgggacaaatcatggctcaagtgaaacttcagttcctttccagcctggcgttaggtggtgtggtctagggcaggctgcttcctcctttgaggatggccactctgtcccttccaccagactcaaggctctgccctgctgcagccccctccccagagacaggcatggaggctgcacaacaggactgaacctggtggcttctcagacactgctcccacagtctgaaaagcttagagtcagcatggggagaggagcaggcttgggctggagacgggacccaggcaatcacatggaccagttctccctggcaggccaggaacagggacatccttagggaggagagtggccctggagccaatgtgggaaggagaagaggaaggcggcagggactggcagccagccaggcctccttgtcacccacagcaggaagggggaggtgagaagaggactgcaggactgagctaagtggctcagaacaccgaaagcagggggtgtgtgtgcgggcaaacatatgcgtagggccacaggatgggtggggctgctgggtcccctctccaaccgcctccctgggtgccttccactcacagagacccacctgaagcctggcctctgcacccctgaaaagcccctcccccctggggagcatcccactctgggggtgctcctcttctcaccctttcctcagatttgggaggtagtggtatcattaagaatgcaagccctacagccagactgccagggttcagttcctggctctgcatttcctgtgtgtccttgggcaagttatttagccttgctgtgcctcagttttctcatctgcaaaatgggaataatcatagttgataagggtttaatgagcaatacaaatacagcgtacagcacagagcccaggacaggctgaaacatgagtgttctctccacttgcctgaccagcacagaaccccgtcagcttcccatagaactgaggcctaagaggatgtctgcctcccactctccctgcaggccaaggatgtttaggcagataaggggtggtctcctagctgcctaggcccacctccacagctccaggctgggggaagagtgtccagtcttcacaatgagacagagtctgcattcaagtcctgcctcagcccctacgcagctgtgtgaccttggacacataacccagtatgtgtgagcctccactgcctcacctacaaaacaggttcataatgatgctcactgcacaggaggccatgaggacgaggtctgcggaatgcctggcaccaaggaactcctctgaatggctgctggttttgctgcctggtccatagtaggtgcccatcaatgtcagtttccttcatcaggtccagtagactgactctcaccacgcccgttcacctgcccctcaacttccctttccgcaagggtcacaaagtttgaggtcaaactatggggcctcagggtctctccattccagaacggagacacctcagctataggaagagcccctcctccttcctctggagccatgttcccatcaatgtgaaccgaacagatccatttctcctcactcagagtttgtcatcaagagcaagcaaaggggaaagatgggctctggaaggaaggagagttccaagatgccaaggcacggctactctcggactccttgccacgctcaagtgaaggggggcagggaggggaactggccaggagggcgacaggctgcccagcaggcacccagagctttgcgtaaacactgaggagagggggtggccaggggcagggtgccagtgggggtggaataggagactgggtggagggagagcaagaggctgtttcagtctgttggaaataagaaaatcgagacaaaaatatcacagccgtgaaactggttggatgccaagtgagccagatctgtcaggaattcgacccggcgctaagccccagtgctcggggctgtcattgacaccatggcggtggggacaagtggggcttaaaatagctcagtgtctcagaagtgggggaggcagaatgttaaatatgatgcctgctgccatcctgggctcctctggaggccacagtgtctcaccccctgcctcaggcagggcaggccagccccagctcactcctgagagaagggagacagaggtggatgcggatgggagaaggagggctttttccaagatcccagaggatcccttgatttcctgccattgcctgttccactagctcttgtctgaccatgggaagtccttcctgaagtctaaccatcattctactacagctgcaacctacctcttcttgtagtttgcttaacagaggaagagaagaatcagtccccacctacacaaaccactctacagagatggtttgggcttcccaccacttcaccctcctctctacacctgaggacctttcctgactggatgaaggcctggggaattggtttggccttctggctttggcacacagcaggggcccctactccgtgaagtcaaagagacatggtatgcggagctttggtaggctccccacccgccgcctggctgctccccagcccaagcccaggcctaaatggcaaggcaagggctgccttcttgtgccagcgttatcatgagtcctgctggagggcggggtctcctcatttcccagaggcaaagctgaggtacccttcccccaagacttagcccggagcgggtgagggaccttgccttcctatcctcaccccaacagaaatcaggagcctcagtgccccagaaggcccaggtcaaagtccactgccgcaccctccatacagctcaggatccctccctcctgcagaaactcacagggcaactgggaagcccaagagcaactgggaaagccaaactaggccatccacaggagtgtgggttctgaggctttgtttcttgaaggcctagtgagagcatgagggggtcccatgtcccagaaccccacatcccataagacacacagggcccaactatctgccttctaccaccccaacatctaacatctcctgctttttctgtttttgtttttgttttttttgagatggagtctcgcccagtcacccaggctggagtgcagtggcgccaccttggctcactgcaacctctgcctcccaggttcaagcaattcagcctcccgagtagctgggattacaggcacccatcaccacgcctgactaatttttgtattcttagtagagacggggtttcaccatgttggccagcctggtcttaactcctgacctcagatgatccacctgcctcagcctcccaaagtgctgggattacagacgtgagccaccatgcccggccatctgctgctttttctctagggtccttagtcacactggactgcaggctaccctggggaagtgtgacccccctctccaagaaggaagctgagttgcagataccattgaggtgaaaaatccaagaatcagggatgacaagaccagatctgtgaagtgacccctggcctctggcacatgttataaagacaaggggtgggaccctccgatctaagaaggctctaagcttcttcagagttcaggcagggctgtcccatgctctctagtagaggtggggacaagtgggtggtacacgctgtgggcccagacaagcagtgtccgtggaagaaccccaaaggaaagcagacaggtgtaacgtcctcagcttccctgcccttcctgctttcttagccaggactaaatttgcttcgctccaagaggcctacacaggaagtggtggctttatctcacccagcctgtgacagtgtgtgccgatgccaggccctgcctacatcagagcccctagccctcagcctggcactcaggggcctctctgctccatctactcttctactcctattcacacagctacaatggggccaaggtttcctggaatgctggaattcaatcccctgtccccacacatgtatgtgtctaagccttgccccacacatgtatgtgtctaagtcccagattaaacctctcctcctccccgggcttccctggcctggcagacttccccagttagaggacgcggtctccccacctcacgactcccagggctctctaccggagcaccccttgactctgcctgccgtctgctgcccaggctgcccagaactgcacctcccactatgcttagctccctggggcaggggattcagcctccacaagtgctaaaccctgtctccacccccagcaaatgctcaatggacactcatcacaggacacggagtggcctagaagaagagctaagttctcaggccctggagccagacagccctggacaccaaccctgtctttattccttgctaacttgttagctgtgcattttgggcaagtttttttcccctctgaatctaactcagagctcataagggtactatgaggatgaaataaggaaatgtatgtaaagtgcttcagacaagcctgtcacatggctcctgttccttaatttatcacaactgttattaatagttgttgaataggaagtattaaggagggtccatatttcccagaggtttaacagcctccttccctgacctccttcccacgcccacctcccaagtctaaggctcggcctggacttcgcagcacgccccatctatcagcttttctaaggccctagagacctctgtgtctccagattccggggtctccttcagttctcacgtgtacaattcaggacagcagaagcctctctccttcctgtgctcatcccgggaagcacaatccaagcacactatctcccagttctccacctgcccctccggctactccttctgtctctgtgtctggctcatcttcctttagccagccattacattttggggttccccagggctttgccctagatcccttctcttttcactaggctctcctggggtgatctcatccacacccacagcttctatcactgtcttttttttttttaaagacaggtcaccctttgtcacccgggctagagcaacaagagtacagtgacaggatcacagctcactgcagcctcgacctcctgggctcaagtgatcctcccacctcagcctcctactagctgggactacgggcatgtgccaccaggcctggcttattttttttgtatttttggtagagacggggtttcaccatgttgcccagggtggtctggaacttgtgagctcaagcaatccgcccacttcagccttccaaagtgctggaaccgcaggtgtgagccactgcgcccggcctccatcactgtcttataagcagaaacacaaggggtcatcccttactgctctttcctcatctaatccactcttgaagtttatcagcatagccaagatgttgaaagtgtggactctggagccagatgcctgaattcaaaccctggctcggtgatctgtggctggacttaaccttttcagtccttggtttcctcatctataaactggggatgagaataataatacctataagctgcgttaaacaaaaattacgggaggccattgttctggattgagcccccgcactagacccaagagaccagacaaaaatgaagtcactcatgctaaatgccacataatcaaactgaaactttttttttttctgagacggagtttcactgttgttgcccaggcgggagtgcaatggcgtgatctcagctcaccgcaacctccgccttccgggttcaagtgattttcctgcctcagcctcccaagtatctggtactaaaggcatgcaacactatgcccagctaattttgtatttttagtagagacagggtttcttcatgttggtcaggctggtcttgaactcctgacctcaggtgatccacccgccttggcctcccaaagtgctgggattacacgcctgagccaccgcacttgatcttcaaactgaaactttaaggtaactgataggtcccaaaacagaccactttttcctgaaaacaggagagtccagtctacccaagtaaggaagtctcctctgctttaacccttataaaaaaaaacctgatgtgggccgggcgcagtggctcatgcctgtaatctcagcactttgggaggccgaggcaggcggatcacgagatcaggagatcgagactatcctggctaacatggtgaaaccccatctctactaaaaatacacacacaaaaaattagccaggtgtggtggtgggcgcctgtagtcccagctacttgggaggctgaggcaggagaatggcgtgaacccggaaggcagagcttgcagtgggccaagatggcgccactgcactccagcctgggtgacagagtgagactctgtctcaaaaaaaaaaaaaaaaaaaaaaaaaaaaaaaaaaaatctgatgttaaccaatcaggtttctttctattgttctgtttcctggttcccaccttacaaaacccactgttctgctattgcccaatggaaacttgcattctattttgtagaacggaggctgcaccaattcatgaatcacaaattaaagccaattggctctataagtaagtttgctgtaatttgtcttttgccacttgttatggatgaacaagcttaatacttataaaatgcttagagtgatgcctggcatacagtatgagctatgtatgtatttgttaaggaaataaatttttaaaaagctttaatgttacctccaaaacacagctcaagtgtacttctcttcaatgcccaagacccatgccacctctctagtctagctactgggccctgtgctaaaactaccaactggtctactgcatccactcccgcccccttcaatctgttctctacacagtagccagaatgagctttccaaagggcaaatctattcatgaaacaacttttctcctcaaccctcatttaaaatccctccgtaggccgagcacggtggctgatgcctgtaatcccagcactttgggagggtgaggtgggcggatcacgaggtcaggagttcaagaccagcctggccaacatagtgaaaccccatctctactaaaaatacaaaaattagccaggcatggtggcacatgcctgtagtcccagctgctcaggaggctgaggcaggagaatcgcttgaactgggaggcagaggttgcagcgagccaagatagcgccactgcactccagctggggcaacagagtgagactttgtctcaaataaaataaaataaaataaaataaaatccctccgtacttcctgatgctttgagagtcaagatctccaatgtgaggctctccatggctggccccatccaccacccatcagtccgcccagctcacacccactctctgatttcctgcatgtcaggctgcctggaatgaccctccctctctcccacctgggcactttctgagacttctctttagaagccttcccttactcttctcaaatttacctagttaacattcatgcatccttcccaccttacctttaatgccccttccccagggaagccttccctgatggccccatgctggtcttggtctgcctttacacacacccctgaagcacctctccccgactgcactttttcatagttgtactcttacattcaattgtatgattagcaccagagggcagacttctggatctccagcaaagtgcctggcatatagtaggtgctcaacacctgagtgaatggcttctgtgagagcaggaaggtgagtgaatggaaattttttccttaaggcttacaggggcagctccgacctagagacatccgttgcaacctttcattctcacacccttcccaaggccgtcacggtccatatctgcaccccagtctgtgcttatcacacaataccaggccctgaatacagctctttagaccagccgtactgtgaagctgacagccctttctgcacctgcagatgtaaccatacctgggcttctccagggatggtctaagcctaggctgagctcgccaggtgcagtgactcacaactgtaatccctgcactttgggaggccgaggtgggtggatcacctgaggttgggagttcgagaccagcctgaccaacatggagaaaccccgtctctactaaaaatacaaaattagccaggtgtggtggcacgcgcctatcatcccagctacttgggaggctgaggcaggagaattgcttgaacccaggaggtggaggttgcagtgagccaagattgcgccatttgcactccagcctgggtgacacagtgagactctgtctcaaaaaaaaaaaaaaaaaaaaaaaaaaaaagactaggctgagctctacacagagactatggctgtgactccccaccaggcctgggctggaattgagattgctccaagtcctccagaagggcccttggaaagacctgtggtcccagcatcctctttagccccccatctcccctctgtgtttgtaaactgtcctactgggtcttttagtggcttccttcttcaggacaagaaaaatgcccttctttcctctctccttcccaaacagcctgacctagggctctgctggaaaggtaaggcccgattcagcaccctccctgttttctccccaggctttaccaccctgcagctgcaactttagccctgggaaacagaggggaagctggtaagtagaagccctgttgggtgttaatagggatgtagagctccaccttcctagataagaggagacagcaggagtcctgctaggttacctacccaggcgaaggccacacaggtgtggtacatgggggaggaggctggcacgaaggtgcggtagcggcagagcatcaccaggctggccaggccattgagaaacgaggccacggccgatgccggctcttgaaagaacaggaaccgggagaagggccactgaaaaaggagcagatgaaggaggtttgaagggcaggcaaccctcaactggcccagtccacctattcttgacatgctgaagcaacaggtcctcagctgagtcctcagctctggagtttggccaaagcctcaggttcagtacctcttcagactaatgagccaccctccagtgcctagttaagagttatacccccatcctggccagcaggcacagcactgtaagccctgatctctgggaagaccagatgggtcagggtagatgactcagtatggcctggtggaaacagcacagagttgccatccagaagacacaggtcccaacccctcctctaccactgaccacggtcctttgagcctcagcttactctgtgaaaaactggggtgaatacttcctgccaacctcaacaggccagaatgagataatactggattgaaacgtaccagcaggccaggcgcggtggctcacgcctgtaatcccagcactttgggaagctgaggcgagagggtcacaaggtcaggagattgagaccatcctggctaacatggtgaaaccccatctctacttaaaaaaaaaaaaaaaaaaatacaaaaaattagctgggtgtggtggcacacacctgtagtcccagctacttgggaggctcaggcatgagaattgcttgaacctgggaggtagaggttgcagtgagccaagatcatgccactgcactccagcctgggcgacagagggagactccatctcaaaaaaaaaaacaaaaaacaaaaaacaaaagaaagaaaggtaccagcaaactgtgcctcgctagacaagctgaagcatattactgtgaatccagacccctactggagaagcaacaggaaacaagccacagtaggtaagggaatttgtccctgcagtaaggtgggcatctcaaccactctaagaggcccagcaccactctctggggagactccaaagccttccagatattgctactccaaatccagaggcaggacacatgggtcctatccaattctatggaaaccagcagattttggggagaacaggtagctgccccaaacacacacgcattaccccatgcctcagactgcttggacagtgtggtccaaccagggggtatattactcctaccacgctactaccatatgcctaccctgaccctccaactcaccttgccatggaactgaggcactttgtgaccttcctggaggtagagcccaacggtgacccacatacactcatacttacagtcgtcccgacaggtccagcctgaaacagacaaatgtggcctggtgaactccccagcacagagaggaaagagagagcatgaatggggtccaagcgcaaatgtaggccaagagggcctgtaagttggagagaaccaggagaaatctcaaaattctagcttcccctttgaatgaatgagagatgatgagatgtacacataggggaaggtgtatgtacgtatgtatgcatattttagtgagcaattagagatattcgtcttttttttgtttgtttttttgagacagttttgtttttgttgcccaggctggagtgcaatggtgcgatctcggttcactgcaacctccgcctcctgggttcaagcgattctcctgcctcaggctcccgagtagctgggattacaggcatgcaccaccacacccaactaattttgtatttttagtagagatggggtttctccatgttggtcagggtggtcttgaactcccaacctcaggttatctgcctgcctctgccacctaaagtgcggggattgcaggcacgagccaccgcacccggcattttttttttttttttttttttgagacagggtctcgctctttcatccaggctggagtgcagtggggagagcatggctcaccacagccttgacctcctgggctcaaacgatcctcccacctcagcctcccaagtagcgagaccacaatgtctggctaattcttttattttttgtagagaaggcatcttgtcatgttgcctaggctagtcttgaactccagggctcagatgatctttctaccttggcagacatttcctctccttttgctcaagtccatcaagatgttggcatctgatgaactcatctatggaaacctgggtttatatttgtccttcctgaatataggatttgctcttactctcctggaaggagttcttgctatcttactcccttcctatgaaaatgaagcccaaattcttcaacctgacttttgaggctccaaattgcctttccaaccgtattggtcactactcctgttcatgtaccctgctccctgagtaaataaagctcctggatgtgcccacatctgcccagggcatccattctctctgttccctctgtctggaatgcaaagtggtataatagtaaagaggacaagcttgtggtcaaacaggccagaactggaaactccactttactacatactggctgtgtgaccttgggcagggcatttaatctctctaatccccatctgtaaaactgggattagagaaactatctcaaagggtgtgataaaaattacttgacatattgtgacacctgtcacacagtgagtgctcaatacgttggttctttgcccactatggtccaaatcgaatgtaccagtccaaagtccctccttcaaacaaaacgttccaagatgatccctgcccccacgtcttcaaagccggaactgacaccttcctatcccaaatgcttcctaatcaaagagtctttcaggggctcaaatcattctctgccttgcacttgaaaaggctcatgtccccgtggggactgtgagtcccaatgggcgggaccctggtctgatttctgtgccattcctagacattgtggcccgaatgtatttaataaatacccttttgactgaacaaataagtaaatgaaagcttctgggaaagtaagagaggctggtaaggctctcatcaccttaggggcttcactcacattcataagagacctcgtggggaaactaaggttcagggattgcagaggcgtattgggggcgcagggggcgggagcaagacaaatgggcggggcttaccgtgggggtggggcttacctgctagactcatgtagattggctggcgggagcggaagtgattcagagcgcccccagagcagttctgctcttcgcactgcagtacgcagtcgcggtacaccggctcacggtcgccctgggagccgctcgccagcgccgctgccccagctagcaggaccaaccgcgccgccaggccggccatcctttctccctggctcgccgccgggggaggagcttaggagtatgaagcttccacttccggagtaaccggaagttcctgtgttctttattctactctccgctgaagtccacacagtttaaattaaagttcccggatttttgtgggcgcctgccccgcccctcgtccccctgctgtgtccatatatcgaggcgatagggttaagggaaggcggacgcctgatgggttaatgagcaaactgaagtgttttccatgatcttttttgaggtagggctgtttactgtcaccacccctgtcggattttacttcctaaacgtacctgtaactatccacttctctccatctcttctggcaccaccctggttaaagacaccatcatgtgtcgccaagacagccgcagtagcttcttaatggctctccctgcctctacttttgcctcttccaacctgcgctccattttgaaaaattaaaatttgcccatatcactttttttttcttaaaattatttactggctcccaattaccttgggtaaaatacagtctccacaaaccctgcctgatttggcccctgtccactggtctccctcactcccttgctccagacccgcttcagagggctatgtccctcaagcttcctgactgcctggcctggtctgaatcactcactcttcttttttcttctagtcgcaattgaagtaccacctcccgagggtgattgcttccccatgcggggtagaacctttgctgtcctgttcaccactctacctccagcacagaatttggcttatggtaggcgctaactgcgtttgtttgttcttctgtttaatgaatgaacagcatacatcaacataagaacttgacaaatccagggctgtaaaatcatcagtatggttctgcactgagatcggagagaagtaatatttctaggaaaattaggaaccctgggaacaggacgcttgctttagtatcctctccctgctcacctcccctgcactcccatcagcaccgacccacacccaatctcatagaagccttgtagctaaggatcaccctttctcctcccccactctcctcaccccttgtcaacttttctttttcgtcctgggggttggaatgagtaagaagtagcctgggattccattcactcacttaacaaacatttctgagtccttagctctagcaccttgctaagcaaggcaaaatctccaggaggcaccattcacattgcattttctgtgaatggtgctctggggagcagcattcacattgccttttctgtgaatggcaaattcttccagttaaatataacatgaatagtgtcccctggagttgaccacccaactgatactgactgagaagctgaaatgaacaaaacaaccccttagccctccaggagctgaccggaaatccagtgctaatactactttgcatcttacagattagttcttttacaatactgtttttttttcttttttcatttcattttgtcctttctgtgactctgggatgagtctttttatgaggatcctcatataaagatggacatttaggattaaagaggatgaaatcctgacaaaatagggagtctcccctttagaaaattcctaagtaaggctgggggtggtggctcacgcctgtaatcccagcactttgggaggccgaggcggacggatcacctgaggttaggagtttgagaccagcctgaccaacatggagaaaccccatctctactaaaaatacaaaattagttgggtgtggtggtgcatgcctgtaatcccagctactcaggaggctgaggcaggagaatcgcttgaacccagggaggcagaggttgtggtgagccaagattgcgccatcgcactccagcctgggcaacaagagcgaaactcaaaaaaaaaaaaaaaaagaaaaagaaaattccaattttgaaggcctcatcctatattatgtcaaacatactgaaatgcagtaacgccccacattaaataagatttataaataactatacatatatataattcaatctaattgctgttaatagttgacatattgctacatttatatacatttagttaaaaaaaattttttttcccagacagcctctcactctttcacctagactgaagtgcagtggcatgatcacgactcactgcaacctcaacctcccagactcaagtgatccttccatctcagcctcctgagtagctgggactgcagcatgcgccactatgccctgctaatttttttaattttttgtagagacacggtcttgctatgttgcctagactggtctccaattcctgggctcgagtgatcctcccgcctcaacctcccaaagtgctgggattacgggcgtgagccatgccacacggccataaaatattaattttcgcagctttcttatattttagaactaacaatggaaatttgttcgggtctaaagtatttcagaggtccttgaaaacccatgcctacatacctgatggaaaaagcaatcctaggttaatggtggaagtgggagtagagacttctgttctgttgacttcttggaagatggggtactgtctctctgggacagctcttgagaatttccctgccagcacagccccagataacaatctctagatggcgattacctggcctctcttcccaactttctagcctggagcccctagttctcccctgagcctccttagcttgtccttcttcctaacttgtatttggcttcagatgtgatccacagtctgaaaagtcactaattcattccttcaactcaggcttattgagtcctcctgtgtatcagccattgtactcatgggggaaaaaaaagacaaagcatatgttaatagtagagtgtgctggacaggcacagtggctcatgcctgtaatcccagcactttgggagggcgaggcaggtggatcatctgaggtcaggagttcgagaccagcctgacctaacatggagaaactcctgagatcgtgccattgcactccagcctgggcaacaagagcaaaactccgtttcaaaaaaaaaaaaaaaagtatagtgtgctaaaggctcaacggcaagctgaccatgttcttagatcaaaattggtagagagtctacaatgtgggttccttattcatcaaatgtttattaagtttaccatgtgcaagtctctgggaacagagtgatgaacaaggcactgtacttttcatggtcagaggagggaaacaggccataaacaagtgtcaaacaaaagactgaagccaggtgcggtggctcacatctgtaatcccagcactgtgggaggccaaggcaggcggatcatgagatcaggagatcgagaccatcctagccaacatggtgaaaccccatctctactaaaaatacaaaaaaattagctgggcatggtggcacgtgcctgtaatcccagctactccggaagctgaggcaggagaattgcttgaaccagggagttggaggttgcagtgagcctggattatgccactgcactccagcctggtgacagagcgagactccatctacattaaaaaaaaaaatatatatatatatatatacacacacacacacacacacacacacataccctctaacccaggaatttcactcctaggtatacctacataagctccagtatacctaaacaagtgcaaatttgtttaagtacagttatttgtggtagcattagtcattgttttcaatagcaagaagaaaaaggaaacaactaaatgtccatcaatagggaatgaattatattaatggagggagagccatacaatggaaggctgaacagaaattaataggaatggggcagatttgtaatgtactagcatggtaaaaccttcatgatagatatagatatagatatagatatagatatagatatatatacatatacatatacatatacatatacatatatatatatatatatatatatctcttgtgtctcagcctcccgagtagctgggattacaggtgtgtgccaccacatccggctaatttttgtattttttagtagagacagggcttcaccatgttggtaaggctgtcttgaactcccgacctcaggtgatccacctgtctcagcctcccaaagtgctgggattataggcatgagccatcacacctggccaaatatttttgataagtatcaagtgcacagtgcagaacaaaatatgtgtgtgtgtatgcatgtgtatgtacacctatacacttatatacagtaccccatgtgaagaaaaataagggtacgtgttatgcgcgtagtattatggttgttatttttgagaatatatctagaaagataaaaaagaaagtggaaatagttcttgcctctggtgggaagtgggactatgtgcctgatcaatagggaagtaaggaacactttttttttttttttttaaacggagtttttgctcttgttacccaggttggagtgcaatggcgcgatcttagctcactgcaacctctgcctcccaggttcaagcgattctgctgcctcagcctcctgagtagctgggattataggcatgcgcctccacgcctggctaattttgtatttttagtaaagatggggtttctccatgttggtcaggctggtcttgaactccccacctcaggtgatccgtccgcctcagcctcccaaagtgctaggattacaggcgtgagccaccgtgcctggccaggaacgctttttatttttgtacctttaaaagtgtgtaccgtctgtgtatataatcagttaaaaacaaagaaaagctgagtgtggtggctcatgcctgtaatcccagcccttaaggaggccgaggccggcggcagatcacctgaggtcaggagttcaagaccggcctgaccaaaacggtgaaaactcatctctacaaaaacataaaaattagccaggcatgatggcaagtgcctgtaatcccagctggttgggaggctgaggtgggagacttgcttgaacctaggaggcagagattgcagtgagccaagactgtaccactgcactccagcctgggcaacagagcaagtctctgtctcaaaacaaaaacaaaaacacaaagaaaaaatgtaaaacaatttcatgcagtagcaagcatcgagttaaatacagttgacccttgaacaacacaggtttgaattgcacgggtccatttatactcacatttcttccacctctgccacccccaaaatagcaagaccaaccccatctcttttcctttctcttccccctcctcagcctactcaatgtgaagatgatgaggatgaaaacctttgtgatgatccacttccacttaatgaatggtaaatatgttttttcttacttatgattttcttagtagcattttcttttctctagcttcctttattgtaaaaatacagtatataacacatatcacatacaaaatgtgtgtaaatggactgtttgctattgataagtattctggtaaacagtagactattagttttttttgttttgtgacaaggtctccctctgtcgcccagcctggaatgccgtggtgtgatcatggctcactgcagccaaaaacttctgggctaaagcaatcctctactaaaaatacaaaaattagccaggcatggtggtgcgcttctgtaatcccagctactcaggaggctgaggcaggagaattgcttgaacccgggaggcagaggttgcagtgagctgagattgcaccgttgcattccagcctggacaacagagcgagactccatctcgaaaataaaataataataataataataataataataataataataatagggctgggtgtggtggctcatgcctgtaatcccagcactttgggaggccaaggtggacagatcacctgaggtcaggagtctcaattaaaaaataaataggccgggcacagtggctcatgcccataatcccagcactttgggaggccgaggtgggcagatcacctgaggtcaggagtttgagaccagcctggccaacacggagaaacgctgcctctatcaaaaatacaaaaattagctggatgtggtggtgcatgctataatcccagtaataccagctactcggaaggctgaggcaggagaatcactcgaatccgggacacggaggttgcagtgagccgacatcatgccactgcgctccagcctgggtgacagtgagactctgtctcagaaaaaaaaaaaaaaaaaaaaaaaaaaaaaaaaaatatatatatatatatatatatatatatatatatatatatatgtgtgtatatatatatatatacacatatatatgtgtatatatatatacacacacacatatatatgtgtatatataaaataaaataaataataataaaacatttactttggctgctgttgctgcggggagaattgcagggtgtcaaaagtagcactggtggaggggtagtgatcaaagtctggtgctttagcccaaaggagaaatgatagagactcagactagctggtgatggaggtagaataagcataaatgtatcaaaaagaggagttgatagatcttaaagaatgattggatttgaagggcaaaggaagagaagaatcaaccaggtgggttcagtgaatgaaaccatcagaaacgaattgtcccctgaaatcaagactttgtgattgccatagttgtatgcttctcaaaggttcctcgtctcctcttccttggaccaaaagtcagaggcaagaatgccctcattcataccccagtggtctatacctccagcagcaagtcgagtgagcaagtgatgtcctgaaaggcccagtggatcagtggaatgaagcgggcaggaagacttagtgctcctgaaacaaggaatccagaatccaggagaaggatggctcagtggggctttcaagggacaagtatgggggttgaaggggtcactgtccctataccaaatccgaaaatattgtgaccaggaaccattctgtccaactcttctatttcaggtggcaaagcaaagctatattcaagaccacatgcaaagctactccctgagcaaagagtcacagataaaacgggggcaccagtagaatggccaggacaaacgcagtgcagcacagagactcagaccctggcagccatgcctgcgcaggcagtgatgagagtgacatgtactgttgtggacatgcacaaaagtgaggtgagtcgcaggacagaagagtgctttttgtttcagcagagcagcctggggagagataaaagctactcctggggcctgggcctgcattcctgagatgtgggtaagaggggcccagggtcagagtgtctggcaagcttggctctgcccctttgctgtcctggagactagggctaatcctgggctcagggagtggcctccccatggttaggatacaagtgctcatcaagggccacccctaggaaggaccaattttcctatcagaagcttctaagttatcctcctttggcccaaagggacacctcaagcctactctgaggaactctttccaatgaactaattcctacagtcacttccccagcaacctgtgcctcagcctcaaggcactgtggggtaggcctcagtttgtggcctggacatcggactgtggaccagacgactcctcccgatttctgtttgttttcagtcctctgaccccaagctggctggtgaagtaggtagagggaggagactttggtgcatgcatacacacacacacacacacacacacacacacacacacacacacacacacacacacgtctcctgtgccccccagtctccatggctggtcaatgattgactggcatttcacaggccgctggttgcagccccagcctgttgacttagaggtcaccctcggaagctagagccctgtcctgcctcttcagtgtcagtggtcactccactgcccacaggctggggtcttgggcaaaacacacgcatctgccctgatctgagtttgctgccctctgtcccgcagtcagccccactctgttcccactccctctccccagccccctagctagacccctctcaccagcacccctttcccttccctgagggtccccctcgctgtctttgtccctcagacatcctctttcctgggctctcctgccaggccctgctggagggacagttaaggaggaaatcgaatcagcagcgcccacccctgccccccttcctctcctcttgtcagacaccagacgaggttttttcctctggcttcccagctctgaatgggctcattctttttcagaggctcggcccctctcgagcctcctccccagggcgtgagttctgaccccagctcctccccccatccccactccagccccctctccagcttgctccaccctctctaccgcccaccgggactgggcattgtctgccagtccgggtttcttcctgggatttgggatgcagagaggatgggtttgcttgggcgggggggtggagagtgaaggggggaagcaggatctttgtagagggagggacctacagttacctggacttctttcctctgtctcccctcttggtacccttgactggggctcttgagggtaatgggtgaagccaaatctgccatggctcagttcccagctcagctctgtgaccttgggaaagttcctttagctcgtggaatctcaaggctcaaggttcctcttctgcaaaatggggaatgataacacctgcctcctctggagtcttggggactcagtgttctgaggaacgtggctgtaggtcagagtggcacagagtagggtccaatgaagcatggcgtccacagtagctttcctgactggactaacctttccggacacaacagcagggcaggggtggggcctggggagaaaggacacctctaaccctgatcctaacatcccgatggcctctaaggctgcctgcacactcatccaggtgcaagccctccaaggtgtggtgtgatgaaccagtgactcctggagccaggtcagcgcatcctcttcccgcagggctgtaagctgcaggactgagaggcaggttgaccaggtcctgggctggatgatggggtgagagtaaggggtcagttttgatacatgcccaacttttctctctagccctaagacatcctgggcaaattgcttacctcagttcccctgatcctcaccctaaccctaacaccagctcaagagaaaatagggatattgatggccatccagaagggctgctgtgttccatacacagcaatatttctcgaatgtttgtgacagcggtccaaggaataagttaattttacattatcactctggatacctgtacaaaactccaccttatccttactatatgaatgtgctagggttgtttttttgttttgttttttttttttttttttgagacagagtttcgctcttgttgcccaggctggagtacaatggcgcgatcttggctcaccgcaacctccgcttcccaggttcaagcgattcacctgcctcagccttcccgagtagctgggattacaggcatgcgccaccatgcccggctaattttgtgtttttagtagagacagggtttctccatgttggtcaggctggtaccaaactcccgacctcaggtgatccacctgccttggcctcccaaagtgctgcaattacaggcatgagccaccgcacccagccgtgctagggtctttttctgttcaattcctttctctctcttgctctctttctttctttcaatggagtcttactctgtcacccaggctggagtgcagtggcaagatctcagctcactgcaacctctgccctctgagttcaagcaattctcctgcctcagcctcccgagtagctgggattacaggtgcctgccaccacacctagttaatttttgtacttttagtagagatggggttttgtcatgttggccaggctggtctcgaactcctgacctcgtgatctgcctgtcttggcctcccaaagtgctgggattacaggcatgagccgccatactcggccaactttgtattactttcttaaagagagtttcccaaattatataagcttcaggccccacaaaacctagatctgccccagtataactaaatctgggaccatttattgagcaattattatgtgccaagtattgcgctgagtgcttccagagcattatctcctttaaccccagcatagtatgtcagatgctgttttacagatgagccaactgagaccagagatgctcagtcacttgcccaaggtgacatgactgatatggaatagagtcaagatttttttttttttttttgacacggagtctcactctgtctcccaggctggagtgcagaggcgcaatctcagctcactgcaagctctgcctcccaggttcacgccattctcctgcctcagcctcctgagtagctgggactacaggcacccgccaccacacctggctaattttttgtatttttagcagagacagggtttcaccgtgttagccaggatggtctcgatctcctgacctcgtgatctgcctgcctcggcctcccaaagtgctggaattacaggtgtgagccaccgcgactggccagattcaagatttgaacccaggtcctcttggtcccagaggcccctgtttctcaactccctaggatggcatagcaacctgtcccacaagaggtgcctgctttaagtgtgctcagcacatggaagcaagtttagaaatgcaagtgtatacctgtaaagaggtgtgggagatgggggggagggaagagagaaagagatgctggtgtccttcattctccagtccctgataggtgcctttgatcccttcttgaccagtatagctgcattcttggctggggcattccaactagaactgccaaatttagcacataaaaataaggaggcccagttaaatttgaatttcagataaacaatgaataatttgttagtataaatatgtcccatgcaatatcttgttgaaattaaaaaaaaaaaaaaaagtcttccttccatccccacccctaccactaggcctaaggaatagggtcaggggctccaaatagaatgtggttgagaagtggaattaagcaggctaatagaaggcaaggggcaaagaagaaaccttgaatgcattgggtgctgggtgcctccttaaataagcaagaagggtgcattttgaagaattgagatagaagtctttttgggctgggtgcagttgctcgtggttgtaattccagcactttgggaggctgaggcgggaggatcacctgaggttgggagttcaagaccagcctcaccaacgtggagaaaccctgtctttactaaaaatacaaaaaattagctggtcatggtggcacatgcctgtaatcccagctgctcgggaggctgaggcaggagaatcacttgaaccagggaggcagaggttgtggtgagcagagatcgcgccattgctctccagcctgggcaacaagagcaaaagttcgtttaaaaaaaaaaaaaagtcctttcgatgtgactgtctcctcccaaatttgtagaccctcttaagatcatgcttttcagatacttcaaagattccagaagatatgccccgggggtcctggaagccacaaggtaaacacaacacatccccctccttgactatcaattttactagaggatgtggtgggaaaaccattatttgatattaaaacaaataggcttgggatggagtaggatgcaagctccccaggaaagtttaagataaaacctgagacttaaaagggtgttaagagtggcagcctagggaatttatcccggactccgggggagggggcagagtcaccagcctctgcatttagggattctccgaggaaaagtgtgagaacggctgcaggcaacccaggcgtcccggcgctaggagggacgcacccaggcctgcgcgaagagagggagaaagtgaagctgggagttgccactcccagacttgttggaatgcagttggagggggcgagctgggagcgcgcttgctcccaatcacaggagaaggaggaggtggaggaggagggctgcttgaggaagtataagaatgaagttgtgaagctgagattcccctccattgggaccggagaaaccaggggagccccccgggcagccgcgcgccccttcccacggggccctttactgcgccgcgcgcccggcccccacccctcgcagcaccccgcgccccgcgccctcccagccgggtccagccggagccatggggccggagccgcagtgagcaccatggagctggcggccttgtgccgctgggggctcctcctcgccctcttgccccccggagccgcgagcacccaaggtgggtctggtgtggggaggggacggagcagcggcgggaccctgccctgtggatgccccgccgaggtcccgcggccggcggggccagaggggcccggacgagctctcctatcccgaagttgtggacagtcgagacgctcagggcagccgggccctggggccctcgggcgggagggggcagttacacggcagcggctcgagatggcccatccaagagactggcgctttccaggctccgaggggctccgggaacttgtcaaagaagttctctgaaattgttcagaaagttttcccgcaaagggtgtattgcgtagagcgcgcgcgcgcgtttccccccttcttgagccccctcaagctttctcaaagcctttccagttggcagcctccgcctccggactggcctgggctggattccttgggggggtcctctgccctgcccctcctccagcccctccccgctccccttcagacgattttggtttggttgctcctgcttctggcggggtcgggtgtgtgtgtgtgtggtggagtggagggtggcatagcaacctgtcccaaccagagccggggaggaaagggtggcccggagggtggcctcttgctggggtctgggttgggggcgggggagacgtttgctttgaacagattcttggggccagcttagggactgtgctctgtgacttttggagcgcgtggaccatggaggggtgggggtgggtttcttggggtgtaaagtgggagagttcccagagaaggaagctaagaaataaggccagatgggagcctagggagggctgcgttgttctgctgccttttccttggtgctgtgcgtggggaagggtgagtgggggcagtgtgtatcctgacccatctgtccacctgtgtgcattaatcataaaagctaacatatagcctgggccaggtatactctgccaggaactgtttgtggtgttttgcatgcattctcctttaatcctagaacacccctatagtggaagttctgccagcattctggactgagtagcagtccagaggttgagtagcagctagtaagtggtggggtcaagatgggaccccaggcagtgcgacccccaaccatgcattcgaaatcgctatatggatgagtgcacctggagcaatgagggacactgctccctgagtcactgggctgcaggggagacaaaatgaaagtgttctgggagtcgtgggtggtctccataggtcagagggtctggggagggagtgggtgtcatcgtggctgtgtgttgcccgaggggccctctgtgagtgagtgcatggccgtgttatctctgcaggtctacgccagggtgttcctcagttgtgtggtctttgtatttgtgtgtctgggctttgtgttgccaaacagcagtctctctgctgacttggggacacaggctgaactctgtcctctgcaggaactcccttaaggtgctgggccagatctgccataaacagagggaggtagccttctatggccacgccttcttgctgaggaagaaggttcctctcttccagggagtacatccttgccctccctgtttcccagacaagcatcttcacctctcatcttctgatgagaagggtgaggccatactgagctgtcaggctgagctgctgcccttcctcaccttgggctgggagttgatcagggaatggcagttgctgcagagctggatttgagggctgggttctctggatggggcctcctcatgtcctcacccctcaacctgcactattgattgtgttgtgcaggagttagttaaaaagtcattgcacagcctgggcaacaaggcaaaactctgtacaaaaaatacaaaaattagttggatgtgattacacgtgcctgtagtcccagctactccggaggctgaggcaggaggatcacctgagcccaggaagttgaggcttgcagtgagctgtgattgcaaatgctctccagcctgggtgacagtgtgagactccgtttcagaaaaaaagtataccacccagctgcctccagcacccagattttacccaaggggtgaggtctggggcaggaatgtgggggaaggggaggcctagggggagccccagaggggtcaggatttttctgaaatcctttcttagaggtatgggttttacaaattgcagcaaatacatccttttaatcttgcagaactccttcatattttaattccagtatgattcttccaacagcctcctctctttactatacttggggaaagtactcattttatttgtcaagaaaaaaacaattgaaaagatagggatcaaatgtaaaaagaaaaaatacgtggcattccaaagtcaaacacaaagcatgtttaattttctcgtggtttgggattacccatattcctgctgtatgaacctgtcttgtcttaacttttaagaaatgtacggtgtacttcctatatgctaggtttttatccatgctttcatttaatctctgtgacagtcctgtgaagtaggtgcacagatgagaaaatggaagttcagagaaatgaagcaacttatccaaggctcccagctacccagtaatgtccagggaatttttggactctgaagaggaggcattaagaggtggttagagtcttattccagccaacaataatgggttgaacaaagccttaggggcaggcaggtggccagatgggaggagaagcgctcctcttgttcaggcgaatgacctttccatccacttctctaggctgtagaaagtggagctgagctgggggccctgaggttccctcttgacttcagagtcctctcccttcctgtccagccaatgcctgtcttccttttgggccctaccagcatgacagggggctgcgggcaggaggggacagaggccacgttgacacacagggctgtgggtgagagagacagctgaagtgtcagcgtgaggggccagtgtggggctgcggctgggagggctggggtggggcccagggtagttgtgcctgtccttgggtgatggaatgatctggaaagagattccttccctgccctccacctgtgagaagcccctctagagtgacatctccatcttatgtttggccacccatcctccccctgggaagagagccgaggtggggtaagggatgtgtactctttcaaggagtgggagaattattctagcgaatgtttgtgttgtcccagttctgtttacaaagcctcgtcatgtttacagatggctgcgcaattcattacctcatttaactctcatgtacctcctctgagggagtaagagctgttacagccaagtttaggtcagtaaatattcaccaagttgcaggtactgcagggcatagagatgaatccgatttagcttctgccctggaggtctgggaacttgctcaagatcactcagtgagcagctgagctagggttctcaactaaagaccctgggcccaggccctggtctgatgtcaggcctgatacaccaggtgtttgtggtcggggaatcccagtgtcacttgaatgggctgtgacattatgggtctgggagagctgagctttggggacacaggtcattttactgtagtattcatggaaaccaagggaagtattggcttttctgctgtgagcaagaggagcagctggggctgcaagctggtggggaggagagaacccacctgagagaaacctcaggactggggtcaagtcctgaccaccagagtccagagagacatgaaggactgtgaccagctctgagcagagagatggattccatgacctcaactggtcccttttgttcggagactcgtgactggacttcattcatccactcattcattcattcactcagcagacacttatctagcgctccctgtggctggtcctgcctcatactgtctttgctctggagaattggaggttggggttcctgaggggcagggtcctggagacaaggacactcctgggtagaattaggacctaccccccaggaaatcaacggggaccaggtgccgtggctcacacctgtaatcccagcactttgggaggccgagacgggcggatcacaaggtcagcagttcaggaccagcctggccaacatggtgaaacccgcctcaactaaaaatacaaaaattagccaggtgtggtgtcaggcacccgtaatcccagctactgaggaggctgaggcaggagaattgcttgaacccgggaggcagaggttgcagtgagccgagattgcgccactgcactccagcctggcgacagggcgagactccatctcaaaaaaagaaaaccaatgggacagggcagatatggggacaatggtaaggagatgggagagtgggagggaggtgtcaggaagaccttcttgacttcatgtaggctggtgggggtgttagccagcaagcctccagttccctgggaaccgttctcagggtaccaattttaccacctgtctgcaaacactttaagattcttaatcagactcaaattggccacaaatcaggtaaacaaactcactagtggggtggggctaccacccgttctgaccctccagcccaacccagcccagccaccctgccctccgtagagcctgtggtgtttatcggtggcattgggagaattagtgtgtatttatgttggcgtggggtgtggggtggatttgtgtgtgtgcagttaggcctagtggaaggaatgtgggatctgaaggcaggccagcctgagttccagtcctgcctgttgctcacaagctttatgaggcgagagctaacccctgccagcctcagttgtcttctttgcaagatggaggttgcagccccagtctctggagcatgttatgcagatccaccgagagtgcctgccaggcacacagtaggtgctcagctcagttactgtggcggcccccactccccattgttgttgttttcctattgcctggcggccacagctggtatcccttgaaaagggctacagggggtggagtcggaccctgccccagccctgtggagaccctgggcttgggccagggcctggggtctgggcctgcagacagctgtgtctataaagcagctgaagggctgaggccgggggaggtcctggcagcagggcgttattttgggcctggcctgccacccccagctcctgtttctcttgggagtctgttgggggaggaagtgtggggaagaggagggggtgcaagtgggtgaggcatggagtggggaggcctccctcagggacatggacccttgagttctatttctgttcctccctcctgttcctccctctttgtccttatctgcctagagaggtgggaatagaggccattctgagtatcactaggagaccaccagtttgtggccactggccactggcccaggcagggaacctgggggcttgccctaccagcctctcccagcaatctgaaggcagggggtacctcgtattaccccctaggatttgaccttaggctccaacttgctgggagagcagtgcctctggtgtcagaccccaagccagcccttgtgctgtccctgaatctgcatgtagcctgtgggaggcggagcagtgaccggcaggaattctgggcagctcaggcacctgtgggcctgagggtgccctctgcccccacccttccgatctcctgggcaagacacgccaggtgattcatctcaccagagcagaaaaacaagttcaactgggcactttaatctcccctcactggcaggcctggtgtgagctgctaccccggcgcccctcaccaggggtgctttacctcctctagtattcctgaccttagtgggcatttctggtctcagggataccaggctggggtccaagtgggccaggtgtggcagttcagccctatgccccatggctgatggctcgcgctgggcaggtatgcagggctgacgtagtgcctttgtggcagcagtttcgtggcacacattctgccagctggttctggagtcttgccctgaggaggtggccagggtgagggtgccagcgcaggaacctttggcgcatgcttcaccctggcctgggatctgcagcctgggtccagatgcccacaactggaatctgacgctccttttctcttcatgggggactcccagaggtctctgcaatgaccagagccccggttgtcccatgcctcagctgcaactccagctgaccctccttccccactctctgggtggcattacgggggtgtggatcccttgccaagaggttggcatgtgggtgtgctggaatggcatagggagaatgcaccgagtttgtttgcttgggagaggggcagggggtatccagaagattcatgattcgtcatcgcctctcttgggggatttttacccctttgccctgagttgtgcctttgggacaaaggaagcctttctttgccagccaacaccctgtactggcgggcgagctccccagggctggcacgctggggcagcctctgaatgcacagggtgggcctagtcagaagaagcctttcccctgaaatccctctacttcccaagcacgcaagctttctcctgctgttaaacctgcagtgtgcaagggacatgggcggaggggtccttcagtcaggcttctccctgtctgaggtggcatgacttggagtgagtttggatggggtggccaggtctgagaaggtcccccgccagtgtcctctgacccatctgctctctcctgccagtgtgcaccggcacagacatgaagctgcggctccctgccagtcccgagacccacctggacatgctccgccacctctaccagggctgccaggtggtgcagggaaacctggaactcacctacctgcccaccaatgccagcctgtccttcctgcaggtgaggcccgtgggcaacccagccaggccctgcctccagctgggctgagccctctgtttacaggtgggtggcagaagaaggtgccctgcccttctgtttcctctcttgttgtggtttctcaaccaggaagtcctttctaacatctaacccccattcattttactgcagaatcagttgactctctctataacgtggctggccgaggtcatgtctggatgggatgcgtctgtgtttccgctaaatcttgtgctctcttgccagcatgatcatgtcccctgtccacctgctccagccactatccctctcccacttacagcagaagaaagggctggtgagaaaggtggattacaggcccacttctgccactgacgagccctatgaatgtggcctacacccccttagcttcactgggtctcagtttccctatctgtatattgggagcagttgtgaagctcagaagagaaatgtctgtgaaaaggttatgaacaggagggagagtggaaaccaacctgctggatcgtgtccacagaccctggaatggggccacatgcttggtttgtcaaattgcagacgccggccgggtgcgatggctcatgcctgtaatcccagcactttgggaggccgaggcggacagatcacttgaggtcgggagttcgagaccagcctgaccaacatggagaaaccccgtctctactgaaaatacaaaattagccaggcatggtggcacatgcctataatcccagctacttgggaaggctgaggcaggagaatcacttgaacctgggagacggaggttgtggtgagcctagatcgtgccattgtactccagcctgggcaacaagagtgaaactccgtctcaaaaaaaaaaaatttgcagacgccatcccatccaggcctttgctttcactgatgaagaaactgagatacagagagggcagggcacctgttcggagtttatgaaatgcccccccaccattatctttcttgatcatataagaatctggtgaggcaaggtagggcgtgatctttatctctattttatcgttttatttaagcgggaacaggactgctcagtggctgggggccttgcccaagatctccaagtactggggaaccccagggaggccctggggggtggcagtgttcctatttcagccccactctgcttccccctcccaggatatccaggaggtgcagggctacgtgctcatcgctcacaaccaagtgaggcaggtcccactgcagaggctgcggattgtgcgaggcacccagctctttgaggacaactatgccctggccgtgctagacaatggagacccgctgaacaataccacccctgtcacaggggcctccccaggaggcctgcgggagctgcagcttcgaagcctcacaggtggccttcaccgtcattgaaaccttctcttggttattcagagctgaccagggccactgctaaccagggggaggctttgtgtgcattagaaatggtgtcccttctgggcagacgcaggcagagcccgggaagacgccctcagaagattggaaaaagattccccttcttcctgggaagttgtagcttgcgtcagcacatataattcaatcgtgagaatgcaggctgggtttttgcccccacttggctgagtgaagtgtacagtgaacaacctatgtaactatttgctggccctggagccgactctgccccagagtctgggtgccaggtgctttgcccgcatggcccatttcagtcacgctgcagtcctgtcaggaaaaaatcagtgttattctcattctacatatgagaaaactgaggcttgcagatataagggccaaaagttacacagctagtgagtgatggggctgagtttcagactccacagtctcttaaccaccaagcagcatgcccagagtagaggtgagaaggaaggagagagctgcggtccacatgagcatctggacctagcatggacaactcactcctccctggctctcgctttgttcttgttgcgggtgtggtggtggtgggactcaaagacggtaaagatagctttctctcctccctggggaatctgggggttgtttaaaaggcctgctcctcttttagaaggcaggagggccccaagggaagcagaaggtgacagaaggggaaagggtcctctgatcattgctcaccccacagagatcttgaaaggaggggtcttgatccagcggaacccccagctctgctaccaggacacgattttgtggaaggacatcttccacaagaacaaccagctggctctcacactgatagacaccaaccgctctcgggcctgtaagccatgcccctccctgctgcctcttctctcagacagcctgaccccagccgcaaactcccaacttacaacccagtgcctgcccgccactgccccagccgcctacaccacccatttcctccctctctgtccctcctgccatctccctgtgcctcttcatctctggggttctctgtcttgtctccctctgcttataggttgtgcctctggtttgggggcctctcagcctgtctgggtccctcccttgctgtgcagttggcctcgtggcctctgctgctgtttgtgcctctctctgttactaacccgtcctctcgctgttagacatctctctcactgcctgtctctggttctgtcctcaggccacccctgttctccgatgtgtaagggctcccgctgctggggagagagttctgaggattgtcagagccgtgagtctcagggaggcctggagtcagggaaggggagggctggggccgggtggaatgcaggtgtcatacaggtgacatgggaggggtgggataacaggcttgggatgtctcccctgggccaggtagtctccctagaaggtgatgctgatgagggtctggtgcccagggcgccactcagccctcatcctgccctttgcccaacagtgacgcgcactgtctgtgccggtggctgtgcccgctgcaaggggccactgcccactgactgctgccatgagcagtgtgctgccggctgcacgggccccaagcactctgactgcctggtatgtgcctctgctttgtgcccaatgtgctctaccccccaggatgcaaggggtgggcaccctgcctggtactgccctattgcccctggcacaccagggcaaaacagcacagtgaaagccagccacctgtccccccaggcctgcctccacttcaaccacagtggcatctgtgagctgcactgcccagccctggtcacctacaacacagacacgtttgagtccatgcccaatcccgagggccggtatacattcggcgccagctgtgtgactgcctgtccctgtgagtgccagggagaaacacagttttctcattttggtggggaggtttgtttctgtaaatgggagcatatggggagcactgtctgcatcttgctttgagagctggtcatgacagttcctgccgagctgccttgttctttcaacagctgtggagcaggtggcagtaaggagaggcagctaagagcccagacttgggagccagactgcctgggtttgaaacccagctctatcaattagtaggcacgtgaccctcttgctgtgcctcagtttcctcatcagtaaaatgggggcaagaatagtcccaactgcataagatggttataacatttgaaagagttaatatttgtaaagctcttagaacggtgcctggtatgtactaagtgctcctaaatgttagcttttattctatagcctggtgaggtcagttttacctttcgttttgtttttgagaccgaatttagttagctctatcgcagtggcgcgatctcggctcactgcaacctccgcctcccaggttcgtgctattctcgtgtctcagcctcctgagtagctgggattacaggcgcccaccaccatgcctcgctaaattttgtatttttagtagagacagggtttcaccacgttggccagactggtctcgaactcctgacttcaggcgatccacctgcctcggcctctgaaagtgctgggattacaggcgtgagccactgcacccggacttttttttttttggcagagtctcgctccattgcccaggctggagtgcagtggtgcaattttggctcactgcaacctctgccttccgcattcaagcaattcttgtgcctcagactcttgagtaggtggaactacaggcatgcaccaccatggctgggtaatttttgtatttttagtagagacggagtttcactatgttggccaagctggtctcgaactcctgacctcaagtgatccacccgccttggtctcccaaagtgctgggattacaggcatgagccatcgtgcctggcctagctcagttttatttaacagatcacctatttactgatgggcgtttatggactgggctcagacctggggaacctctttcctcctctcacaggaacaggagtgggccttcagatcctggctgactgtgttagggagaggacaaaatgtagagccagaccatttgggttcaaatcctcgctcctccactcactagcacaatgaccttgaataatttacagaactctctgctttggtctccctttttgcaaaatgggaatctcacagtgctgatcccgtctggttgttgtgaggggtaaatggatgtcaggtgctgatgcgtggtagggcatttaagtattggttgatattattcttcttgtgcctgggcacggtaatgctgctcatggtggtgcacgaagggccagggtatgtggctacatgttcctgatctccttagacaactacctttctacggacgtgggatcctgcaccctcgtctgccccctgcacaaccaagaggtgacagcagaggatggaacacagcggtgtgagaagtgcagcaagccctgtgcccgaggtacccactcactgcccccgaggccagctgcagttcctgtccctctgcgcatgcagcctggcccagcccaccctgtcctatccttcctcagaccctcttgggacctagtctctgccttctactctctacccctggcccccctcagccctacaagtgtccctatatcccctgtcagtgtggggaggggcccggaccctgatgctcatgtggctgttgacctgtcccggtatgaaggctgagacggccccttccccacccacccccacctcctcagtgtgctatggtctgggcatggagcacttgcgagaggtgagggcagttaccagtgccaatatccaggagtttgctggctgcaagaagatctttgggagcctggcatttctgccggagagctttgatgggtaagagtgggcacgatgacctgagacagtgtcagggcagacagagtcctgaggatccagatgtggcagcatctcttggggatggcaggagacagaagtggggggatcaagaatgcaaagaaagcagatgggagaccagaggagcagggcctttggtgggtgggggtgattatttttgtaaatgacatgctatccgtgaacaaggacttgtatggaggtcagaccatctagataaagtaaaattccctttgagttcatagcagctttattcaaaatatccccaaattggaaataactcaaatgtgcatcactaggtgaaggaataaacaagtggcagtgtatccatttggtgaagttctacttagcaaccaaaggaaatgaactaccgatacaacataaatgaatctcagaaacattacattgagcaaaagaagccagagacaagattccatactgtctgatcccctttatgtgaggctctgaaccgaaaaaaccactctgtggtgggagagatcagaacggtggttgccccagggtggggggcttcaaaagggaggcacacaaggacatttctggggtaatagaaatgctctgtatagtgattggggtagtggatacatgagcgaatccatttgtcaaaactcatcaaactgtgtgataagagtctgtgcattttatttatttcattttattttttgagatagagtctcactctgtcagcaggctggagtgcagtggtacgatcttggctcactgcaacctctgcctcctggattcaagcaattctcctgcctcagtctcctgagtagctgggactacaggtgtgtgccaccatgcccagctaatttttgtatttttaatagagatggggtttcaccatgttggcaaggatggtctcgatctcttgacgtcgtgatccgcccacctcagcctcccaaagtgctgggattacaggcatgagccaccacacccggtgcattttattgtatataagttatacttcaataagaaatgaattggggccaggcacggtggctcacgcctgtaatcccagcactttgggaggccgaggcaggcagatcacttgaggtcaggagttcaagaccagcctggccaacatggtgaaaccccatctctactaaaaaatataaaaaattagccaggcttcctggcatgcgcctatcatcccagctacttgggaggctgaggcaggagaattgcatgaactcgggaggtggaggttgtagtgagctgagatttcgctattgcactccagcctgggcgacagagtgagaccctgtctcaaaaagaaaaaaaaaaaaaagggtcaggcgccgtggtgcacacctgtaatcccagcactttgggaggctgaagcaggaagattgcttgagcccaggaattcaagaacagcgtgggcaacatagtgagatcccatctctacaaaaaaacacaaaaaattagccgggcatggtggtacgcacctgtagtctcagctactagggagactgaggtgggagaatcacctgagcctgggaggtggaggttgcagtgggttgaaatcatgtcactgtactccagcctgggtgacagaatgagaccctgtctcaaaaaaaaaaaaaaaaaaaaaattccctttcacacttcctttacctccactcccctttccagagggggccatggttaacagtgtgtgtgttcacctagaccgtttatgcatctgtagacacacacacagtgaagtgtggttttcgtcgttttggtggggaggttggtttctgtaaatgggaacatatagggagcactgtctgcaccttgctttgagagccggtcatgacagttcccattgaactgccttgttctttcaatagctgcagagcaggtggcggcaaggagaggcagctaagagcccagacttgggagccagactgcctgggtttgaaacccggctctaccacttactaggcatgtgacccttgtgctgtgcctcagtttcttcatctgtaaagtgggggcaagaacagtcccaacttcataagatggttataccaccatgcctggccagatgattataaagtttgaatgagttaatatttgtaaagctcttagaacagtgcctggcagatactaggtgctcctaaatgttggtttttattatgtggctgggtggctcggggttttatttaacagctcccctatttactaatagacatttagatcatgttccattttcactcttacaaacagttccactttgtgtgtggctctgggaacatgggccagtgtctccctaggccacattcctagaaataagatttcttttcttttttttttttttttgagacagagtctcgctttatcgccaggctggtgtgcagtagtgtgatctcggctcactgcaacctctgcctcccgggttcaagtgattctcctgcctcagcctctcgagtaactgggactataggcgcgcggcaccacacccagctaatttttgtatttgtagtagagatggggtttcaccatgttggccaggatggtctccatctcttgacttcgtgatccgcccgcctcggcctcccaaagtgctgggattacaggcgtgagccactgagcccaggcagaaataagatttctagatcaaaggatataaatactgttttgatagatgttgccgaactaaggcctgggctttgaagcccaggatgggaacagctgggctcgatgggcaaagggtttgagtgaaggcattcatggtggggagtggctggcatggccagtgctgggagtgatgtccaccctgttcctggccctgctgactcctctcctgacccctccagggacccagcctccaacactgccccgctccagccagagcagctccaagtgtttgagactctggaagagatcacaggtgggctctgtctctgcatcctgttctgcaggggctgggagtccttgtcctgtccccactcctttaatctcaccctctgcctgcaggttacctatacatctcagcatggccggacagcctgcctgacctcagcgtcttccagaacctgcaagtaatccggggacgaattctgcacaagtgagcactgagaaagagggggcctgatggggaggagtcccagggaggagtccctgtgggaagctttgggcctgagggagtactcctgtagcagtaacctttccatgaaagtctgcagagtgtgctggggatggaggaagatgagaatagcctttgctgaccgggaaggggtccgtggtaaggtgcccacctttctcccatagtggcgcctactcgctgaccctgcaagggctgggcatcagctggctggggctgcgctcactgagggaactgggcagtggactggccctcatccaccataacacccacctctgcttcgtgcacacggtgccctgggaccagctctttcggaacccgcaccaagctctgctccacactgccaaccggccagaggacgagtgtggtaagacagggagcccagtgtgcgcactccccatctgccagcacacagcagtgcccagggggccctggcagcagcgttcttggacttgtgcagactgcccgtctctgtgcacccttcttgactcagcacagctctggctggcttggcctcttggcatggcttctctagctgggtcctacctgccttggcatccttccctccccctctgtttctgaaatctcagaactcttcctctccctacatcggccccacctgtccccacccctccagcccacagccatgcccacagccagttccctggttcacttggacctggggcctcccctaaaagtcccctgcggtcccttcctcctcactgcagtgggcgagggcctggcctgccaccagctgtgcgcccgagggcactgctggggtccagggcccacccagtgtgtcaactgcagccagttccttcggggccaggagtgcgtggaggaatgccgagtactgcaggggtatgaggggcggaggagagggtggctggaggggtgcatggggctcctctcagaccccctcaccactgtcccttctctcaggctccccagggagtatgtgaatgccaggcactgtttgccgtgccaccctgagtgtcagccccagaatggctcagtgacctgttttggaccggtgagctgctggcgggctcagagctgggtggaggggggcagcgagggggattgccagggacttggcaggatggcgagatgcagtagggtgtgctatctggtaaaatatccctggagagggctcagcgctcagacctgaacagcaacagagtggcagaaaaggggcctgggggacactggggcccttcagactatgaaaaggttctaaggaggtctgtgttggtggctgtgactgtggctgtgctagggtggtgagccctgtgggctcaggcgtcagactacctggattcagacccagctcctgcttccaaccttggttttttattcctaaaatgggtattgtaataatacctaccttgctggggtgtggcaagaatgaaattaaacagggcttggcacagtgaagcacgggaaaggctttctacagagcagtgactgttgttactcgctgttacaccttaggtaatgcgttttcctctctgggtgcctcccattttctggctcaagtccctgcccaggatcaagcttggaggagggccccgagggaggggccacagagactgggtgaagagcaagggtgtttgtcccaggagcatggcgaaaattgctgctgggtggccttgggaagcacaaaggggacccaactaagggcctgatcctactgccctgggggtgtcagtgccagccccccacaaatcttttctgccccccccaggaggctgaccagtgtgtggcctgtgcccactataaggaccctcccttctgcgtggcccgctgccccagcggtgtgaaacctgacctctcctacatgcccatctggaagtttccagatgaggagggcgcatgccagccttgccccatcaactgcacccactcgtgagtccaacggtcttttctgcagaaaggaggactttcctttcaggggtctttctggggctcttactataaaaggggaccaactctccctttgtcatatcttgtttctgatgacaaaaataacacattgttaaaattgtaaaattaaaacatgaaatataaattaatgccctagcagttctatccccactgttaataatttgaaatatttttcctctagttatttttgtctgtgcacattctaatatgtatatataagttaacatatattaatattattctccagttatttttatctgtgcacattttaacacacacacacacacacacacacacacacatatgtatttttagacggagtttcactctgtcgcccaggctggagtgcagtagtacaatcttggctcactgcagcctccacctcctgggtttaagcaattctcctgcttccgcctcctgagtagctgggattacgggaacgtgctaccttgcctggctaatttttgtatttttagtacataggatttcaccatgttggccaggctggtctcgaacccctgacctcaggtgatctgccagcctcggtcccccaaagtgttgggattacagcggtgagccaccatgcccagtcatatatttctttttaacaaatagaatcatagatcatacatattgtttgcaaattgctttttctcactttccagaaccttgaaatgtttttccatgttctaacatggtgatctaccttattcttttaatttttcttatttagttgtctttacacatgaaacacatgaatacatccttgtgataaacattttcagtaacataaaagtataaatgttacaaagccaacgtgccctttcactcaactccctgtccacccagtctctcctgtctgctgggagaaccaccgcattgacttgtgtgttcacccttccaggctcttttctgcacacttatatagacatactacatttatattaggtcgagtcaaataagattgctgtttgtgtaaaccaaaaagtgtcaagagcctgggcgcagtgactcacacctgtaatcccagcactttgggaggctgaggcaggcagatcacttgagatcaggagttcgagaccaatctggccaacatagcgagaccccgtctctactaaaaatacaaaaactagccaggtgtggtgatgctgttctgcactttgctttccccccgacttgaggtatcctttcttgtgagtacagacggatctaccacctttattttttttttaattactcaacctgtaacatggatgtaatttcactttgtttttgagggatattgagcttgtttccctgtttttgcagtttattgcaattgagctccacacacaagtgagccctcttttgtatgccccctagtgggaatacagtgctggcaatgtttatcacaaggatatattcatgcatttcaatttaaagacaactaaatgagaaaaattaaaagaatatggatccaggctgggcatggtggctcacgcctgtaatcccagcactttgggaggccgaggcaggcagatcacctgaggtcaggagttcaagaccagcctggccaacatggcaaaaccccgtctctactaaaaatacaaaaattagccaggcgtggtggtgggcgcctgtaatcccagctatttgagaggttgagacaggagaattgcttgaacctgggcagcggaggttgcagtgagacgagattgcaccagtgcactccaacctgggcaacacagtgcaactccttctcaagaaaaaaaagaaaaaaaaaaagaatatgggtccagatccatatggatcctagatccagatcacggtgttagaacatggaaaaacattgcaagattctgctaagtgaaaaaagcatttgcaaacagtatgtacagtctatattcagaggaggaactgctgggtcatagatgatatttcataggtattgccaaaccgttctctggagaagtggtatgggtttaccctgggattcttctatggagggaatagttgagctcccgggcttgctcttctgggtgcccctccccgcttcctatccaccacaaggagctgcaggggagcggggcatgccggttccttggctggagaaggagtctccttgtgaggtggtagaaggagcactgacggccttgagcccagtttctgcctttgtcaaatggggataatgacccagccacacccctcccagggttgttgtgaggctggaaaggtggttcccaagagggtggttcccagaattgttgatgagactgtttctcctgcagctgtgtggacctggatgacaagggctgccccgccgagcagagagccaggttggcctggaccccaggatgtacccttcattgcccttcactcccccactggatgctgggtggtcactgctgtagggaggggaccccctgacatatgtcccttcccacccactcttccactgtggaacctcctgtcattttccacttcaccaagtgacagaggacctgctcagatgctgaggggaggggactgcaaggaaagatggctaggaaacccagtccctccacaccctagagtaacttgatgccttgtgagggacacaggcaaagttcaattccttggaagtcaagggagactgagaagagtacagctgcagcactgagggagtgatgaattcttaactggggatggtgggaggcttcgagtgggaggtggcatttgagctaggctttgagagaggagcaggtattgcacttgcatttaggtagaaagcattggggtgcaaggtgacactggagggggaggcatcaggaaatccaggatgtcttcaaagttctggtgtcgggggctgttgagtaagcacaggaataagggggtcaagttagagtcagggtggggtctgacctggatgccataggacctgatccccaagccacagggtgggacttgactgggcagtggggacctttggaaaggactttggggagaaaaacagactggagtctgtcttaggcgatcatcggtccgtgaaatgagcatgtgttacaggcttggtatgtaccagaccctgtgctaagcaagggggtatggagaggagagggtgacaagaatattggatcaacacccgggagctccatctatcccaggatgcactatcttttttttatttttttgagacggagtctcactctgcctgcaggctggagtgcagtggctccatctcggttcactgcaacctctgcctcctgggttcaagcgcttcttgtgcctcagcctcccaagtagctgggattacaggcacatgccaccacacccagctaatttttgtatttttagtagagacggggtttcaccatgttggccaggatggtctcgatctcttgacctcaagatccgcccaccttggcctcccaaagtgctgggattacagacatgagccaccgtgcccagccagatacgctatctttttattgagtgattgagacagggtcttgctctcttgtccagtcttgaatgtggtggtgtaatcacaggctcactgcagccttgacctcctgggctcaagttacccttctgcagtagctgggactataggagcgtgccaccacgcctgggtaatttaaaaaattttttttgtatagacagggtctcactatgttgcccgagctggtctcaaactcgtgggctcaagtgatcctccagttttggcctcccaaaatgttgggatcacaggagtgagccaccactcctggcgatgagccaagtcttttttttttttttttttttttgatatggagtcttgctctgttgcccaggctggagtgcaatgacacgatcttggctcactgcaacctctgcctcccaggttcaagcagttcaagcaatcctcctgtctcagccccccagtagctgggattacaggcatgcgctaccacgtccggctaatttttgtatttttagtagagatgaggttttgccatgttggccaggctggtcttgaactgctgacctcaggtgatccacctgcctcggcctcccaaagtgctgggattacaggtgtgagccatcgtgcctggcggagccgagtcttaaaagatgaccctgtggagaaatggtggtccaggctgaagggacagcctatgcaaacactgggaggtgtggaaaatcatgacctgtgggtggaaattttggctagaacatcaaaatcatcaggtgtacattcctgtacccatgcagcagtcagaatctctgggggtggggccccaaaattgtatgcatacagactgtgtgctgatttgtgatattacttaggattttttgactttacaatggtggaaaagcaataatatacattcagtataaaccgtactttgaatacccatacagccattctgtttttcacttttatttttatttatttatttatttattatttattttgagatgtcattttgctgttgttacccaggctggagtgcaatggcgcagtcttggctcaccgcaacctccacctctcaggttcaaacgattctcctgcttcagcctccagagtggctgggattacaggcaggcaccaccacacccggctaattttgtatttttagtagagacggggtttctccatgttagtcaggctggtctcgaactcgagagctcaggtgatctgcccatctcagcctcaagccaccatgcccagccctactttcagtattcaataaattacatagccaggcaccgtggctcacacctgtaatcccagcactttaggaggccaaggtgggaggatcctttgaggccagaagctcgagaccagcctgggcaacatagtgagaccccatttctacaaaaaataaaaaaactagctgagtgtggtggcgtgtgtctgtagtcccagctacttgggcagctgaggtggaaagactgcttgagcccagaggtcagggctgcagtgggccatgatctcaccactgcactcagcctgggcaacacagcaaggccctgtctcaaaaataaataaataaataacacaaacttatttaacagtttactataaaataggctttgtgtcagatgattctgcccaactgtaagctgctggcagtgtaaatgttctgagcacgtgtaagccaggctaggtgtcttaaatgcattttcagtttcaacttagaattggtttatcaggacgtagccccttggtgttgaggggcatgtgtattaacagtctccttagtgacttttttttttttgagatggagtcttgcactggccgtagtgcagtggcacaatctcagctcactgcaacctcttgtctcccgggttcaagcgattctcctgcctcagtctcccaagtagctgggattacaggcacccacaccacgcccagctaatttttgtgtgtgtgtatttttagtagagacgggggtttcactatgttggccaggctggtctcgaactcctgaccttgtgatctgcccacctcagactctcaaagtgctaggattccaggcatgagccaccgcgcccagagtccttagtgatttttacaccatgaattgttgaagccctaagccagagccaagggcaagagtatagagaatctggagatgcggagagggttctgattgcctacaaggagtttggactttattgtggaggcagcggggagccaaggcaggttttagagtaggagagggtccaagcctgtgggtcacccttccgacttccctttccgaatgccaaacaccttcatgtcccccgtgggccccctttgtccctcccaccccaaactagccctcaatccctgaccctggcttccgcccccagccctctgacgtccatcatctctgcggtggttggcattctgctggtcgtggtcttgggggtggtctttgggatcctcatcaagcgacggcagcagaagatccggaagtacacgatgcggagactgctgcaggaaacggaggtgaggcggggtgaagtcctcccagcccgcgtggggtctgcaccggcccccggcactgacccaccaccccctcaccccagctggtggagccgctgacacctagcggagcgatgcccaaccaggcgcagatgcggatcctgaaagagacggagctgaggaaggtgaaggtgcttggatctggcgcttttggcacagtctacaaggtcagggccaggtcctggggtgggcggccccagaggatgggggcggtgcctggaggggtgtggtcggcagttctgatgggaggggcaagagctggaggcagtgtttgggggagggcagttacagcggagaagggagcggggccaagccctagggtggtgaaggatgtttggaggacaagtaatgatctcctggaaggcaggtaggatccagcccacgctcttctcactcatatcctcctctttctgcccagggcatctggatccctgatggggagaatgtgaaaattccagtggccatcaaagtgttgagggaaaacacatcccccaaagccaacaaagaaatcttagacgtaagcccctccaccctctcctgctaggaggacaggaaggaccccatggctgcaggtctgggctctggtctctcttcattggggtttggggagatatgactcccgcaaacctagactatttttttggagacggagtcttgctctgtcacccaggctggagtgcagtggcgttatctcggctcactgcaacctccacctcctggactcaagcgattttcatgcctcaggctcctgagtagctgggattacaagcgcccgctaattttttttttttttttgagacagagtctcgctctgtcacccaggctagagtgaaatggtgcggtctcagctcagcctcccaggttaaagcgattcttctccctcagtctcctgagtagctgggattacaggcgcgagccaccacgcccggctaatttttgtatttttagtagagatgggatttcaccatgttggccaggttggtgtcaaactcctgacctcatgatccgcccgcctcggcctcccaaagtgctgggattacaggtgtgagccaccgtgcccggcctaatctttgtatttttagtagagacagggtttcaccatgttgtccaggctggtactttgagccttcacaggctgtgggccatggctgtggtttgtgatggttgggaggctgtgtggtgtttgggggtgtgtggtctcccataccctctcagcgtacccttgtccccaggaagcatacgtgatggctggtgtgggctccccatatgtctcccgccttctgggcatctgcctgacatccacggtgcagctggtgacacagcttatgccctatggctgcctcttagaccatgtccgggaaaaccgcggacgcctgggctcccaggacctgctgaactggtgtatgcagattgccaaggtatgcacctgggctctttgcaggtctctccggagcaaacccctatgtccacaaggggctaggatggggactcttgctgggcatgtggccaggcccaggccctcccagaaggtctacatgggtgcttcccattccaggggatgagctacctggaggatgtgcggctcgtacacagggacttggccgctcggaacgtgctggtcaagagtcccaaccatgtcaaaattacagacttcgggctggctcggctgctggacattgacgagacagagtaccatgcagatgggggcaaggttaggtgaaggaccaaggagcagaggaggctgggtggagtggtgtctagcccatgggagaactctgagtggccacctccccacaacacacagttggaggacttcctcttctgccctcccaggtgcccatcaagtggatggcgctggagtccattctccgccggcggttcacccaccagagtgatgtgtggagttatggtgtgtgatggggggtgttgggaggggtgggtgaggagccatggctggagggaggatgagagctgggatggggagaattacggggccacctcagcatgtgaagggagggaaggggctgcctgtgccccaccttgcagggtctgtgcacttcccaggattagggaaagaccgggtagggtctgtctcctggcatcacatctccccctgctacctgccatgatgctagactcctgagcagaacctctggctcagtacactaaagctccctctggccctcccactcctgaccctgtctctgccttaggtgtgactgtgtgggagctgatgacttttggggccaaaccttacgatgggatcccagcccgggagatccctgacctgctggaaaagggggagcggctgccccagccccccatctgcaccattgatgtctacatgatcatggtcaaatgtgcgtggctgagctgtgctggctgcctggaggagggtgggaggtcctgggtggaggagcccacaaggggcatgaaaggggaccaggatgtatgtagacccaggagccctagtatgttaggagcctcaaaaccttcttgtatcccttttacagtcaaagtccaaagccactcttgaggaacactcttgtacaaaattaagctgggcacagtggctcatgcctgtaatcccagtacttttggaggctgaggtgggaggatcccttgaagccaggagttcaagaccagcctgggcaacatagtgagatcctatctctacaaaaaataaaaaaattatctgggtgtggtggtgtgtgccagtagtcccagctactcaggagaggctgaggcaggaagatcacttgagcctagtttaaggttgcagtaagctatgattgcaccactgaaatccagcctgggtgacagagcgaaacctcatctcaaaaaaataaaaaagcaaacaaaaagaaaaaaaaaattaaaagggaaactagaagagatgccaaaggttctggctgaagaccccagagtctggtgctacttctctaccacctgagggctttgggctgtcccttgggactgtctagaccagactggagggggagtgggaggggagaggcagcaagcacacagggcctgggactagcatgctgacctccctcctgccccaggttggatgattgactctgaatgtcggccaagattccgggagttggtgtct

SEQ ID NO: 52 - DNA, 161726 bp, Homo sapiens; identical to SEQ ID NO: 48

SEQ ID NO: 53 - DNA, 191343 bp, Homo sapiens
gcttttttttcattctgacactcattctgctccactagtcttaacagaactagacattttcaagctgcacctgctttcctgccagaaatggctcaagccactcacagcactaatgtcacttcgaccaattcttcagggcctatttcaaaagctaccctctcttctagggattcttcacccagaagtcactatgtgtttcacctttaaatagatgtttgctgaatacttattataccctatacactgcaccatggggaggaaaaccaggtcccattcacacttactctctaggaggggactcagatattaatcaaaaatgcacagaccacatgcaaaatcataactgtaataataaaggctaagtaggagaagtgcagtgagaagcatctaacaggggagctttcacctggactttggcatcagatcaggtttccctgaagacaagattaagccaagatgagaagaacaagtgaacaggcatgaactcactcaactgcaggatgcctggtacatgaagactaactgaagggcctaagtgtgacagctcagacgtcaagggaattaggagggataaagctggggaggaagtggggtcccttacagggtaggtcccttacaggtccttgtaggaccttactggaccttacaggtaatgaggtcccttacaggacttcagggataagactttgatgggagacacttgaggaatcactgcattgtggctactgaacagactggcagaaagtgggtgtgggtagacggttagatgatttacattcaggatgcagtagagcggaggagacctgatgattggctgaaacctggggagggaagttttctggtggagaagctaagggagtcaagagataatctgttttgggaaataaaattggggagactcagtaacagattggctatggagtatgagggagaggaagagttcaaggatgaccagattttccagtctggcaaccgaatccataacggtcacatctactgaatggggagtaacaaaaaaaagagtcaagtttgggatgtgggtaagaggttggaaaattaagagttcaattagcagagatatgaggcctccctgaaatcaaaagaagctgtcaattattcagctgaatagatagatcctgagctcagaagagaggtttggcctgcagatataaacatgtaagttacttgagtagatagcaactgagggcctgagtctggacttcatcggataggcatgattgatagataattgtgtaggaatatcatcccacaaaatctgtatgatctaatagtaatagaccagggaaacccagtgaggtctgtctgttcagattcttcttggttcccctttgcagcattccttcctcctgggtatggagcggggcctcttccgaaatgggagtcttatgaactacaatcagacaaagataggccagagaatttatttataaccagctacaagacacaaaggtaggggaagatccttaccttggggagaaaaagcagcagatgaaaggaggacagaaggtcaaagagagaaattccatttttctgggggctgcagtgccccgacattataacaaaagactgtaacaagggcttatgggagttatgagccagtaatggtggatgaaaacatatatatgtaatacatttattctgatatacacatatgtatcatatcacaagtacatttcttaatggaaaggggccgtatttactcactttcattttcccaaatccataaacacctgaactgtttcctgctgtttctgtcctggtcacacccttcccagcgtgggagccaggccatcttcctctcggctacctgtccccagcagtgcgactggcgctgcgccatctcttacggtgactacctgtaagtgatctctctgccatctgtcggccacctgtccctagcagcgcgactggcgctgccagtcatccgggcgctgccccatcacttacggtgactaactgagcctgggatgcgccaagtttctctaagcttttcggagtagggaaaatgaaaagcggcaatgattccacagaagctgccacaggggttaagtgcagtggcgtccgcgaaccgctactccaacatcgggagtgttcctggtcaccccagggcagctccagataacgtggcaggcaagagtcacccagatgcggccttcgccccaggggctgaccgcacaccgcagaccgccctcgcccccaccccagcagagagaagcgccgaacccggagagggtggcgaggggggcggggaaaacaggagcctcacctcgagtcggcgagcggggcggggaaaacaggggcctcacctcgagttgtcctgctagctgggtgcctggtgctatccagcctcagtgctttgggaggcagaggggctgcccgggaccaaaaggtcgccgcttcttaagcccatcaatgagggggcgtggttgctttgctgggccccgccccgagctgcgccctgagaggctctgctaggcccggcccgggtcttcaccggcgcaggagcctcagatctggcctcttctttcccagttctggttcttctaacttcttttctcctgcttgccccttcttctctaaatctttttaaaattcaattcctctttatttttctcttttcttctttattcttccattcactcgccttttcccatttctctttctttaccctttctctcatttttccgtagtaccattttgacaaaacacaaattggagatatgacttcggttgagcagcttttatttgccaaagcattacctggtaaacttatattaattttttttaatagtcagtagccagaactaactgccctttttctcagtgatatatttagataccacctatcgaggacttactatgctttcagcaattgtgtttttatatgcattatttttgttaaacgttgcctgaggtacgtataattagcttcatcacacagatgaagaaactgaggctcagagaaggtaaatgatttgtcctcacacaggtcacaggtcacacagcaagagcagagcagtgaaacacactgactccaaagtgttggggctcagaaaacgacaccccaaaatgaagtcctcagaagcagcctcacagaaaaaaagttatttgaagcctcttgccttcctgtctctggccccacattctccctcaaggcttgccttagaaactggaattcttcttccccaaggcaggtcctagaaacccaaaaatattattctaatctccccaatttttcgcgtaaaaacagaccataaagaaattatccaacccactttttctgactgtaggtctcaagacccccattccacagagggtcttgcccaatgcacagaaggaaggaatgcaccacagagaggccaaataaaatctaaacagacaggctttgctgggtttccccactcagtctatttgcattacactatacacttttggtccaatcctatttctacacagctggttatactttgtttgaacctaaacataaaaatggactgttcccctgtatcttgggtcttcattctgaaggctcccatgtcacttaaaactatgatcaaataaatttgtacccttctctcctattaatctgtcttttgtcagttgattttcagcaagcattcagagaacaaagggaaattttccttttggtcctacaaaagtcctcacgcagagaatgtacggcacaaggaggttgcattatacgaggtacaaggactagtttatggtccttaaaatgtttcctcttcttgaaggggcagcatcgtggtacatacatcatcatcatgcaaaaactgttgcacagatataagatgtcccagccacagcaggaacagaaaagtgagctatttggctccttgcttaggaagtgattgtttctcttcatttaatctaaggacaagatgttgtcacaatcatgttgccaatgaaacacttcccagagattaatgatatgaactgtggacccaattcccacaccccacaaagagcaagaaacttgtctttaattgtctaaagaatgatgcctaggtatctggtttggatatctctatttgcctattaaatgattttttgttttgttttaaagacaagctttcagaaactagctatttcattcttcattgtcaatcatcttaaaaatcttgccaactgcatgatgacaagtgttaattcataactaaataaaaatttccaggcttttgcagaaatgtcatccatcatcttttaacctttttaaatgaatgtggtcccagtgatttggcaaagctgctaaaatcagtataatcaatttgaagcaagagagattcaatatcacctatcttattccttcaaatgataacatttcaaattacctgtgtcaggtgagcaagaagcctagtatttttctagagaccttagcatctgcctcacaattgttgtcaggtaacctagattttttcagtccaaagaggccgttctgcttccaaatgcctactgaaagtgaaatgcaaaatctgtcggtacacagggaagtcttagtgttcagatttgattgtggtaaagctgcaaactggtctcacaaatccaaaggatctttggtccaatattgtgaaagtagttcagaaagttgcagagacctcagtacaggatgcactacctctgagttcccaaaggggcagtatctaaaactctggtcccatctgcagccactgttcctaatcctaagaacgtctgccgtgcccaggtgttgtcgggggcaggggacagcagcacaaactctgcttcctggcatgatgtccagctcctcactctttcaaccttccctaagggaagctccctcttggaggcctttggtatcctttcctgtcagctgactcccatctgtgagagaggttgtaattacgctgaacctcagaatgaaagagaggtgagatccaatgcccctgacacctccccagacagctgagcatacagaagagagttctagggaagggtggccctgtgaagccacaagaaggtctgttatcctttcccaaaggcaaggatgacagtgcttacttgccctgtatttgcataataaagagaggccgccacaggaatgagtgggcaatttccctccccagaaatcataggcatcttgtcaactgcacttagtctttggagttgacttcttttaaatgacctctctcttcattaaaaaaaaagttttagcttctacatgccatgatattctcagttaatagttaatgatttaagtggactctgacctaatataattatatatacaccatggcagctggtcaggggtggagtgtccaggatagctaataagatcttacgttttgctaccataataaagtatcatattcaccttgtactccataaaacattctcaaaccaacacaactgaaaagttaccgccttcctctgaactcctgtgtagcattctactgttggaagcactctttggatgcttaacatttatggtgttgggtatatatacacatgtattcttcctcaccccatgtcaacttttttatcagctcataagtggcttatgaatggacatcattttagttactctttgactctccacagtgcctgagtaggaattcggcaatgctttaattgttaagctaggcaatttctttttctcttatcttctaagataagggtacagcttttcttagccttgtaagaccaaaaggaacagtaacatttcacatccagaacacatggctcctgtaaaaggagccacagaggctaagtttgccttggacttggaaaagacagctgaataatggccaggactaagaaactatttaacaaccaactttcaatagcaacagttttataaacaagaagacacagcatacaaactttagcaaaaaagtgcccaaatgagaaatgtgaagcaggaactaagagacccaacaaaagcacctctaggttatctgtttttagaaacattaatcccactctgaaagtcaaataaatccctatgaacattaaaataaaactcagaggtctaattattctctctaagaagtttgctctttcaggtattctacgcttgatgactatttcaacagatactgataaagtatgaaaaggagtgttgacacaattttagaaataggaatatgaaatgtacctgacaaccctaatatcttactgtatgtgtaaaattgacaggcatcgtgatcggggcaataatgttaatgtgcaagtcatcaaaatggccaatgtgaaatttccgtctagaagcagagaaaagagacagcccccacccttcctgggcacgtgcaggtcattacaaatccaaaagcttgtgcctcaggcaatgccacaatctgagacaaaagaaatccacaaaatggcatcaaaaaaaaactgtgtaactgccccaagaattactggcaaaggtctcttcaatgctgtttgaaacacctgtaattcaatattgcaactaaatgtgcatttattcaacagtattagtagtaaaataagcattaggatatttctgtcaatatgcattggtgcctggagaagactgtctttttgtctgagtactttgactttcacattcttgatttctttaatgagtctttcttgcctaccttcagaatcccagaattgaatagtcacatttgtttctccttcttcatcagtcaccagatttatggtacagtttataacatatgatgatatcttcttggtcaaataaagggttcagttcatctataaaagagagacactacaaaactggatttaaaaaacaaagtccagctatatgctgcttataacagacatcctaaaacaaacaacacaggaaagttgaatataaagggacaaaaacaagacataatagttaaatattcaccaaaaaaaagctagtgaaatgatattattataattcaaaataggatttaaggcaacattcataaagagcatataaatgcagaaattctatgcacctaataatatactactcagcaaaaccattagaattataagaataaaatgaataaaaccacaatagtgggagattttaacacatctgtctcaaaaactgatagatcaagttgaccaaaaactagttaagtacacacacacacaagcacacacacatcaatatgtgcatacatatggacagagggggactgcaaatgataaaacaaacaggacaaaggtaaataattggtgcatttgggtaaagtctatggaaaagttatatgtactatgtttggaacttgcctgtgttttaaatggtatcaaaataaagatcataaaaaatcacatccaaataagtaaattaaaaacagtaagtttcccatcctatttgaggaattggaaaaagaacatcagataaaatctttttaaacagcagacagaaggagataatacaagggcagaaattgaccaggcacagtagctcacgcctgtaatcccaacactttgggaggccaaggctggtggatcacctgaggtcaggagttcaagaccagcccagccaacatggtgaaaccctgtctcgagaaaaatacaaaaattagccgggcatgatggcaagtgcctgtaatcccagctacttgggaggctgaggtgggagaatcacttgaactcgggaggtggaggttgcagtgagccgagattgcgccactgcagtctagcctggatgacagagcgagactccatctcaaaaaaaaaaaaaaaaaaaaagtagaaattagtgaaacagaaagcaatgaaacaataggggaataaaactgatatatgtttctttgaaaagactgacaaaaaataaagatgaacctctaactgtactgtttaaaggggaaagaaagaaaactacaaatgacaattattaaaaatgaaatggaatggctaaagacacaatagagatttgggaatataagagaataacttgaacaactttataacatctttataacggataaacacatgtatttatatttaagtagcaattttgaatcaattaatacttgcagattttctttccaaaaagatagctaatgcctttctttccttttaattcctagtctttacttatgatttgacctgagtaatataacaatagtgataaaatcccaaatcagaggcaccaaaaaatcccacttcaatgtcacctttgccaaactggcatttagggggggccttaaaacttgttttttctgatgcaagattcatataaaatctttgtatatatttctctaaatataatttttaatacataatattttcacacaattaaaaatgcaggtaagtatacagtaaaaatcttctccaatgtttgcctcctgctgaggcagaagaattgcttgaacctgggaggcagaggttgcagttatctaagattgcaccactgcactccaacctgggcaacaagagagaaactccatctcaaaaaaaaaaaaaaaaaaagatgttatttgcaagcctcatggtaattaaattaaaaaataaaaaaactacaaagttacacaaaaaataaaaagcaagaaattaaaacatgccaccaaagaaaatcactttcataaaaaggaagacaggaaagaaggaaataatgaagagaagaccacaaaacaaccagaaaataaataagaaaatgacagtattaaatccttacctattaataataacatgggatataaatggactaaattctccaaccaaaacacagagactggctaaatggatgtttcagtatacactatcattccgtgtgataaatcatatcaacacaatgaaggacaaaatcatatgatcattttaattgatgcttaaaggcatttgataaaactcaactataggcacctacatcaaaaaaagtgaaaaaacttccaataaacaacctaacaatgcatcttaaagaagtagaaaagctagttcatgataaaaaaccctcaaaaactgggtacacaaggaacacacctcaacacaagaaaagtcatatataacagacccacagctagtatcagtctgaatgaggagatctgaaacaagaatgcccactttcaccactattattcaatatagtactggaagtcctagctaggagcaatcagacaagagaaataaataaagtgtatccaaattggaaagaaagatgtcaaattatccttatttgcagatgatatgaacttatatttggaaaaacctaaagactccaccaaaaaactattcaaactgataagcaaattcagtaaagtttgaggatagaaaatcaatatacaataatcagtagcattcctataagacaacatcaaacaatatgaaaaagaaatcaagaaagtgattccatttataatagctacaaataaaataaaatacataggaataaatataaccaaagataaggacaatctctctgtgaaaactataaaacatcgatgaaagaaattgaagaggacacaaaaaatggaaaaatattccatgttcatgaattggaagaaacaatattattaaaatgttgatgctacacagaacaatctacaaattcagtgcagtccctatcaaaatatcaataacattcttcacagaaacagaaaaaaaaaactctaaaattaatatggaaccacaaaagatccagaatagccaaagcaatcctgagcaaaaataacaaaactagggaatcactttacctgaaaattaactacagagctatagtaaccaaaatagcatggttctggcataaaaacacacagatagaccaatggaacagaaaggagcccagaaataaatccatatatctacatagaactcattttcgacaaaagtgccaaaaatatatattagggaaagaacagtctctttaataaatggtgcccgaaaactatattcatattcagaagaatgaaactagatccttatctctttccacatacaaaaatcaaatcaggccgggcacggtgtcttatgcctgtaattccaacacttcaggatgccgaagctgacagatcacatgaggccaggagtttgaaactagcctggccaacatggcgaaactccatctcaactaaaaacacaaaaattagccgcatgtggtggtgtgccactgcaatcccagggaatggggtggcttaggcaggagaatcacttgaacccaggaggcagaggctgcagtgagccaagatcacaccactgccctccagcttgggcaacagagcaagaccctgcctaaaaaaagaaaaacaaaatcaaatcaaaatggattaaagatgtaaatctgagacctcaagctataaaatggctgacagaaaacattgggaagactctctaggaaattggtttgggcaatgatttcttgagtaataccctataagcacaggcaactaaagcaaaaatggacaaatgggatcatatcaagttagaaagcttctgcccagcaaaagaagcaatcaacaaagtgaagagacagcccacagaatgggagaaaatatttgcaaactattcatctgacaagggattcataaccagaatatataagaagttcaaacaactcaagaggaaaaagaatctagtaatcctattttttaaatcggcaaaagatctgaaaagacattttcaaaagaagacatacaaatggcaaccaggtatataaaagtgctcaatatcattgattatcagacaaatgcaaatgaaaactacaatgggataccatctcaccccagttatatacttttatccaaaagacaggcaataataaatgctggcaaggatgtgcagaaaaggcaacccttgtacagtgttggtgggaatgtaaattattaatacagccactatagagaatggtatggagcttccccaaaacactaaaatagggctaccaaatgatccagcaatctgactgttaggcatatacccaaaagagaggaaatcagcatattgaagcagtatcttcactcttagatttattgtggtataatagccaagatttagaagcaaattacgtgtccatcaccagacaaatggataaagaaaatgcagtacatatacacaatggagtatgattcagccataaaaaagaataagatcctgtcatttgcaagaactagaggacatggatggaactagaggacattatgttaaatgaaataagccaggcacagaaagacaaacttcacatgttcttactcatttgtgggcactaataattaaaataattgaactcatggaaatagagagcagaatgatggctgggaagggtagaggggaggcaaggtgagtggggatggttaatggtacaaaaatatagttcaatagaataaataagatctaatatttgatatcacaatagggttacttcagtcaacaataacttatagtacattttcaaataactaaaagtgtatgactggaatgttcttaacacaaagaaattataagtgaggtaataaatgtcccactcaccctgatgtgattattacgcattgtatgcctacatcaaaacatttcatgtaccctatacacgtatatatgtactatatacctataaaaattaaaaatagaaaaaaattaaacattttaaaatgagaaatatgataaatccagaaaaaatacattttattgtaataatatatgatttattttcacactattacactagcagcagatgtcactttttcagatggcctttgtttctctgccatactctcttgtttgtgcaaagaccaacctagcacccaacagtgtcaaagctaaataaatgtttgttgaatgaaaaaaaaaaagaatacaccaggtagttcctcaaatttatttgaccatggaggtaatgttttacgagcttctgtctagagagcctaattctcaacagaacatatttagggaaatattggcttatagtattaaaaacataattcaacaagtaattattgagcatgaattatattctagccctatggcaatcattccatgcttatagaaaagtagactaaagtcctcatttcaagtagtttgcaggctcttggtaaataaacaacaggaaatatatagcaagtcacagcggtttacacagaatataaatgagcatttgcctgagacaaaacaattatttaatattcaatatagagtctgacatatttattcaatgcaagtgtccattctggtgaccagtcacaatttcatttttaaggatgtaaaatatttaatagaggagaagaatcctttctttcagtctaaagtgttccccagtgaaatttgaattttactgtttcctcctcccacagaattgaataaaacaactgcctgactaaagaggaggtatcttatggtttaactgattaaagctccactaccaaaatagggggaaaaaacaatctctagaaacaagtttcaaattaaaataggtgttttggacttttttattcctcagtttttttcagccatatcataaatgtttagattgacaaatatgatccaagtaaaatcatcacataatgatccccttaaaacaaatgtcattttgtacagttaattttttattattctttggcacctgctaagcttctttcaaatgaaaaactatactcttgctggcacgttactggtgtaatgtcccgaaatatgttaatattattcatgattttgttcttaagtacattttaactgaattatcttgagttaggatataaacaaaatgactatgacaaataaatgtttgaaaaaagaaattgatgtaatttctttaatgtttattcttctattacaaagtttgaggaaatataagaatcacattttcatcatttcttttcgatactatttattttttatctgagaccatttagtttaaccatctgcctaaatcaaaatgtacaggataggtcattaggtctactcgttgttccattaatcatcattttaaaacagcttctgccgtgcttgggaaaggctgacttgtgttaagtaatatacgccctctagtggatgaagatggagaagaaagtatttgagtttttcacttagggctagttatgagttcaatttctgagcactaattctgttttctagcttggatttccccaaaaatgtaacactatgagtcaagtcatggtggctcatgcctataatctcagtactttggaaggctgaggcaggagagtcgcttgaggttaggagttccagaccagcctgggcaacatagtgagacccgatccataccaaaaattaaaaaattagccaggtgtggtggcacatgccagtagtcccagctacttgggaggctgagacgagaggattgcttgagctcagaaggttgaggctgcagtgagccatgatcccatcacccactacactccagcctgggctacagagtgagaccacaatctcgaagaagaagaaggaggagaagaagaagaaacattttgttatgttaaatttacaaaggctccatcaagtagtgtatgaattttccttgtggtttaatttcatctccgttattgtctttttgtgccatcatggttctcttcatctttaaagtcagccaacaaatatttattggatgcctgccatgtgccaggcatagctctatgcacttgggatgtagcagtgagtgaacaaaacaatttgaaatcctgtaattgtaaaatttaaaacaatatcagataatgatcattgtgtggttcctacataccagaccacatagttatttgcaattattattgaatcgaatgcccaagaaccctgtttaaaaactgaggagcttaggctggacacgacagctcacgcctgtaatccccgcatttggagaggctgagacaggcagatcatctgaggtcaggagttcgagaccagcctggctaacatggcgaaaccctgtctctactaaaatacaaaaatttgccgggcgtggtggcgggtgcctgtaatcctggctactagggaggctgaggtgggagaatcacttgaacttgggagacagaggttgcagtgagccaagattgtgtcattgcactccagcctgggccacaggagcaaaactctgtctcaggaaaaaaaaaaaagaagaagaagaagaggaaagagaagagagaagaagagggagaggaaggagaaggagaagaagaagaagaagacaacaactcaggtgctaagacacttgccaaagatcacacagaaaatccgaaacttgtggccttgttttgaattttattacggtatttaaaaacttttcccctgcagctaaagtgtatgctccatgagggcagggacggtatctacttgttcatcaccataaccctgggacctgaaacctgccactgggttctccagaaatatctggttaaatgacttaaggataatgaaataaatgagcagagagctgaactctggactaattgacaccaaagcccttctcaccaatgtctctactgcctgcatgagtgtccagaaaacaggaagcaaccccttactggatggctcaattgaattatttcagagctatatgtcggttccacttttttaaagagtaggaaaagaaaatgagtctaaaatgagcaagatctgattatttagaagatttaaaaatctttggccggcacagtggctcatgcctataatcccagtactttgggaggccgaggtgggcggatcacctgaggtcaggagttggagaccagcctgaccaacatggagaaactccatctctattaaaaatacaaaattagctgggcatgggggtgcatgcctgtaatcccaggtactcgggaggctgaggcaggagaatcgcttgaacccaggaggcagagattgcggtgagccgagatcacgccattgcactccagcctgggcaacaagagcaaaactccatccacctcaaaaaaaaaaaaaaaaacaaaaaaaaatctttaagcagaatctcctttgccaattctcctgagttttaccactagagaaaacagggagaagccaaagtgccttcacccatgaaggaatgtattccccttaaagggccattcatgctcttgggctggagagtggagctggacagaattgagcttccctttcacttgctgagaaacctgctgtgagtagcctctcatgccagtataaatgggttcatttccatggtaatattttgttatgtattttatagtagttatttccttgatcattatatgctctataccattatttgccactaacctggtgacttaagagtacgatagctgtcgttcagatttattaacctttcttcgtatgtttgaaagtcattatgagtgtactggcttaagctaatagcagattagtaaatattgaaagagtcatcttgccatttgaagtgttttctggctagaataaatgtttgttcaggttgtagccctgcccaggtaatcaccaggtaaaaatacaggatcaacttccagtgctggaacaagcaggataaattactaggtgcaggaatgggttttatggtggctctctcttaacctattatttaggtttatattttaaaggggaattatctatgcttgctcctattacactggacagagtaaaacaaaccaaaagaaggaaacagaacaaaggttacttcaggacaatagttataaaaataaaaccaaacagggtgatcccaaatatcacaaatcgggaggcctagcctgtcatccaaactttattacaatcacaggggtggttctcctctccttgttaagtcttttctgtatgacgagttttgaaagataaatttgccaattgattccttgcagttcttccttcgtgtcacctgattgttttctccatagtcaaattgtgctcttaattgataaccaacatcttaggtcaagatatcagttcctggtgggtttaaatgctttcagtcacttttattttttattttttatttttttatgatggagtctctgttgcccaggctggaatgcagtggctctatctcggctcactgcaagctccacctcccagttcaagcaattatcctgcctcagcctcctgagtagctgggattacgggcacctgccaccatggtcagctaattttttgtatttttagtagagatgtggtttcaccatgttggccaggtctcgaactcctgacctcaagtgatctgtccacctcggcctcccaaagtgctgggattataggcatgagccaccgtgcccagcctcagtcactatttttattttatacataacaacctccctgacaagcctttcttcaagaggatggatccacactaagatcctctaaggaggatcttttacctctgatctcatccttttgcacttctgcaatcacctcttttcccatagtgtcaactatcacctcagcagaaaaatctcagtcttcctaattctcccttcccaaactcaggtggcgattccagctgccctctgggcatctctacttggacttcctactgttgcttgaatctccacatgcccccaaaagaactcatccccaaatctgctcctgtgtcaccgtctccctaatctttgccaaaatcccatggacgatatctccacgaagagttttggatctgtccccatcctgtgagtttctgctgcctacagtcaggtttccatcactcattctttcttggactactttaaatcttttagctggcttcagtcatttccaaatatacccctgtctgcatgctgctattcaacaacctctaaatcctatgtgctagctgccatcaatctaggctccacagccttgaacagtcccatggcaaattagagagaaactccttggcccagcctggcatccaagacactgcacaacaggtccctcccaagggttccttagacttaccctgcatactccttaaatcggagttctcacccttccctaaactaaccagtccttctctgtctcccagggttttctcctggcgtttccccttcatggtatgccaatccccgctccagctttccagatttcgtcaattctttacggccttaaattcaaaaaccaacttttccatgaggtatttccaattcctcctgagagttttccttacaaatcttttttgttttgtctggttttgagacagagtctcactctgttgcccaggctggactgcagtggtgagatcacagctcactgcagcttctactttgcaggctcaggcaattctcctgtttagcatcctgagtagctaggaccacaggcacataccaccacacctggctaatttttaaaactacttgcagaaataggcatctccctatgttgcccaggctagtttcaaactcctgggctcctacctctgcctctcaaagtgctgggattacaggtatgagccaccacactggcacctccaaatctttatagcagataattggtcttattccatcaaactttccttatattcttcttcttaatattgtagctaattacattaaatcatgtatattaactgccaggtgctcactaaatactgcttttattaactatcattatccaaagggagagcactcagccttcccatctctagacccctgcagtgccctgcccataccttcagaaaacaggtgctcctaagattggttgaaatgaaggaccttgtctttaggtgggtccctttgcttaatacttatctcagaatttagaagcagtttaacaatcactgtgctgactgacggagcactaaaggatatcctccattagattaatcaggctctagggtttcagctggaccaaaacagccaaattcttaccgaattattataaagctgctcttggtatggtgaagtccagctgacagggtttcagaacgcatggaaccatgttataagcaagtatccaaaaaagtgaaaacccagcaaatgcagtcacacccaacattttcaatcctaaattcctaaggcagaaagtggcatcgggctacatcccctaatgtctccctcaggttagctgagaggtctcaaacgttgatctcactggatcttcttcatggtaatgactggggagagtaatacaagataagaagatctggtttacctggcctggccgtaacacatgaccacttgtcagataaatcaaatagtctctctatgtggtattgaggcaggaaaataggggctggagggagggaatgtaaggccaattcacacttcagctataacaggaaatatcctctccatagggcatatgcctaaatgactttgtaactttacttcatcctctccatttacatagggcgtactgcaagtaaccatggggattctctcgggggtatttaaactcccaaaaattctgtaacagggcctttgagcccctgtgctcaggcccgctcccacacggtggagcgtactttcattttttactaaaaccctccattctttccttgctttgcacattttgtccaattctttgttcaagatgccaagaacctggacaccctctacagttaacagtgtaattcttaggctcaaccccatttatggtgattctcacaggtagggtggttgtagtacagatagaaaaatggaaagtgaatttcctcttatggaaacatatcaaaacaatctaggggaggccttcactcccaggaattctcagaattactctctaaagctgttgtaaattaatgccttcatagggattagctagtaggtaacaaagacaactaaggtggaaaggtttgtagccaagcaagaaagggcacaaaagagggtaaggatttgtcctatcatccacattactgtttcacatgagctttctagcaagtacatgtaccatgaattgaatgaagagcaacaaggaagtacagttgtttcttttctcttctttttttttgagacggagtcttgctctgttgcccaggctggagtgcagtggcacaatcttggctcactgcaagctcagcctcccgagttcatgccattctcctgcctcagcctcctgagtggctggaactacaggcgcccaccaccactccccgctaatttttttttttttgtatttttagtagagacagggtttttgagacagcgtctcactctgtcactcaggctggagtgcagtggtgctatataaatcactgtaacctccaactgctgagctcaagcatcttcattcctcagactccttagctaggaatacaggtgcatgctgccacactcatctaatttttaaaatttcatatagatggggtcttgctatgttgcccaggctggtctcaaaatcctggcctcaagtggcctttctgcctcagcctcctaaagggctggcattccaggcaggagccactgaacccagccaacagttgcttttggatggaaaagtaaaaagtcattcactggtcaataaacgcaatagttttctaattcacatgcatgacttcctctcatctacttaaatgacacatacatacacaacaatacacacacacacacacacacacacacacacacggccttctccaggtttgcaaagggtgcttactctgcaccagttgccaagaataccttgttctctacagaagctgagtgtaataactatttttctatttgtctggctatctacttgcctgtttcttgccatgtttcaaaaaagacttaagatggcttgtgtggatatgtcatatgacaagaacttaaattagaagtgaaatgaaaatagaaataaaaacaaaccaaaggtaaacccacagcagacaaagaaataactaaaaatcataatgctccacacatctgctaccagcgaaccacaaatttacctctaagctttccagtggccaaatttgaagagaagcctagtcaattacataattcctctctataaaagggattcccaaattttgtgtgcatctgaatcacctgaagagtttataaaactagaatcactgaggccccacttacagaatttcaaattctgtagatctaggatgcgatgctggaacttataatttcatcaagttctcactaatcgctcaggtaataacaaatgaatcactcaagacaacaacagttatttgtgatattaaaatcatataggattttcttccaggaagtggcaaagagaaccttgtaagatacaatgaatgaacacagagatgcgtttcagaggtcatgggctgttgcttacaataaacaataaccttcaagatagacttttacagagctatttaaaagtgattatgttgggatttggtgaaagtgggaccaagacaaaagttatgtttcccatgaagtttttttttttttttaccagtttgtcttgacccaaggtaggaactaaaaaggactttattcagtctcattatctttctaccaagcataaacttaagaaccccttagtaaatatgatagcaaggcatacaaactgcagggccttggcagcactgaggtttatctacaaactataatgtggtgttggaagaatgtaatctagttaatcatatctttaaagtttattctccctcagggcttgaattgtgatggagggaggaagcagagagagcaggaatggaagggactgagttcatcaccactatggcaattgctctttgtgaagacctaagtctgtttttagtgggcccaaatcatctaaagcaagcttgtctatcctgacacccacaggctgcatgtggtccaggatagctttgaatgtggaccaacacaaatttgtaaactttcttaaaacattaagacttttttgctttttttgtttaagttcatcagctatcattagtattagtgttagtgtatgttatatgtagcccaagacaattcttcttccaatgtggctcagggaagccaaaagattggacacccctgataagttctcaatatggtgaagttctcagtatacctgaattttgcatggtcatgtaaagttacattcattttgattttgtagcagaacggacagaaattttattatatttttcatatctcacatctgtccctttgaatctgaagtgaatctgcaagactttggggttcttcatagcttggctttaaaacaaaaacaaatcaagtactagatgggctggtctttagcttttctgggaaagggacaattggggtggttctaggcaatctattatttgcaggcatgcatatattatggctctcaaacctgagtacaagatggcataagagaggtgtcgttaggtattgacacctcaagtattcaacaaatatttatagagggcttgttattaaccaagcactgtactggatgttgagaatacaagaatgagtaaaggaccgcctccatcctccatggtgttcagagggccatctttccctacaagaggcagttataacaaagcaggtaagccgtctgaagaaatgcagagcactcaggagaagaaatatatccacacttcggtggtcaaaggattcttggaggaagctaaaagaaagctaaaaccaaatatgtgggtaatatgtaaatagatattaaacatgtaaaggtaggttaagcctgagttaagatgaggttcaaaggggaaggtaagagagagcattactaaaaaccaaataaagtgaaacgagccagcttgttgtgaaggttcataagctagaagaaggcatgctgcagaagctgaaaaaactccaatctgacctctatgtatgtgaggctagaggtgaaaaggctgagcggcaaggagaggggaccagatcgtgaatggtcttctaatccaaattaaggaatttagactttaccccaagaaaactgagaaaccattaggctggtgatcatgtatttgcatttagaaagattacttgaacctctacatccctcacacctggccaggcacggtggctcatgcctgtaaccccaggacttttcaggctgaggcaggaggattgtttgagactaggagtttgagatcagcctggggaacacagcaagacccagtctctacaaaaaatttaaaaattagccaggtgtcgtggcacatgcctgtagtcccagctatttgggagactgagcggggaaggtcaataggtcaactgagtctatgaattcgaggttacagtgagcctgatggcaccactgcattctaaacaacagagcaagacactgtcattcattcattcattcatacacacatacataaagtattaaaaaaaaaaaacaaatcccccacacctcacctttatgtgtaaggtctgatgagtgatgttgtcaactctgaggtagctggatgagtgctgccacttcgaggtcagggatatgaaggtattttaccagttatgagagactaaataaatgacaatattattacactgctcctcaacgtaagtaatgtatacttctctcatactgtttctcacataccccacctccattacttcatcatccaagcaaacagtttctgaggaaaaagaacaggaaagtgggcatatagtagtatcaaagcaccccctgccttgtatccctagagatatgaaaagctccctgaaaggtaggcaggtatttgtaaacgtttttattagtgagtcaattatttaatagggatattaacatatattgttggaaaagtgttctcaggtgtgataaggaagtattttgttttctatatgtttatgattaataaacatattttaacagctgaacctttaagacaactgaaatccaagccatagtgtatacagggtgcctacggctctgctgaagggaatgctagttaacccatgacctggagtaattcaatttatgaagaattctcttggttttaatactatattactaaactcaaatattggctaatgaggttatttgaagaaaaaataaagtgtttcagaaatggaaatgtttaatatgattccctgtgtgcagtttgccatctagtgttaatttgtggaaataaaaaaggcaggtataataatttccaagcaggctcatcaggtggcaaaggcatggctcacagcaacatttccttgtaaaggtatcaagtcataccctaagaccctctgaggtttgttgaggtgggtgagtaggtgagttggctacttctaagaaatcagttattcttggaaaacaaaataattctcaatcctggctgcctgatattgttacctgaaaacttaaaaaaatatacagatggccaggcgaccctccaaacctggtcagtcagatccactcaggagggaccccagcagtggacggtctgtaccctccccaggtggttcccatgtgcagcttgagggggaggatccctgggcaggggggttaagattgcacaccctcgctgtgtcactgcaggagtgtcaccacttacctgtgtcaccttagcagggaaattgggctaattaaatatgtgctttggtacaatgaaaataacttctcctggtgttattgtgaggtttaattatcatcatgaatatttagtgcttaacacaacacatggtacagtgcactcaacaaatgctaaatatcataaataacattatcaaggaaaatattttaagagctatttagaggaagaaactacctaagaaatgaacatattacatatgacatattagaaattagaacatattacctatgaaatatttccattcttcttaaacaggtagccttgtggaattgaatgctgacacccagctcaatctgaaggatgcctcctgagacacatgttacttcttatccagtgctgacctaaagtgatttccaattatttccaatctgtctttgggttcaaaatttccaataccctagcaaatttcacttgtcttgttgagtcagatatcctcttctgaagtaaacagagaacagagtcacaccaactacagacatggtgacagtaagcacagccatttgttgggagcaattcccagagaaaggagaatcactgtgactttatcttcacactcataaaaaaaattaacctattattactgtaagctgttctgggcagaaggaatatcacctgaaaaagttcagaggaggccagtgaagagctattggtccagtctggcaggagtattcagtgggaatgttaggtggggtcaaatgataaaaaaaaacttggctatgaaaaattggatgtgaggactggggaaagagaaacatcaaatatatcaaatgctaaacttgaaagggcagagaaaaatgaaaacagttgagtagcagaaaattctgagcaaaaattcatttgttttatttgagacatattgaaatcaagtagaggatggtcagaagggggcatccaggaaggagcagggcagagcagaggcagtggcagggaaggggtgaaattcagaaagaaaatatgggctgtaggtcaagattgagtcaatagaatggatatgatgattgaagtcatggggcatgcatgagtttccctacagtgacttgatagaagagaaaccaccagcccagcccggtagcgcaggcttgtaatccagcacttgagaggccaaggggggaggatccttgagcccaggaatttgagattcagcctgggcaacacagcaacaccccatgtctaaaaagaaaaaaatttgtttaaattagccgagcatggtggcacctgcctgtaggtccagctactcaggaggctgaggtgggaggattgctggaacccaggaattcaaggttgcagtgagccatgatcaagccactgcaccccagcctgggcaagagtgagactccacctcaaaaaaaaaaaaaaaaaagaaaaagaaaatccatctgttactggtagacttttgcattgtttaccgtttagggctcatataacagaatgctactacgaacatagctgtatgtgccttttggtgatatatgtgtgcatgtatgctgaataggtgcagaggaatgaagctgctggatcctatgacaaacagatgattagctttagtagataccaccagagtttcctaaagtagttataccaatgtacatccccggcaatagcatatgatgttggggggttatttagtttatgtgttcactggatttattatttgctttagccattctgatgtatgtagtggtataagattgttttaatttgcatttttgggatgacaaataacattgaacacttttattttttattgtttgaatatataattttgtggagtatgtagtaaaattatttgcctattttgtaattggatcttttttttttgctacataggagttatttatagcctcattataatttctcagatagatgtattgcaaactctgtgggttgcccttctctcttaacggtgtattttgatgcaaacctattaatgcagcccaatttgtcagtctttctttagggtcagtgcttttttgtatcctgttttttgtaccctgtctttgcctaccaaggacaggaagatatgctatcttctagaagctttctttcaccttttatttttaggtctaggatcatctggaattgatttgtgtgcatggcatgatgggaccaatattctatgttctcctttaatatggatatccaactgcttccataccacttattgaaaagacgatcatttccttactacattgcaatgacatcattttcatcaactagatagttctatacatttgggtttatttctggacgctctgtcccactggtctatttgtctagccttgtgctaatatcactgttttaattacagagctctacaagtcttggtatctagtggtctagtcttctaacattgctcttctgctttaaaatggttttagctattttgggctctctatatttcatatacatttcagtcctccctctttactccctcccccaagcattactgagattttcttaaatctgcagataaatttgggaaggattgccatctgggcaatattgagtgtcccaaaccataaacatagtatattatgccatctactatgatcttttatatttttcacagcaatattttggctttgtagtttttcctgtgtggagtttttacatgtttgtcagaacaatttctaggtatctgatggctttaaaaaacattactgtaaatgctatcttcaccaaattctatcttaagtattgctagcttatacaaatgcagttaatttctgtacactgaccttatctctagtgacatcactaaagacactaattctaatggtttgtctgcagattcttttggattttctaagtggacaatcacatagactatgaaatatttttatttctaacagtcaatccctctatttccctaatttccagctaaggttatagatttccctattagcagtacttttaccagtatctcatacattttagtacatttataaaacaaaggaccattagatagttgaggatgccaaaaaatgaaagagaacaaataaaaaatacaaccaaagaacaaaaagcaactaaaaattgaggaacttgaaagggacaatgcaggacctagaatatgttttaaaatatataaaagaatatcatagaaagataacatatttagtcaatgaaatcagaacacagtgattttttaaaagttaataggttggaagataaagatatggaaatctcctagaaactaaagcaaagagattttttttttgtttttttgtttttttttgagatggagtttcactcttattgacgaggctggagtacagtggctcgatctcggctcactacaacctccacctcccaagttcaagcgattctcctgcctcagcctcccgagtagctgggattacaggcgcccgccaccacgcccagctaatttttgtatttttagtagagacgaggtttcgccatgttagccaggctggtcttgaactcctgacctcaggtgatccacctgcctcggcctcccaaagtgctgggattacaggcgtgagccactgtgcccagctgcaaaaagatgttaaacagaggaaataagttgataaatatagaggattcaacaactgaataacagaaattctagaaagagaagaaagagactaaggaaggggggaagttaccacagaaacaaaacccttaagactggaggaatttccagcacaaaaagacacgaaaaattaacacaaagaatgaaaaagacgtaagtcaatgatcatcacagggaaatcagaaaactctagataagagaaaatcctaaaatcttcaacagaaaagagtacacactgatggagtgaccgtcacaacagtgtctcatcagcaatgctgaaagctctgagagtgaagcaatgctttaaaaattccgagggaaacactgctgcaacctagagttctagacctaggcaaactatgaatgcagcaagcaggaatagacatctgctgataccagagatcacaaaattttacctcccaagtacctttcacaggaagcacttggaagatgggctcatcaaaatgagctaagaaagacccaggatatggaaaattcagcatagaagcagaggcaagccctgaaggacagtgcagcatacccagccagaaaccagttcaaacagaagaaaaggaaaagggccccaaaagggctatctccagagagaaaagaaaatagttctcacacaacagaatacttaagtatggtgaaccaatggaaaatcctgggagaaatctgttaatttcagaaagtataaaaagttgcacaggaaagaaactgtaatcataacacactacttgctagctaaccaattaataaaagtcgtaagttaaacaatggacataattttagcaaaaaattttatatatcactattgtagaaggatggaaaagaggacagaaaagcaactcatggggtctgcttccataataccaagttaactgagatggagtgaagccaataaataaagatttagtagaacatatctatccttttcaaagatggaggtaaataccagcaacaactgctaaaagagtttgaggagataaactagggtgggatagaatggaacaggaaaatgctggttttcattctgaactgtgtagcagtatttgaaattttaaactatgtgtgtgactaaatagacagtaataaaaagtacgtattttttctaaatgaggcagggtaaacatagggaactgaggtaaaaggaaacagtttaaaataattatttttgttttcttcaaacatggtattttaggctctacactagatcttaaaattaaggacaaattagtcagaataatacatatcccaggaaaacttctgacttagcattgtaaaccaattctaagaatggctggtaattcataacaaagccaaataatgcttcacaagtaagtataggatagaatgaacacaatttcgttaaaaggcaagtacatatattttatgtgttcaagtacatatatttatgtatatttatgtatgtatctgtgtatgtatccacatgcagaaagataatataccctgatacaaaatatacatgttaagtctaagaagtcctgttactcaaagaaatattttcaaatattattagataattcacttgtcgatcatcctttttcagcatctaaagaaatttcagacacaaaatatgcaactgcatttagaataaacagatggaaaagctattgtagaaaaaaatataggtttttagaaaagttggaaagattacaggcaaaaaataagaacatatattaaattacatttgcaagtttcaaatatttgtaactcaacacaaaaacctctaaaagtatgttgggtgcaatggctcacatctgtaatcccagcactttagaaggctgaggcaggaggatcacttgagcccaatgagaccagcctaagcaacataggaagattctgtctctacaaaaactaaaaaattagccaggcatggtggcatgtgcctgtggttccagttactagggaggctgaggtgggaggactgcttgagcccagaaggttgagactgcaatgaatggtgatcatgccactgcattactgtttgagcagaagagcaagacactgtcttcaaaaaacaaaaacaaaacaaagcctctaaaagtagtttgaactattaactttaataatgtaaatatcatggcctggctcggtggctcacatctgtaatcccagcactttgggaggccaaggggcctggaaaacataggaagatcccatctttacaaaaataaaattaaaacattagtagggcatggtggcatgaacttatagtcccagctactcaggagactgaaagaggaggatcacttgagcccaggaatttaaggatacagtgagctatgactgcaccacagcacagtcagagacagaccctgggcaacagagcgagaccctgaatctaaaaataataataatgataatggtaataataataaaaatatcaatttaaagttttattcatgatcgtcttattaaaataaatttaattgcaaaaacaacctgtcttagaatacagtatcagatgttttaagtacatgtgatcaacagtacaaataattatagcagtcaaaccttagtatcacacatacttaatatattagatatacacaataataaaatcactccctaccttgaaaactttacagaagcatttttaattttacaacacaaagctcaaacgaacctacaataagtctagtagtctgtttacgtgccaagggataaggctgaacaataaattaaccctttaaaaatgtctatgaacaagtacaattttctttttgagttctgcagagcaatgaccactaagaaatatttttaaaggctgaacagaatccagcggcaatgaagttaattaaataagaagactaagagaaaaataaacagttcaatattaacaatacagtatatttgccagcacaatcaaatcagtataaacacctttaaaacatgaatactgaacttagtaaaatgttatattgtatctaattatgtcagatatctgatgagagtgctttttattatagaaatagtttcttctctcttacacaagactttaaagcaaatccaaacagacaatttaactgttttggaaaatgtattcactgcagaaatgcccacaataagccatgctatctgatggtatggtaatgtgaaatggcatggtaacgtgaaataaaaaaaatttaactagataatttttacttcaaacctgaagcaaaagtacagaatgctgagttcattactttatgtatctattgtaactaggaattactacattaaaaatattcattcttacaatgtttgtttttagttgcctagatatgtaatgggccaggtgctatatgaacactgaagaataaaacaaaaaaggttctctgcaaagaaaaaaaagttggcctagggtactcagtatatccttacaaatttaattatatatggtttttgaaactaaagagaaatgtttttccaaacagttaactttctaagtgggtgtctctgcacctatatactaagtcaaaatttcaggggaccatagatatttagaaacacaaaattgctaattgactatttcagttgatgttatatttatcaactgtacttcctgggtatgtttcctaaagtacattcttacatgcaaaattttttaaatcagtgaaacaaacattatgtcaattcttgcaaacctagacatagtaaaataagaaacaagttccaaatttttgacctggacaaagagaatttaaaccaagcatatcatacatccaaaacacatatccattgatgagtcaccaaatctggggaaaagcaactgggattgactatgaggctgccttaattaatcttcgtcgtctcgttgcaaaggtataacctgaatttctttagctatcctttctgctaatattctattatttgcagcaattactcttcgtgacatcaaatcaaatggtccacctaaaagcaaacaagtatgaaaaataattttatctggtacaaaaataattcatataaaacaagtatagcaatatgtactatggtcacataacattttaatactttcagttttcttaaacaaaaatctactgttacatttctacaatgtataagcttagacaatatataactgtttctaagcataatttttgagtaaataatgaagtcataccagttagaaaatgtcatattttctctatttttgtgcattcttattacctctttattgtttaagaatctatggacagaaaatgtgaatccaatgcattttcataccactgtccttcccatttccttatttctttgttgcctttctcccagatcactggtgaattctttcagcacagattcacccttcggtttaaaattttcaccatcagttgaaagcaattatttaacttctctagtctcaacacagaaagtgatggtggaggaagtccatcatcaactatcaccattgtcaccattcaaagagctctgggtataagcctcagactcggtgactgtctaggccaagggtgtcgaatattttggcttccctgggccacactggaagaataagaattgtcttgggccacacataaaatacactagcactaatgacggctgatgagctaaaaaaaatttttttaatcgcaaaaaactcattatgttttaagaaagtttacaaagttgtgttgggccacattcaaagccatcctgagccacatgtggcccatggactgcaggttggacaaacttggtctaggctttttctacagcctttcaggagtacctgaaactcacactagaaaaggattagccatttatcattgtaagtctcacattaccattacctcttatccttacctctatctcctaaagcttattttgattttgcacacaattatatagcttgtttctgcttcaaaaactgcagtataacatatatcaaaaagttttttaaattctacatatggacaaaagtccaacagatgtgtggagatctgcttcactctccataattttacctgtaacatccattagcacgccaccagcttcagtaacaataatgccagctcctgcaacatcccagcagtgaattcccatttcataatatgcatctgctccgccagttgccacaaggcacatattaacagctgctgttccaacactccggatcctaacaaatagaatttagaaataaaattggaaaaaataatcctttcaagtaagatattcctccttaacttcactttaagtgtcgattgaagaaacttggaacgatctagaggataaagattttaagaggtgatatctaattgtaaaataaaaatatgtataaatctaattatcatcgtatattatataaatcacaaaaccctcacaaagcaataatttaataagataaacattaaaacaataatttttcataaaaaataaagacaatgcttaattctacaataatgaaatgcaagtatattaatatttgtctaaatccagctactaaagcttatattattttacacacatatacacatacccacaatgcaaatagtctctaggaggtgtaaaatatcatggtatgggtcattttcaactgggtgtgcgtcatacatgtgcctaaagcaacaacagcatgccaggctctgcaaagacctaagcctgccttggaaaattactgcaggtttgccctctcatagcacctcttccttgaatacaagttaagttgaatataaatacacttgatagcaattatagtaataatttattcagtaaagaatcaatgttaaaattaatgggtgagtctgataatttacagagtgtcaaagtgtctctccacaagatacataataagtacaatggaaaaatagcatctttacaatggtctaccattaccaagttatccaagttaatatcactcataatgggacaaaaagaaatgtgcctgataaaatgcactgagaaggacagaacattacttttgcggcattcctgccaaaaatccatgatccaaatataatcatgaggaaaccagacaaattcaaattcaagagacagactacaaaataattggcctatacttctgaaaaatgtcaaggtgataaaagacaaagactaagcaagttctaaattaaaggaaattgatgagaaatgacaactaaatgcaatacatgactctagactggatgttggattaaaattttcaaaatttgaataaagtcttatattagattatgtatccatgttaattcccttacttttatcattgtactgtggctatgttagacaatgtcccttttattaaagacacacacgctgaaatgtgtatttagaagacaaacgtcatcatgtctacaagttactttcaagtggtttttacacaaattccttctccaactgtttaaagcgatggtaataagggagtgagttctgttcaatgagatctttcacagtttatttatttaaaaacatggaaaactgatgactaatgtggcatttgttttatatctcaaaaataaaaataaaaaaattgcacctaagtacatcctttatgccaaataaattttaaaaaggattagaataacatgatgtcattgatttggcatgttttccatcatatgtttttgaagcacattaaatttgagaaagtagtagtaagtgcaccaaatttccacagatgtttgtttcccagataaataaaatcaaattaactttagtggcagttttttagttataaagaaaagtgcatttccccacttctcccatgagatatgtgatatttgatatctcatatcatagaatgcaaataccaaggtctttcataattaattccctggtactctattcagatatagaatcctaggctagccaaacaacagtgatatctactagcggtgcttccgtcacttctaatgagcaccatgggatctcaagcaaatggtcttacaatcagcaagagaatattcttttatggaaaatactatgaaaggattaccaaacagattacttaactaccagataattaagactatggtgtagattctgcactatgtgttctgaatcctatcttatgtggtcctcctatacagctgtggtccgcctatgcagctaacatggcacattgtaaaaaggattatgtttgatgtcacaaagatttgagtttgctcccatgtcatgtcatcaaataaggattccaatttactttagacaaatgtactaatgactacagctaatatttgtaaagcacctagcagagtgcctagcatataaaatgtccataataaaaatagctttttttatgataaaattgttctctaaaccatgatgtcagaaaatatcatataccatacatagtgaatttcatctacatgaattcctgaaaattaaacaaaggaaattgatccagaataacgtactttgcctcataaatgttggttcttaggaacctattagactatttctgcttatttaaagcattcattcagattataactctctttagtttcattgttttgtataagtgattctgaaatcccactgcaaagctgaagaatcagctgaatgcaaaagatcataaaagcaatcagtaagtcagtacttcttagtaatattttcctggttatacttttgaaaaaaatctgaagtaaaaattagtttttatttcagccaacagcaaaattaaaggttaaagttgtaaacctcttgcaactcgtttatgagtaacataaccattttatagcccatggttaaagtccttgcttcaagacagcacactgtagcagcaagtttattgcccttctctcaagggcatcattctgggaggttctgtagctattgacagaggctctcttttactttactcattactatatagaccacatatgcatagtacataattagtttgtacatggtcaacctatattttgaagggtctgacttctaagagaagtccaatattgaagaaacagaaatgatctgggagccaggattctagccctatttctatccagctgtgcgatctcaagcagccacatcacctacttgaatctcagtcaactcacctacaaaataaggctggattattagatgatctttgatcagttctaggactcttataactcattgataatattttcacaaagaaaaagacagaaatagtaggtggtgaaaatattatgttgttatttacattcaccagattttgttcaataaaggatttttattatgatttttcatataaacaactatggtcaaagaaatactatttaatggcggggcgcagtggctcaggcctgtaatcccagcactttgggaggccaaggcaggtgaatcacgaggtcaagagatcaagaccatcctggctaacatggtgaaaccccatctctactaaaaatacaaaaaattagccaggcgtggtggcgggcacctgtagtcccagctactccagagacaaaggcaggagaatcacttgaaccccggaggcggaggttgcagtgagccaagattgcaccattggactccagcctggcgacagagactccgtctcagaaaaaaaaataaatacataaaaaataaaataatatatagcattaactatattaaagttaaggacctcaaacctttagcttttcttgaagatttaaggataaaagtaaggataaatatttccttttaatttcttcatttattaaactgtcattacagagggactctgagatttggagaataataatagcatgacgattttgaaactccctgtataccctcctggaaaataataaaatgaaatcaaccaggaggacaaataaaacccataggacccattctttcagatagaaatcaggaaatgcaaactctcaaactacctctaagtagaagaaaaacaaataaataaattctaacagagcaccggaagcccgtagatacacagagtagggcagagaaggcagaaaagactttgtgagaaagaacaaggaggagcagaggacccacagggaacaaagacaaaaccaccctcagaaaagagtcactgagacaataaacacaaaaacaaaaacactgagcacagatcagcacttggtaattcatagtcttggctagaggtaaggggctagaaaacactcagaacctgaccaggcagcctcagagaagctgtgattctgaaggagaatcaaataagatagcagagatggtactccttggaaacaagtgaaggaaaagtaggaactaaggggtgcggggacgggggagggatagcattaggagatatacctaatgctaaatgacgagttaatgcgtgcagcacaccagcatggcacatgtatacatatgtaactaacctgcacattgtgcacatgtaccctaaaacttaaagtataataataacaaaaaaaagaaaaaggaaaaaaagaaaaaaaaaaagagtgaaaacttaaggaccctgcagaaatgaatgataaacaagacaagccaactctatctacaaccagcaggtattcataaaagaaaatgcacagaaaggcacaactggcaaaataagaaattcagaaagcaggaaccctgatcacaaaacgaagtgaaaatagaaaaaagtagaccacattcacacaaaactactgcaaaacatcgaacgctgttaataaaatggttttgttttttctttttgctgtaaagtctctcccccaaaaccaacaatgaaggggaataaaatgaatatcaatcgaatccgaattaaatattttcaaacaaaaacttgtgaatactgaaaaaaatgttacatcagcgatatagaaactaagagcacaaatggaccaaaatacgtacataaaacaagatgactgaactcaggaaagaaatgggggggaaataaaagacaaaattatgtcaggaacgaagaataaattacaaggtgccaataaaagaacagatgataagaaaacttaataaagagaaattaggaaaagcaataaaagaaagaagtaaaaagagacagagagaaaatggctgaaatgaagacacaaaggagatggagcattcccactggtgtctttaaagaaaaaaataacagaagtgcactagtacttaaactatatcttaaggaaacttcccagaaattaaaaagacatgaacctatatactgaaacacacgactgacccagaatgagcaattctaagatatatcctttaaaaactgttagccaaaaattcaggggaaaaaaaacagcctccagttaaaagataaaataatgtaaaagccaagaaaaattagatttgcatcagatttctcaaaaacaatatacaaagcaaggcaacagtgaaagaacattttcaagaaatttatactttcattaaggatactatatccagccaagctgtccttcaagtctcaaggccacagaaaagcattttggaaaatacccaaactcagggaaaactgtgcacatgtgccctcccccaaggaatctactagaggacgaacttcaaccaattaaaaaggtgcctgcaacacttcacaaaaggactgtgagcattttataatgttaaatgaagaactaggatcaaaaagcggggtcatgggttgaagaatatgtaaatataatatgttctggcaaagtagacagaatgcaactttaaaaatgggataaagagagagaaaaggggaatgggagacttacataggcaataggcgaagccaaaacattctagatagtaaatagttaagtaagaaaataatattaaaggtactataaaagttgtattacaaaagaaacctgctggaataaaatgtaatctttataaatacaaaaataaattttaaaagaggcagagaaggcacatcaaatgaacgcagtaactataacatcatacagacagtaattataccacacaataatacaacagaattgagacaaaaacagtcatatcaataaatcaataggcctaacctatctgttaaaagaaaaagattttcaaattgacttataaagtgaaattccatgcaatgctgtatatgacaggcacacttcaaatgcagtggttcaaaggactaaaaataaaagggtggacaaagatttatcaggcaaacaggaaaaataagaaagcaggggccaggcacagtggctcacgcctgtaatcccagaactttgggaggcagaggtgggtggatcacttgaggtcaggagttccagaccagcctggccaacatggcgaaaccctgtctctactaaaaatacaaaagccgggcatggtggtgcgtagctgtaatcccagctactcaggaggctgaggcaggagaactgcttgaacctgggaggcgcaggttgcagtgaaccgagattgtgccactgcactccagcctgggtgacagagggagactctgtctcaaaaaaaaaaaaaaaaaaaaaaaaaaagcaggaattgcaattctgatgtcaaagtaaatttcaagcacaaaaacatgaaacaagacaaagaatacgtaaaaattacacaatgaactacgtatgtaactattatgaataaacatcaaataacacagcttccacctacataaaagagttgcaaggagaaatacagagaaacacactaataataaaagactgatacatcagagactctcagtataagacagggcaaatagacaaaaaaaattaattaggtaaatcttttggctatatactgaatgtcataccctggaaatagggaattatactatttttcagtgcatatgaaacttacaaaaattgatcacagaacagggcacaaggaaaccatcagtaggtttcagaaagtagaactgttaaaatgtaataaaactggagattaaagatgaaatttttaaaaatccaaaaaggtgtctgctatggttgaatgtttgtcccctccaaaacgcatgttgaaacttaatccccaatgtggcagtactggtgtggggtccttttaagaggtattaggtcatgagggctttgccttctaggttcatggcttataggttaagggtggggtgatgctgattaacaaacagaagcggctttgaaatgggtaataggtagaagacagaagaattcagaggagcaggctagaaaatgcctgcatttccgtgaatgaagcattaagggagattttggtgagggcttagaagacaaggccagggaaagtttggaatgccttagagattgagttaagtagctctgaccagaatgctaataaaaataggaacagtattctgatgtggtctcagataaaactgaggaacaaggtatcggatcctggaggaaaggccatcctggttataaactggcaaagaacttgtctgaactgtgtctatgactaagggtttctttttttttttttttgagatggagtctcactctgttacccaggctggagtgcagtgacacgatctcggctcactgcaagctccgcctcccagtttcacgccattctcctgcctcagcctccggagtagctgggactacaagcgcccgccaccacgcctggctaattttttgtatttttagtagagacagggtttcaccgtgttagccaggatggtctcgatctcctgacctcgtgatccacctgcctcagcctctcaaagtgctgggattacaggcgtgagccaccatggccagccaacttgacagggtttcctgaaagcctaaacttgagagtaatgaattagggtatctggcagaaaaaaatttctaaacaaattatagaagtagctgcatggttacttttgaccatttatgctgagatttgcaagcaaagaagtaatttaaagacaaatgaataattaaaggggaagcagagtggccagatgcagtggctcacacctataatgccagcattttgggaagccaacttgggcagatcgcttgagcccaggagttggagatcagcctgggctgcacggcgaaccccatttttatacaaaataccacaaatataaaaattaactggatgtggtgatgcaaacctgtggtcacagctacttgggaggctgaagtaggaggactgcttgagcccaggaggttgaggctgcactgagctataattgcaccactgcaatccagcctgggcaagagagtgagaacccatctccaaaaaacaaaacaaacaaacaaacaaccaaaaagaaaggaagcagagcaaaaaaatttggaaaactcagcctggccaagagtgaaaaggtgtgttcaaaggaggaaaccgagggttagccaggaaccatttgctaaatagattagcacagctacaagggagccaggtgttacttctaaagacaatgaaagaaagaacccgaaggcatttaagagatcttcaaggctgcccctccctttacaggcccaaaggagggtagaatggtttcatggaacaggcctgggatactctccaatgctggctgcccagggccaccctagactgtgctccctacatcccagccaaggtcaagtgaccctaggtgtggcttataccacatctctacaaggtataagttgtaaatgttagcagtatgatactaattctgcaagcttgcataaaggaagagctgtagaggctttccagcctccacttggcctcaaagattgtcctcagaagcctgggagccagggaacagacttgtctcaagggcagagccacagtggaactgtggggttagtggtagctgagaatctccaccaaggtaaagcctagtagagcccaggaagtaaggccaccacagagagtccccactagggtaatgcctaactagtggagccatgaaagcaggaccactacctgggcctcagaactgtggagtcaccagcagcatgcaaggtacaccttggaaagcttcaggcactggactccaacccatgccagtagccatatgggctgtaccctgcaaagccacaggggcagggctgccagaggcctttacccagccctcaacccccagtgtctccatgaggtggtacatgcagtcaaaagtgattattcttgagctttaagatttcatgtctgccctgctggaattctggacttgcctagcgcctgttctttctttttgcctaattttccgttttggaatgggaatgcctgtcttatgcctgtgtcactattgtatctttgaagcagatagcttgttttgatttcacaggctcacaaatgagactgtggactttaaacttttaagttcatgatagaacaagtgaagactttgggaccctggggatggaatgagtgtatttgtatggaaaaagacaaatctggggagtgtcaggggtggaatgctgtggtttgaatgtttgttccctccaaaactcatatggaaacttaatctccaatctagcagtactgaaaggtggggtctctaagagggctatgccctcatgaatggattaatccactcatgggttaatagattaatgagtcatcataggactaggactggtggctttataaagagaagaacagagacctgagctagcatgctcagccccaccatgtcacattctgtgctgcctcaggactctacaaagaatccagcaagaaggccctcatcagatgcagctcctcagccttgggcttctgagcctctataactgaaagaaataaattccttttctttatacatacacattaccaagtttcaggtattataagcaacagaaaatggactaagacagactctccttgtgaaaatttaagaatataactctcagtaaaagaggaaatacaagcaaattacagaatttatgaaaaaaataatgaaaacagtaagtatcagtatttatgggatacaatgaaaacaatgatcagatgaaattcatagcctaaatatctacatcaataaacataaaggaattataataaattttctaatcaaaaaggaaaaaaaaggaaacaaaccaaaagaaagcacgaagatgaaaataatagtgcagaaaagaaaaaaccagcttaaattaaaatcctggttctttgagaaaaaagaacaagaaaaaaagcacaaatagacaaaataagtgacaaggtggaaataaccactgatatagagaagccagaaattaattataagagtctatcttacagacttctatgcaaataatttgaaaacttaaaggaagtaatttcataggctgtggaaatgttccagatcaaagaaggctaaggagacatgacacctaaaaataatgctgactctagactgaatcctactttattggaaggcaaatgctataaaggacattagcagattaactgacaaaactgaatatggatgacaaattagataaaaagtgtatttatgaaatcagtggtttcatggttatggaacagaatctccctattctttagaaaccatgatgtatataatttactctaaaatggtacaggaaaaaaaaaaggtgtgtgcacacacacacgtatacaaagagagagatagaataatggtaaagagcttacccatgaacaggaatgcaaaaaagcttttccatattagaaagaaccattctcacagtctctggtgttctggaagagcccaactcagtcaccaagagagatttggtaatatctaaaaagaaagtgttaggtttcaatatttagacttctagaaaatacctgacacttgtaattcagaagagggcatttgtatccctcttccttgttttatcgtgtttctttataagcatttaaataataaaatactgataaattaattatccctatgtgatcctttttataagcatcagagtccagctgcttaggcccttcctgaaaaagtacataatgtaaccaatttgcctgcatacataatacttagtgggaaacagcaaatgtcttaaatatttaaaaaggagagactaaattcaataagggatttatgtatagatttggaagaaaacaaattacagtaaaattacagtaaaagtaaaaattttacttttacaacaaaagtaaaattctctgacatccatttacaaggctgacaggttatccaaggttttccatttgaagctcaggacacacccaacaccctagatctcacctcctcccaccaatggagatgtatgttcaccagctgtgtttgatctgagcatttctgtaactgttgtactacatttaatagttacgtaatttagggctgggcatggtggctcacacctgtaatcccagcactttgggaggcggaggcaggcagatcacgaggtcaggagttcgagaccagcctggccaacatggtgaaaccccatctctactaaaaatacaaaaaattagttgggcatggtggtgcgcacctgtaatcccagctactccggaggctgaggcaggagaatagcttaaacccgggaggcggaggttgcagtgatccgagatcacgccactgcactccagcctgggcaacagagcaagactctgtctcgggaggaaaaaaaataaaagttacataatttaatactttgtaaagtgaagaatgactatgcaaaggaaaagagttgtttctatcaaagctaccatattccttcggtccaagatttgtattttctcacatgatgacatctagaaaaataagaatgcatcctccatttcatggggtcttagattttaatgaaaaggaaatagcctaaaaatctgctcttaaattaagtgtttgagggaaaaaggtataaaagtctagaaagattctaaactcaaattgttttgcaagtacctctaagttcttgctgcactgaaaagaatttcaatgtgcaaactgtggaaaatgtttggtgtggtttatggaagaacagtaactcaaaacctcaataagctgtgagaaagaaaaagaaaagttttaatctgcagaatgccagtacctttaaattatcaagcctgaagaggcatttaaaatataccagcagacagtctcactcccctggagttaaataattgccacttgaagccgcttgctacagggggctctagactcactgatgccaagcagccataaaatgccatgcaccctataattcaacagtgtatagccaatcactaagcaatgttatttctgtaaacaaatgagaattcctgagtacaacttttctcatcatcccctctcccagtgtgtccctttttctttaaaaacctgagcctctgctaagttctctggagcactctccaaggtaatctagaagtgtgtcctgggctgcagtcctcaactttggcccaaataaactctctacattaattttgcctgcacttccttttttgaggccaacagatgtaatagagaagaaagaacttaaattgccattcagcttataaaatatatatgtctcattttcagtgattcccagctttaacgggctttttttccacccatttactttgtagtaattggtcctggggcatcagatcagaggaattctataaagaattttagaagcagtagataaaacataaaccatgaattccacaaggacagtgtgaaaggaaaataaatctgaggacccaaaaaacactaagccaagggaaaagtcaagctgggaactatgtcaggcaaacctgcctcccatttaattcctaaataagacacctacaaagacaaaagagctacatacctcccttacaatttgcccacaaggaaattccttgtggacctcaagatctttaccctaaaacagttctggctgaattttgccctggcaatgtagactgatagcttatcttcacaggtgtgggagagaaagtcatccctctgctcgcctgagacaaattcatatctgattgcttcatctgccctattgtttatgtaaaaatgcagattcactgagccagactcaattgtgtatttaaaggctgattacggacttaaaagaatataatcatttgtcttttatctacctataacctgaacaccgcccccttccccacttctagttgtcctgcctttatgtacatcttacacatattgatgtttcacgactccctaaaatgtataaaaggaagccgtaccccaaccacctcgggcacatgtcgtcaggacctcctgaggctgtgtcaccttaactccttaacttcggcaaaataaacttctaaactgattgagacctgtctcagatattttgggttcacaataggaagccagtcttaatcatcttcctatctctatcacaaaatacaatgctgagcctgaagtgtttgctcaattacatttctttccctacttccattccacattcaaagctgaagtcaaaaagaataaagagataataaacacaatttatgaatcagttaacacctggagaattccataggtgaatattaaaaaacaataaaatattgagcacacaatatgaatagcatcaaaaattggaattaatcctaccttcttgttgtgaaacttgtagtttttgaccattacaaaaggcaccttttccttttctggcagtgtacatcttgccttccacacaactgtacacaactccaaattctatctgcagaggaaaacaagtttcctttaccaaacctaagtatgtttcatccacttttttctaagaaaataacaagacaatctggtatactgactagtaacaatggactgaaatggctaaactgtgggatacttaaaatgttaatttccagactaatcaagagaaagaggtcaccagaactgatatccttgactctcctcccatccaagtccagatctaagaacacccaccttacttctcttcctcctgcttcggaagacagggctttcctattttctaagtgaacgcttctccggtgttaggactcctaccctcacatacattctctgaaaaactgctccatcagctgattccctagtctcttggatttttcttcttataccttctcattaagtttctctcctccttacaaaacctttgaaatgttattctatccttttcccttcactgccaatgagtaactttgcatctcctattctcctcttaatacattacaatgtggcttctgccctgatcactcattcttctgaaagtcccacaaagagagtatcaacaaactttctttgttgcctcaaatgccttgtctgaagaattggagtctactggctcaagacttattcaatacttaattcactacctccatgctcccaccattattctcttagttctacctcacctactaattcgtttcagttatgattttagaacattcttttctgcctcaccctgaaaagttaggcacctcaggcttttttcttccttctcccattgcttccatttcccttttagctctccatattcacacaggttggttttttacagtccacaaattcattttggctcccatcaacctcataatcgggggaagaacctacggttccaaacctagtcttgcagaatttcaaagacaaaatcattcattgcctgatcacctcccattccttccccataaatctccttcaaatttaatctcaaaaacactttccaattttggcatttccttggctattctcactgcctctacttagttcacccacaccccagtataatctctacattgctagaattatctgtcactttccacttcaaaacctctactggttcccaactaccttgaaacacaaactaaattttcttgcatggactggccacagtgcctcacagcaaggccaaactaacctttgtcctggccacttgcagtgcttccctctccatgaacatctcaccattccccacacgtataatggtcttcaatttctccaagctgttctttctgattaaaacgccttcctcttcccaccacccccccacccccgccaatctggaaacccctagttttctaagggccaacacatgatcaacttctaagacccctgctgttatgaagattttcccaacccactctcagcagaactggtgacatcctgtgttcccatagtattttttttcatggttctaccacatatcatctttacctgttcacacatctaactttgtgctgagctgttgagttcagtggcagggccagcatacagcccagagctgattatatactgaaagctcatgtagcttcttctggacattctcattaattaatacaaccctggggctaagctgtcatttgtccaatatgtgttttatattcagaaatgttataactgctgttatacatgttgatcttacatatcaaaagttccttgaagataggtaggtaaaatgttagtaaccatcctttactgtttgaccaactaaggagccaaacagcaaggaaatgctatagctatatgttttattctgctaggctttagatgtaagtatttacacataagacaacctgaactatgtgtaggttcctaaagagagtctgtattttccaaccatgctttggcccctgctacttgctggtttctaaatgtatttcttcactaacacctactaaagcattcccagctcaaatctcacctcttccacgaagcatttaagatcacatataaacttctatcccatctgactctatcacacatataatggttactaaatactgagttgtatttcagttacttgtgtgtattttcttcttacaactcctgcttctcagaatacataaaattttatccaatgcaaatgtatcatgaaaattttaacagtcctgtagcttatattcaaaataatgcagttatataatcaaatatacagacaaacctgaatttattatgaaaacacatttactttttctcagaaaatgagagcaaggcatataatcaactatacgtttaaaaaatcatacctttttatttacagcaaagccaattgaaacagctacaaaaggaaatctttttttaaaaaaaaggacaaaatacaaattaaccaacatagaacttttgttaataaaattaatcttttcataatataagtgttcttaaaatttttcctataaaaagtctcatctccactccccacaaaatctaagatgcaaaacagtttgtatggtatacaaccctttgtaaataggataaagtggaggtattatacacacacaccctccccccaacacacaggcacacgttcacacaggatgcttctataggcatgaaacatctctgaaaggattcacgagaaacttgtaacagtggtcatctccagagatggatcctgggaaaccagaaatggaagtgtgaagggcattttgcactgcgttttctatcttttgaaggtcaaattctatgaatatagtagctatgtaaaaatattttttcatggccacgcacagcggctcactcctcccagcactaatttagcaggccaaagcaggaagatcacttgggcccaggagttcgagaccagcctggctgggcaacatggcaagatcctgtttctacaaaaaaaaagtcacgaaattatctgagtgtggcggtgcacgcctatagtccaagcttccccggtaggctgaggcagaaggatcccttgagcccagaaggtcaaggctgcagtgagccatagtcatgccactgcatgccagcctgggtgacagagatgctgtccccctttaaaaaaaaagccaaaatgtaaaaacttttaaatcaatttggttaaaaaagaaaactgtaaaaacttttaaatcgatttggttaaaaagcatatattttagtgattttttttttttttggagacgaagttaagctcttgttgcccaggctggagtgcaatggcacgatctcagcccactgcaacctccacttcccgggttcaagtgattctcctgcctcagcctcccaagtagctgggattacaagcatgtgccaccatacccggctaattttgtattttacgtagagacggggtttctccatgttggtcaggctagtctcgaactcccgacctcaggttatccacccaccttggcctcccaaagtgctgggattacaggcatgagccaccgcgcctggcctgtgatgtttttttcctatgtcctacaccgtgataaacacaaatactgcactggacaaaataaatggctgttacttgtctctactccaacagcaaactttaggcttggcctctgaaaagtagactttgagccaaaatttttccatagctgcatgacagtctgaacacaggttgtaactgctgactcacaagagaattaagatcaaggaaatagacaagatcaacattcaactattgaagctaaagctgttgaaaataaaaacttttaaatatgtaagaaagtttttattttaacaaaaataagatactatacacactgtattgtactgtcttctcttctgtgaaaatatattagcatctttccacatttaaaagatataacattctatcacatatagattctaaaccttagctttgtagatttcaaggattgtatatatagtacagatgtgtacaactacatgggaacttcaaatatgacatctatatgtaatcccaccagaagcggctactgattttaactctcatgggcaattccaccaggctttcttctagtaatatcatatacctactctgtgtcggcactatactaagttcttacattaatgtactactcatagagttgagttacaattctacgaggcaagtgctattaatacggcctttttataaatgttttttaacattgtggcctagaaaagttaactaacttgcctaaggtgaaaaagccgtaaaaaaataccagaatgcacgtctattcatcctaacacccatgcaatttttttttttttgccggccccagccccagccccatccccatccccgtcaccctaagggctgaggagaggggcctcctctgcactttttaaccgtgttttttctcctggactgaactcattctatatcgacagcactccccaagagtgacttcattagttttactaaaatacaatctttttaacatagtcagtttataattttttaaatttatttttattctttgaaaacatatctttggccaggtgcagtggttcacgcctgtaatcccagcactttgggaggctgaggcaggaggatcacctgaggtcaggagttcaagaccagcctggccaacatggtgaaaccccgcctctactaaaaatacaaaaattagtcgggtgtggtggcaggtgcctgtaatcccacctacttggcaggctgaggcagaagaatcgcttgaacccgggaggtgggggttgcagtgagccaagactgcgccattgcatctcagcctggccaacaagagggaaactccatcttaaaaaaaaaaaaccatatttttacatagttactactaatagatgcatattagtagatccatatagatctatggtacatgccactcaaagaatagaaaatggcatgcagtgcaaagtgcccttcccactctcaaagcagcaatgttgtttgcttccctttttagatagtgccaacagtgggaaaaagaatggtgaacggggcacttggcaccacaggacaagatcacattagtatttctttacctcctccatatctgataagtctgcataatacattttgctccacttttacattttatatatactttattagaataaagaagcataaacgaagtatacaattttctaaagtgtacatgttcctaaatagagtatctataggtcaatccagttaatatgcaaagagtaattatattagacattttaaaacatacctatgtacaaagttagttgttccatcaatagggtcaatgatccatgtggggttgtcggttaagatacttttttccccagctgccacagattcttcaccaatgaaactaaaagccaagtaggacaaactcttaatctttacactgatttcaacaatttccaaatcataacatttccttagctacacagagtactataaaacatagcaggcgaggtgtggaggttcacgcctgtaatcccagcactttgggaggccagggagggcggatcacctgagtcaggagttcaagaccagcctggccaatgtggtgaaaccccatctctattaaaaatacaaaaattagccgggcatggtggcaggcgcctgtaatcccagcaacttggaaggctgaggcaggagaatggctttagcctggtaggcggaggttgcagtgagccgagatcgtgccactgcactccagcctgggtaactgagagagactctgtctcaggaaaaaaaaaaaaaaaatagcaaaagtctgtaccctacacttttctattgttgcttcttcttccttcaggtaaagactgataaatgtaaggaagctttaatttatttccccatgaataaagcgatgtgaaaaatttcaaaattcaaattataagatgttatactagggtaaggtgtgtgcacacacacatttgcggcagataagaaatcattaaggaaatgtaatgattttaaaaataggggccaggtgtggtggctcaggtctgtaatcctaacactttgggaggctgaggcgggcggaccatgaggtcaggagttcaacaccagcctgaccaacatggtgaaaccccgtctctattaaaaatacaaaaataagccaggcgtggtggcatgcacctgtaatcccagctactcaggaggctgaggcaggagaatcacttgaacctgggaggtggaggttgcagtgaggtgagatcatgccactgcactccagcctgcctgacagagcgtgtctccgtctaaaaaaaaaaaaaaaaaggtcactctctaatactctccgtccttcaagaggtggagcctaatattccttccttgagcgtgagctatgcagatacttgtttctaaccaataaagcgtaagtgacagtatacaaaactttggagactagttcacaaaatgcccctctaatttgcatctggttcactctgtttctcccttcctgtgccacctgctctggactaggagatgtcagcttccatgtcgtgagctactctgtgaagaggctacatggtaaggaactgagagaagctaccagcagacaactcccccaggaactgacatctgccaacaatcacgtgagtgaatggatccttcagttccagtccaaccttcagttgactgcagccttgaccaacactttgactgtaacttcatggaagaccttggcaagaaccgtgtagtcaagctactctcatatgcagaaccccaagaaatggtgagataataaacatttcttgtacacagtaaataaaaatacctgtgagatggatacttttcctttatggaagagataagcattttttcaactttttggtccgtagcagttaccaaatcaactggagaacttttcagcataacattcatttcattttttatagcttcacaaactacctaaaaagaggttttggtaagcaaatagaaaaggcataattttaaacaaaaagataaaatacataaatggtttaagacattcaatctgtcttaaataatattctttaaagacattcttaaaaatgtcttacaaatatatctataaaataagcctttaatagttacgtctttctaaaaacaaaaattatataatcttacatcttattttagattcacaactgtcatcacagaaaattttatcatataaaattagggtatacacgcaagagtatttagtaaaatgaaaataaatgtagattgatcaaagtgtatattttatttaacaaggcaggctgggtatggtggttcacgcacgtaatcccagcactttgggaggccaaggtggtccaggaattcaagaccagcctggacaacacagcgagaccctcatctccacacaaaaatttaaaaaatgaaaagtagctggacatggtggctcatgcctgctgtagtcccagctactcaggaggctgaagtgggaggattacttgagcccagcctgggaagttgaggctggagtgagccatgttcctgccactacattccagcttgggtgacaagcaagaccgtttcaaaaaaagaaaccaaatcgaaacaaacaaaacaaggcaacaacacagtatacccaccaatcacattataattgattataattgacaaaatcttagctcatacctctccagcttgtcttgctagagttactgcataatccatgcattcctgccaaggatcagccatcttctgaaaatatttgacaaatatctgtacaaagtagttataactgtcttagaagtcttaattatagaatagttagttcacaaaaacgtcttaattagaaacagactgtcatttcaggattcaccccctgccctagagtttttcccaagatttatgcctatacccagtaaaaaacatttctcacctaaattacctaatttctatatcaaattattttcataaagactattctatgaaattgcttcccagtgtgtctgtaccatattacatttttttaaaaaaccaaaacattcgtttggagaatagataagaaacaacacaagaaatactttaaaagttaggataatattttggaggagaatacagtgaaaacgagaaagaacactgggaatactgaaataaaagaagcttgaagggaagcagcaaaaggtacttgaaaaaattatgtgtaaagatgaagaacttaaggttcagagatgagaaataatttgcccaaaattacagacaaatgacacagaacttgaattcaattctgattttaaagtccatttttctttctattataacattctgagaaaagaaaattccaggaccaaaaaaaataagaaaaaagcaaatttatttccctgagtttcacagagggaaaaaaaaacccaacatatatttgtgttctaaactgtccagttttccactgacttctgaagactaaaataactcaccactggcttgatcacactctgaagtctgtacctagcacagtaaagctttttaagctgtcagactaaaaactgtggcaccatttataaaacaaccctaattttgtctcctttccaatagaaaataatagacacagagttacatcttgaagactattcagaaactcctatcttggggcccacattataggaaagaggacaggagtggaaaggagggcaaaagacccacacgctaaatttcttcctgatgctttttcttcctgattaaagcattttttaaaattttgttttaaaggaagccactctatgagtcatataagcaactccttcaagctcttcaagaattgtttccaaacttttttttttcactcttactcccattctgctccactagtcttaacagaactagatgttctcaagctgtacctgctttcctgccagaaacagctcaagccactcacacccccgccttctaacagcactaatgtaactctacaaattcttcaggacccatttcaaaagctacttctagggattctccacccagaagtcactatgtccttcatccttcaatagatgtttactgaatacctattgtatgctatacactgcaccatggggaggaaaatcaggtcctgttcacactttctaggaggggactcaatatcaatcaaaaactaaagactacatgcaaaataacaactggaataatataagttaaggagaagaagtgcaatgagaagcatctaacaggggagctttcacctggacttaggcatcagatcaggtttccctgaagacaagattaaaccaagatgagaacaagtgaacaggcatgaactcaatcaactgcaggatgcctggtacatgaagactaactgaacagcctaagagtgacagctcagattaagggaaacaggagagataaagctggggaggtagtggggatcatcctctacaggggggccttagggataagacattgattgaaggggcttcaagaatcacttcattgtggctactcaacagaagggtagaaagtgggtgttggtagagggtcagcagatttacattcaggatgcagtagtgggaggatacctgatgattggctgaaacctgggagggaagttttgctggtagagaagttaagagagtcagagatacctgttttgagggaatctaacagattggctacagagtaccagggacaggaagagttcagatttcctctgaatctggatgtccagatttcccactctggcaactgtatggataaccgtcacagtctactgaaacagggagcaacaaaaaaagagtcaagtttgggatataggtaggagtttgagagatcaggagtttaattagcggaagatgagaggcctctgtaaaatcaaaagatgtcagttaggcagctgaatcatggatcctgagctcacaggagaggtatggcctccatgtagaaacatgtaagttacttgagtagacagcaactgaggtcctgagtctggataatcactggataggcatgattgacaactgtgtagaaatgtgatcccacaaaatcagtatgatccaaatggaacagactgactgtggaaacccagcaaggactgtccattcggattcatcttggcctctctgtccagcattcctttctcctgtatatggggcaagaccccttgtgaaatggaggtcttacgatctacagtcagacaaggtaggtcagagaatttcttcatggctagttctaagacagaaaggtgggccaagattcctgtcaagggctatgggagttatgagccaggaatggtggatgcaaactatatatatatatatatacacacacacacacatacacacatacacacacacacacacatacacacacatacacatatataatacagtaaatatactttatatactatatatttagatactatatatagtatatataccatacataagtatatttagatactatatatagtataccatacataagtatatttagatactatatatagtatatataccatacataagtatatttagatactatatatagtatatataccatacataagtatatttagatactatatatagtatatataccatacatatttagatactatatatagtatactatacataagtatatttagatactatatatagtatactacacacagtatctttagatactacagtatactacacataagtatctttagatactatgtgtagtatatatactacacataagtatctttagatactaatgtgtagtatatatactacacataagtatctttagatatatatatctagtatatatatactacacataagtatatatactacacataagtatatatactacacataagtatatttagatactatgtggagtataaatactacacataagtatatttagatactatgtggagtatatatactacacataagtatatttagatactatgtggagtatatatactacacataagtatatttagatactatgtggagtatatatactatacatagtatctatgtgtagtatatatactatacataagtatatttagatactatgtatagtatatatactatacataagtatatttagatactatgtatagtatatatactatacataagtatatttagatactatgtatagtatatatactatacataagtatatttagatactatatatactatacgtaagtatatttagatactatatatagtatatatactatacataagtatatttagatatatatactataaataagtatatttagatactatatatagtatacattaagtatatttagatactatatatagtatatatactatacataagtatatttagatactatatatactatacataagtatatttagatactatatatactatacataagtatatttagatactatatatactatacataagtatagatactatatatagtatatatagtatatatactatacatagtatatttatgtactatacatatagtatatttatatactatatgtaagtatatatgtaagtatatttatgtactatatataagtatatatacctaagtatatttaggtactatatataagtatgtatacctaagtatatttctgtactatatataagtatatatacctaagtatatttctgtactatatataagtatatatacgtaagtatatttctgtactatatataagtatatatacgtaagtatatttatgtactatatataagtatacagaagtatatttatgtactatatataagtatatatactatacataagtatatttatgtactatatataaagtatataagtacattttatatatatttttatatatagttatatataatatatgaatagttatatatatataaatcacagtacatttattgatgggcagggtccgtagtttactcactttcattttcccaaagccataaacacctgaactgtttcctgctgtttctgtcctggtcacagccttccagcgtaggagccaggccaccttcctttttgccacctgtcccagcaccgcgactgcgggcagcacaggacctgggcgctgccccatcacttagagtgactacctgggcctggggatgcaccaagtttctaggagcttttcggagttggggacataaaaaggggcaattattccacagaagccgccacagaggttaagtgaggtcgcgtgagcgaaccgctactccaatgccggaactgttcccggtcgcccagggcagctccggataacgcagcaggcaggggtcacccagaggctgcctccaccctaggcgccgaccgcgcacggcgctcgcgcccgctcctgaggagggaaggggcctccctggaaacccacagcgcccgctgaacccggagggtgcggtgaggaaaataacggtctcaccttgagtcggaggacgtccggctagctctgtgaacggtgttaccgcactcgtctcttccggaggtagaggggctactcgcaacaggaagttccgcccttaaaaactccattcctgagggggcgtggttgctttgctgggccccgccccgagctgcgccctgcgagcctctgccaggccgggccgggtcctgacccgcgctggagcatgggatactgcctcttcattctagcttctggttcttttctcctgcttgtcttttcatctctcagtttttaaacattacttctctctttactttgcctttttcttctttcgtcctccattcattcacggtttcccatttagcttgctttcttctttctcccatttattctatagtactattttgacaaaacccagattgcagatatgattccgattatgcagcttttaggtgctaacctaaagctggtaaacctatactagattaaaaaaaaataaactgataaccagaaccaactgcccaattcttgataatttacttacatactatttattgaggacttactatgcttcaagcaattgtgtggggttttattgttttgtttttttgagacggaatttcacttttgtcgcccgggctgaagtgcaatggcgcgatctcggctcactgcaacgtccgcctcttggattcaagcgattctcatgcctcagcctcctgagtagctgggattacagacgcctgccacaacgcccggctaatttttgtatcttgtagagacggggtttcaccatgttgctcaggctggtctcaaactcctggactcaagtgatccgcctacctcggcctcccaaagattacaggcatgagccaccacgcctggccgaaatgtgtttttatatgcattattttccttaaagttttaacagtttcttgaaaaaggtatgattagctttgtcagacagatgaggaaactgaggctcagagtagttaagtgatttgtcctcaggtcacacagcaagagcagagagtgaaacacactgagttcaaagttttggggttcagaaaatgataccccacaatgaaggcctcagaagcagccttagaaggaaaaattttcctctgactccttttggtctcctgtctctggtcccacattcttccccagactagtcatagaagctagaattcctctttcccaaatcaggtcccagaaatcaggaccccttttttataaagccagccataaaacataaaaatactactctaggccaggcaaggtggctcacgcctgtaatcccaccactttgggaggccaaggcaggcggatcacgaggtcaggagatcgagaccgtcctggctaacacggtgaagccccgtttctattaaaaacacaaaaaaattagccgggtgtggtggctggcacctgcagtcccagctactcgggaggctgaggcaggagaatggcatgaacctgggaggtggagcttccagtgagtggagatcgcgccactgcactccagcctgggcgacagagggagcctccgtctcaaaaaaaaaatatatatatatagagagagagatatagatagatagatagatagatagatagatagatagatagatagatagatagatattactctagcattctccctgtgtttctatgtaaaatctgaccacgaagaaattatatgactcaccctgtctgagtttaggtcataagacccccattccaaagagggtcctatggagagaggccaagaagaatctaagcagacaggtcttactggatttccccagtctaatagcattaggttataccctctttgtccaaccatattctacacagctgtccatatgctgttgaaactaagcataaaatggactgtccccttatacctttgggtcttcattctgaaggctcccaagtcacataaaactatgatcaaataaaatccttttcttctatttatctgccttttgtcagttgattttcaccaaaccttcagaggacaaaagggaagttttttctttggccctacaaaagtttacacactgagaatatatggcacaatgagatcacattatatgaggtacaaggactagttatggtcttaaaatgtttcttcttcttgaaagagttggccaggtgcagtggctcatgcctgtaatcccatcactttgggaggccaaggcaggcagatcacctgaggtcagaagttcaagaccagcctggtcaacatggtgaaactctgtctctactaaaaatacaaaaattagccaggcatggtggtgggtgcctgtaatcccagctacgagggaggctgaggcaggagaatcgtttgaaccccggaggtggaggttgaagtgagccgagatagcgccattgcactccagcctgggtaacaaaagtgaaactccatctcaaaaaagaaagaaagaaagaaagaaagaaagagcgacatcgtggtacatacaccatcatagtgcaaaaagcattgcacagatataagatgtcctagctacaactggaccaggaaagtaagttagttatttggctctttgcttaggaagttactgtttctgtttgtttaatcaaaagacaaaatgtcaccaatatatttcaaatgaaatgtcttagagatgagtaatttggactggactcaattctcacacctcacaaggaccaataaacatctttaatccaaaaagagtgatgccttaggtatccggtttggatgtctatcaaatgatactttattttcttagaaaaaaaaaaaaggcttctgaggctagtttttcggttcttcattgccaatcttcttaaaataaaaatattgccaaccgcatgctgacaagtgctcattcgtaaccaactaatatttccaaagttttaacagaaaagtcatcggtcatctaagtttatgtaaatgaatgtggtttcagtgacttgaaaaaactgctaaaatcagcataaacaatttgaagtaaaataaactaaatatcaaatatcccttcaaatgaaaaccttacaagcttcctatgtcaggtgagcaggaagtccagtttttccaagaggcctcacctcaacagctacttcacattggttctcaggtaactcactcagtatttttcagtccaaagaggccgttctgcttccaaatgccttaccgaaagtgaagtgaaaatctgccggtgcacagggaagtcttagtgttcaggctcgattatagtggggctggaaactggtctcacaaatccaaaggatcttttctctgatgctgtgaaggtagttcacatggctgcagagacctcagtacaggatgcatggcccttgagttcccaaaggggcattttttaaaactacagtcccatctgcagccattgttcccaaacctaagaatatctgctgtgcccaggtggttgtcgggggcaggggacagcagcacaaactctgcttcctggcatgatgtccagctcctcactcttccaaccttccctaaggggagttccctcttggaggcctttggtatcctttcctgtcagctgactcccatctatgagagaggttgtaattacgctgaacctcagaatgaaagagaggtgagatccaatgcccctgacacctccccagacagctgagtgtacacaagagagttctagggaagggtggccctgtgaagccacaaagtggtctggtcatccttcccagtgggcaataggtgcttccttgttctgtatttgtacaataaagaggggccataggaattccttccccagaaattgtgggcatcttgccaactacacttagtctttggagatgacttctttttaaataaccactctcttcactaaaaaataattcaggttccacatgcgaagacgttcttggttataataattatttaagtggactttgatttaaatgatcaaatataaatacaccatggcagctgttcaggggtggagtgtccaaggatatctaataagatctcatgtttgatataacagattggagttgcatatattggttaagactttgacatacccttataaggccaacagctttccaagatataaaaatatatatcataaaattgttattcttggaagagtgtatcatagaatcatctcttaagagctggaaagaaacttttttaaaaattggcataaccattctatctctggatcgttattctatcttatagaatcgtggctgtggaaaatagttggtatgaactcaactgattagtcagtctgctttatgcctctcattcttatttttttaaaaaggaataacttgggtcaccccatccctatccatatttttggacaagttttactatgtaaaatctgtcctccttgatacatctattaaagaaataaaatatactccaaattccatccatgcccttgcaactgctttataagatcatttaaatatgcataatgtaacaaaaataataatagggcttaccatgtgtcaggcattcttatgaggaccttgctcatattaattcacttaatcctcacaataataccacgaggtaggtactaccattatcgccattttcagcatgaatttgggcatagagaaatcaagtaacttgaccaaaatgttccccagctggtaagatgatggagctagaagtgcagcccaagaggtcaggagttcaagaccagcctggccaacatggcgaaaccagatacaaaaatacaaaaatctctacccaaaatacaaaaattagctgggcattgtggcagtcacctgtaatcccagctactcaggaggctgaggcaggagaattgcttgaacctggaaggcagaagttgcagtgagtggagatcatgccactgtactccagcctgggtaacagagtgagcctccgtccccccgcccaaaaaaaaaaaagaaaaaaaaaaaaaacaagtcagccaggcacggtggctcaggcctgtaatcccagcactttgggaggccgaggtgggcggatcacctgaggttgggcgtttgagaccagcctgaccaacatggagaaaccccatctctactaaaaatacaaaattagccgggtatggtggcgcatgcctgttgtcccagctactcaggagactgaggcaggaatcgcttgaacctgggaggtggaggttgtggtgagccaagatcgcaccattgcactccagcctgggcaacaagagcaaaactctgtctcagaaaaacaaaacaaaacaaacaaacaaacaaaaaacccaaaacattatgtaagttaaatttgtacaaatgtaattctattttaaacctatagtggatatttcagtttaaaggagtaaaatattctacatacacaattatcactttataaaccaaataaacatctatcatgtctatttggtttatatcagattttatacaaattttggtagtcatatactggatttggtggcatttaaagaaaaaagaaccttggttatcttatcaactggcaaagtaaacaaaaattctctaattctatgatcaagatggtgaatagtactgatagaaaatgttgaaagttttaggctccatacatagttatacgattgctatttcaaactagcagcagatctaccagggttgaaagttaaaactgataaaacaatagcacttactatgtcccaggcactcttccaagcacattacatgtatactctcacttaattcctaggacaatctatggagttgacaccattagcttcatttgttaaatgagaaaactggactataagaagatcaaagaatttgccataaggctaggaaatagggaaagcaggattatttagagtgatatttcctattctcgatcccacactttcttgcacaagatcgtagacttgccctagataataaaaattttcactgaagattaaaaggaggtttttgaaaagcacactatttatttggacactagtctgtgcttcaacacattatttgaataagcacacagaagatactgtgttagatgtgatagggaatatcaaaatgaataaacatagttattatgctcaaagacttagagcaaaataggaaaattaaaacaggacacaaatagtcataaaacaagccaggttagctggaatgaacaatactcataacatactaagtcattctgtttgggtaaaagactatgtgtaacgaggtgagagaggagatataatgaaactgggaaactggctgggcgtggtggctcaagcctgtaatcctagcactctgggaggctgaggcacatgaatcacaaggtcaggagttcaagaccaacctggccaagatggtgaaaccccgtttctactaaaaacacaaaaattagctgggagtggtggcaggcgcctgtaatcccagctactggtgaggctgaggcaggagaatcacttgaacctgggaggcggaggttgcagtgagccgagatcacaccactgcactccagactgtgtgacaaagtgagactccttctcaaaaaaaaaaaaaaaataataataataaataaaactgggaagctaggttaaggtcagacagtagagtataataaatgcctcattaagaaatacaaattcatttaaaaagcaaaaagtcttcattgctgggaaattatatggtcaatgttagattttaggaaaattaatctgacagtgagtagagggtggagagacaggccagaagccaatttagaaaggtttagggaagaagcaatatagtgcagaaaaaagtgatagcactgagaattgagaagagcactggcaattgaattacaggctgtttctgtaggaaatacattcactataaagaaagaaagaaagaagacagaagagagatgaggttgaagagctgaccctgtgttgtggggtaaacagtaatgcctttggtgggttaacatggaagacaggagaaagcttagctctgagggcagagatgccacatttactttaaaacatacttattttgatgtgctaatgaaatttacaaattcattcaccgagtgagaatttgtcaaatgtctgctatctgggtgttccttcttttaatacttaggatatatcataatcactaaataagttttctattgctctgtctcatttaggagaccactgaaagtatcatattgacatcatagcctataaaacattctcaaaccaacacagttgcaaagttgtctccttcctctgaacttctgtattatcatctccaccactcattgagtacttagcatatacgaatgtgtgtgtgtgtgtgtgtgtgtgtgtgtatatatatatatgtattctctaccccccaatgtcagatttttaattacattataagtggcttaagagcaggtatcattatagttattcttttactctcccacagtgccctacccagagtaggaattcagtaatgctttaattgttagattaggaaatttcttttccttttatcttgtaagaaaaagatacatcttttcttagccttgtaaactagaatgatcagtaacatttcacatccagaacacatggctactgtaaaaggagccacagaagctaaattggccttggactgtggaaaagacagctgaataacggcaagagctaagaaactatttaacatcccactttcaatagcaacagttttacaaacaggaagaggcagcgtacaaactttagcaaaggagtacccaaacagcaaacccaaagcaggaactaagagacccaacagaatcacctctagattatctgtttttaagaacactaatcccactgtgaaagtcaaataaattcctacgaacattaaaataaaactcagaggtctaattattctctctaagaagcttgctttttcaggtattctatgcttgatgactattccaattgatactggcacaagtatgaaaaggagtgttgacacaattttagaaacaggaatatggaatgtacctgacaaccctaatatcctactgtatatataagaattgacaggcatcatgatcagagccaataatgttgatgtgcaagtcatcaaaatggccaatgtgaaatctccatctagaagcagagcaaagagatagcccccaccccctcctgggcacgtgcaggtcattacaactccaaaagcttgcgcctcaggcaatgccacaatctgagacaaaagaaacccgcaaaatggcatcagaaaaaactgtgtaactgccccaagaattactggcaaaggtctcttccatactgtttgaaacagctgtaattcaatcttacaaccaaatgcacacttattcaatagtattagtggtaaaataagcattaggatatttctatcaatatgcattggtgcctggagtagactgtctttttgtttgagcactttgactttcacattcttgatttcttcaatgagtctttcttgcctaccttcagaatcccagagttgaatagtcacatttgtttctccttcttcatcagtcaccagatttatggtaaagtttgtagcatctgatgagatcttcttggccacattcaccatttgtagtattttaggatcttctattttcacaaagaggtggctggaattaggccgtttattttcgtagcttgaacttacaaggatggtttcttcagtctttgtgaaaaatagtatttcagtcttctctatattcagaaaactgagcgatgacatccttgcttcttctatagtcacaagcaacaaaagtagaacaataaaaagttttctaatcattttgaaagctgaaataaatcatatatgcaaaatcgtttttaaaaaatgaaagaacattcttcatgcaggtgttccagtgacagtctgagggtgagttagataacagttgtttttgtaggatcaaagtccagtaggagggactgctgtacttttaaacaaatatatagccatctaagcagcaacacaaccggtttaacttgtgattaagacaattaaaaagtcatggcatttaacagattcgatttatcacaacagaaatctaatctcttcctcttgatttcctcatttctgcttatgcgaaaaaaaaaagcctcctatttacttgaatttaaagcttagtgtcatcattcgttagttatttcttgctaaaaaaaaaaaaattaaaagcagtcaggatcaagaaatctgtaacagacactgaggaaacctagagttcagtgttaccattttgttcaatcaagtcgaagtcaaatcaatattcactgaatgtctctttgcctagggcatggaattgggagctggccatcccataatgattaagccagatgcagtcgctgctctcctggagcttagtggggtgacccaatatcacaagttagaaaactgcagagcccagacactggccttggcagcatcccttggctgctaatagttttcctgcatctctgaaggatgatttaatctgtcaagcaaaaactgacactgttttttgtatacctaagtaggaaaaaaaattcctgaatggttaccagataacttggggacatagggaaagtaggtagctggtgccacggccaaaggtacaggctggttaagggaccacagctactggacacttggaccctgacacgatggggcaatggaaagacactggcattgattctaatcttttattccttgtttgtaacactactctctgttcacagttaggggcaagggcattcaattgacccaatttggtcatatcccttggttgccaggaatgagaaaaagcatcaggctttttggatttcaacccatagactcacacacttgtatatttcccacacaaggggtgggtgtcctgatgctaagcagcaaaccaaccagccgaccaaccaaccaaccaaacgtttactattaagcctacagatgtagtagtctctgaacacatgaccatttcagcagctctttcatgtaatcatgatgcaatgtgttcaaggtaatgccaatttgtattaagtattttagatcatttgttcctcaaaaatgtgaaacctttttgtcattttaacgagttttataaaagtataccatttatgtcggttaatctttcaaatgcagtagaccttaggtctcataaattttattaatatgtaccacattaagaaaaacaagatccgctgtaccaatggtgaggatagggaatgggactgttcattgatatttcagttaaaatttccctattttaactgacaaaaacaaaacaaaaaacaaaaatgtcataaaacctaagttatctttagttatgtgaccaaatatcttgactcataacttttgttgcctaggtcgaagatgtgagtatatcagtttttctttccccttaggactctttctgcaacccttttagttcttcggtttctccaggccctttcatttgaaaaccgtgaagaacaaagcctgacaaatctaggaaaactttgataatctatcattcatctatataagtgttcttctaaattttcatggaaaatatgtattataaaaaagtgtgtatgaatttcaattttttttttgcaccagaataaactttttgtaacatgtctgaacaggatctagtgagggacactaactatgataagacatttagaaaagagctcttttatcagagaaacataaattctgctaaaattgaaggaagaacacacatcaaatttatggtgaggtttgggtggaagaatggtgaaatcattgatgcttcacataaaggttatggagacaataccccaaggagatctgcagtttacaaatggataactcattttaagagatgagacaatgttgaagatgaagcccgtagcagcagaccattcacagcaatttgtgaagaaaaaaagcacagacaatatctaatatggtttggctgtgtgtccccacccaaatctcatgcagaagtgtaatgacaggaagtgttggaggagggacatggagggagatgattggatcatgtgcatggcttctgatggtttagcaccatcgccctagtgctgtcccatgatagagttctcacaagatctggttgtttgaaagtgtgtagcacctccctcttcacttgctgtctcctgctggccatgtgaagatgtgctttcttccccttctcccatgattttaagtttcctgagcctcccagccatgcttcctgtagagcctgtggaactgagtcaagcttcttttctttatacagtacgcactctcaggtaattcttttttgggaggacagagtttcactcttgtcacccagactggaatgcagtggtgctctctcggttcactgcaagctccgcctcccaggttcaagtgattctcctgcctcagccttgtgagtagcagggattacaggtgtttgtcatcatgcccagcaaatttttgtatttttagtagatatggggtttcaccatgttggccaggtttgtctcgaactcctgatctcaggtgatccacctgtcttggcctcccaaagtgctgggattacaggtgtgagccaccacgcccgacctcatgtagttctttatagcagtgtgagaatggactaatacaatatccaacatcatagatgtctcagttggttcagcttacacaatgctgacagaaaaattaaacttgagcaaactttccacttgatgggtaccgaaactattgcacccagatcagctacagacaagagtacttttgttctcctggtgggttttctacttaaaatttcagttgtctttcaataaaaattttaaacaagtgggatcaagatcctgaaggatttcttccaagaattgtaacaggagatgaaacatggctttaccagaataatcccgaaaacaaagcacaaacagagcaatagctaccaagaggtggaagtggtccagtcaaaataaaagtggactagtcaaaagcaaggtcatggcaactattttttgggatgctcaaagcatttttcttgttgactttctggagagccaaagaacaataacgtctgcttattataaaggtgttatgaggctgggtacagtggcttatgcctgtagtctcagcacttttggtggccaaggcaggaggatccattgaggccaggagttcaagaccagtctgggcaacatagcaagacctatctctacaaaaagaaaaaaaaaatatgagaatgtttagagacagccaaagttttagcagaaaaatgcccaggtaagcttcaccagagattgcttctccactaagacaatgctcctgctcattcctctcataaaacaaggaaaattttgaattttgatggtaaatcattaggcatctaccttaggaggtctaattttgcttcttctgacttcctgtttcctaatctttaaaaaaaaaaaaaaactttaaagggcacccatttttctttagttaagaaacagactgcattaacatgattaaatatccaggaccatcagttattttgcaatggactaagtggctggcgtcattgcttacgaaagtgtcttaaacttgatggagcttatgttgaaaaataaagtttatgttttatatttttatctgttttcttttttgagacagggtctcgctttattgcccaggctggagtatagtggcaagatcatggctcactgcagcctcgacctcctgggctccagtgatcctgctgcctcggcctcccaaagtatcaggattacaggtgtgagccaccacacctgtcctttttttttttttttttgagacgaagtcttgctctgtcacccaggctggggtgcaatggtataatcttggttcactgcaacctccccctcctgggttcatgtgattctcctgtctcagcctcccaggtagctgggattacaggcatgcaccaccatgcctggctagttttttgtatttttagtagagatgggtttcaccatgttggccaggctggtcttgaactcctgacctcaagtgatccacccacctcagtctcccaaagtgctgggattacagccttgagccactgtgcccagccctggcctatttttatctttcagtttttccatgaactttttgaagttccctagcatttgctgcctgattttttaaactagaactcatttttattatattgttatttccattacttatgtaaatttaaaacacttttattctctttgtggatttgctacttgaaatttgtctgcaagcaggtggaaagatgctagagtggagtggggagagtgaatctttaaaatttttctaagcatcctcaactgaaaaccctaatcgaaagcctgagaaagttgtctgctttctgagtaatttagaaatagaggctagaaactgagtcttttccctttctcccacatcttgttctctttaggagacagttcctgctgcagccaccagtccccagtactaaggatgctagctcctgtctccaccagactagtttgctccactatctgggaccacacctaacttaccaccagtaagcctgctaatattaataatataagtccttccatccagactgccttgtctcttttctatctaatcattgataggacttcttcattctccttaggtttaactcaattcctgtcagccttacttccccacttctcaacctcattatttttctggcatagttttagtcaactgcatgaccatgtgctgatcttctcgtatgtgcaagtaattgtgctaagcattacagtattagttgtcactaaaatttattggtatctgggcatatatttaagtgttatactttctgataaaagagttattggaacataggcatactgattatctactaaattagcatccgctacactactttgtatgtaagtgcaaacatagcacatgttatggcactccattttgtgttgcatcagattaaatcaaatgcagtcttttttgctttgtcaccaggctggagtgcagtggcatgatctcggctcactgcaacctctacctcccaggctcaagtgattctcctgcctcatcctccccagtagctgggattacaggcgcccacgaccacaccaagctaatttttgtatttttagtagagacagggtttcactatgttggccaggctggtctcgaactcctgacctcaagtgatccacccgcctcggcctcccaaagtgctgggattacaggtgtgagccaccacgcccgacctaccagagccatttttctaatagcatgcatttactttgtgtatctgtgtcacagtctggtgagtctctcaatatttcaaactttttcattattattacatctgtttttgtgatctgcaattagtgatcttataattgtagatgtggtggaattggcaagaaaacaagaagtagaagtagagtttgatgatgtgattgaattgctgcaatctcttaacaaaagctgaatggatgaggtgttgcttcttatggatgagcaaagagtggtttcttaagagggaatctcggccggacatggtggttcacgcctgtaatcccagcactttgtgaggctgaggtaggcagatcacctgaggtcgggagtttcagaccagcctgaccaacatgcagaaactccgtctccactaaaaattcaaaattagccaggtgtggtggcgcatgcctgtaatcccagctactcaggaggctgaggcaggagaatcacttgaacctgggaagcggaggttgcagtgagccaagatcacaccactgtactccaacctgggcaacaagagtgaaactccacctcagaaaaaataaataaataaataaataaaataagagagaatctcctcctagtgaagatgctaagaacattgttgaaatggtaacaaaaaatttagatattccattatcttagttgataaagctgtggcagggtttaagaggattgacttcaattttgaaagaggttctactcaggaaaaaatgctatcaaaagcattgcatgctacacagaaatctttcatgaaaagaagagtcaatcaatgtggcaaacttcactgtggtcttattttaagaagttgtcacagccaccccaaccttctgtaactaccgccccaatcagtcagtagctattgaaattaggcaagaccctccatcagcaaaaacattacaaattgttgaaggctcagatattattagcattttttagcaataaagtatttttttacttaaagtatatacattttttagacataatgctattgcacattaaatagactatagtatagtgtaaacataatttttatatgccctgggaaacaaaaaaaaatttgtctggctcaatatactccaatatttgctttgtgtggtagtctgaaactgaacccacaatatttccaaggtatacctgtatgtatacatatcatcattgtattaatcatggcaattaggacaaatccctacatttagtgggaactcaaataactatgctaatgaatgaaagtacaagaacataataaaagttggaaattatctccattcctcacataaaaataatatgaagaattagaaaggaaataaaccaaatgagcattccaaatttattccttttaagtaaacctatagccactacatatgtccctgacaattagaacagaaaacaaaaaaaggacaaatagaaatactttccattctgtctatatagtagtagttttgggggtatagatagtaaacactagtcaagaatactcgtctaaatatgttggtaaaatgtagtcatcatttggcatgtgttttgctttggtatataatgaagttgagctatcccatctttcttctctatggaatatagtcacacaaacaaaaaagatgaatctcactagaggtgggtctttatcagaaatatgccccaatctagttaggtaatagaaagaaaatcattttctcctcctaggcctaagattcttcatgtaaaaattataagactgaataaagatcacttctaagtttctataattcatgtagatatatcaatttatacatcatgatgtagacagacagcaaggctatactttctggctccatgatgctaggcttggccacatgacttgcttaaagcacgtatgatacatgcatcttttaagagaaaaccgaagtgtatttcatctctttctctctctgctaaaacaatcacaatgtcccaaaagagatcccttcctttgcctttgatcatggtaagaagatgacacaaagcagtgtcacagccaatcaacagctgacatcccccaccaggaaatacatctttgttgttgtcactacagcataaactaatgaaagctaattaaatataagaatttgctaataattgaggatccgtacacaattaaacttaaaaccaaaaaactctaatagaaaactcataatttaaaatgtgacataaggggaaataagttaaaaagcaacttttaaaaattacaaaaatagtatttgtagtaaaataaatggacttaaacatgtaatagaattttccctgtgatttctgacttgaatctttgaatgactattccaagtaagattcaacatttttacagaattgttcttcatcattaagatattccaagattatatttccaccattatataaaggacaatcctccttagcaatccaggtttccaaagtatgatccaagggtaaggcttctcctgaagtaatgtgacacagccttaatttctgtgaagggagaagtaagtcatactgtaataaataaacatgcttgaatggagcatcataaaacctttattaatatagaaatattattataatgagatgttaccttagctgtaaatttgttattgtcatttttaagcctggctagagaagcggcaaagtctatggcctttccaatgctccatcggtggcaaaagaacattggtttgctcttctctttgctccctttaggtaagaaaacctgaaagtaaattctttctgtctgtaaaaagaaaaagttaaaacaaccattacatagacaaaatagacatcagtttttgtctggtgccaaccgttcctctcttctggtcagagcagaattaccttctaacaaggtatctgctacttggaataccaatcacagtagccaaaaacacacataaatgcatgggcataggaccaagaccctggccagggtgatctgtgcaaagacagatatgtggcctaagttaggccaatcagatctgttcctgggattttatgttcaacagcttaggagacaaagagcactctccttatttatttatttatttatttttgagagggagtttcgctcttgttgccaacgctagagtgcaatggcacgttcttggctcactgcaacctccgcctccagggttcaagtgattctcatgcctcagcctctgagtagctgggattacaggcacgtgccaccaggcccagctaatttttgtacttttactagagacgggctttcaccatgttgttcaggctggtcttgaactcctgacctcaggtgatccacccgcctcggcctctcagagtgctgggattacaggagtgagccaccacactcggcctctccttatttttttaagttttatcaaattaaacctggagttgcctacagcaaaccccgtcacctaacagccattcctgaaccaatgtggaaaaagtttcctcgaatgggaaaaaatgaggtcaatgtagaaagagaaataacaagaaaacagatgagctctttcaacataatctgagttcctgaattcatcccctaagaccagatcaattcattattccccattatatgaggaaaaaagtttgttttgattttcctagttggaatcaagtttccgtcacttgcaattcaaagatttctgacacatacaacatttctttttatgtgaaagacctcactatgtatttagacagaaggacttttcggaacaaggaaacattaaaaacaaaaaaaaaaaaagagatagaaaaagacctccaaaccccaagtaccttatcaacaaaagaaaggacttggaaaggatttctctagtattctatatcttatctgccctctccttatattgtattttcttgcctaattaacaaatggatggctgagcatgatggctcatgcctataatcctagcacttcgggaggttaaggcaggcaaattgtttcagcccaggagttcaagaccagcctgggcaacatggtaaaactccatctctacaaaaagcacaaaaaattagctgggtatagtggtgtgtgctggtagtcccagctactttggaggctgaggtgggaggatcacttgagcccaagaaggtcgaggctgcaataagtggtgaacatactactgtactccagccagggcaacacagtaagaccctatttcaaaaaaaaaaaaaaaaaaaaagcaggaaagaatgagtaggagcaaaaggcttggcctttgctcttcactgattccgaaaaactgctttttaaaagtgctggctttacaggtcaattcttgctaaaacaaaaattttggcataacaggagcatctctaacttgtgggggaaagatcacaattattctgagaaataataaatccaacacaattcccaactcagcactaaggaatttagatttgttgaagaccagtggggtgtgttattacaggtaacgagtattaaaagaaaaaacaagaaatcactggaaattcaaactgtgagccacctctataatcaaatattacctgctccaaaaagaaagcagcaagaagataaatatagaaagagaaaattgataagatatagccttatcttttttttttaaaaaagataaatatgtatgaggatcaaaaatgaaacagaaatgcaaagtgataggctggctaagccacaggctttcagggctccagaagaggaggaggtcagcttataggtaagtgggaaataacagcaccacagggagataagtataaagctcctgggtcaggctccctgctcggaagcagaggagtgtgtgggacctctgctctaggaagggcagctaaagttactgctgaatgctgacttaagtataaaattgccagacagggatctgtgagtgagaggaaggagaaatataggaagaacctcctattcaagatgaacattttaaatgcattaactgaaatttcaaaacaaactgaagattaactcattatgggcaaatgaagacagctgaactttaaaaagacatttaaaaaaggtagttaggatgcacaattagataaaaaaggaaacaagaagttataaaaccaaaataggcacaaataaaacataaaagacatgaagatccaagtcaaaaaatgaaaattaaaaaatagtttctggagtaaaacattcaaaatttattatagataagtttctataatcctcaataaaaaggcctaatttattataagatggatataaggaagtcatccacaataccgcataaagagacataagatagaaacaattataggctgggcatggtggctcacacctgtaatcccagcacttggggaggctgaggtgggcagatcacttgaggtcaggagttcgaggccagcctcgccaacatggcaaaaccccgtctcttaaaaatacaaaaattagccaggtgtgggggcacgcgcctgtagtcccagctactcaggaggctaggcacgagaattgtttgaaccggggaagtagaggctgtagtgagccgagactgtgccactgcactccagcctgggtgacagagtgagactctgtctcaaaacaaaaacaaaaacaattatagatccccaaaatatgtcgacaagagattcagaaaagaagaaatggtgaagtagcactatttagagagaaaatgagtaaaattttccaaaaagtcaaaatttacaatgtgtcaaacggaataattaaaataaatccacacgtagaaacattccacagaaattggaaaatatcacaagaaatcttaaaagctaccaaaaaagatagattactcatagagtaagactgacacagatgttcctccaataatagatgacaaagtatattaaaagtgttgagaaagtttaataggcaatccagctaaaagtaagggcaaaataaggacatgttcaaaaaagactcatagagtttattaccagagacctttattaaatgaactgctaaagaatgtactttagtaaaaatacaagtaagccctaaggaaggagaaacaaaaaaaaaaaaaaaaaaaaaaaagaagtgttggtaaattttaatagctattaacttagaattaatttttatgttaaaaaaagatgatgggataggagagagtcaactggataaagcctttcaagctcgtattcaggaggatataataccaactaacttcaggctttgagaaaaacattgatatttaattatatatgttaagaatgtaagcacatagttgttatcaccattatcattttaggatattatattggagattatagataatgtagtatgaaaaatgaaataatgagtataattatttaaaaaattaaagctattcttatttgttaatgaggaataatttttaactagaaaattaaaaaacactagtagaaaaaacttctaaaattaataaaagattttggtgatgtagctgaataatatgagtatacagagctgaagattttttttctctttattagaaataagtacttggcaatagaagtggggaaaatattctgttctcaacctaaacaaaaaccgtaaaataagtagcaatgaaaataaggaatacaatataaaagaagaaaaatatgaaatgttacagaagggaataaaacatctgaataaataaagacatataaggtccttacagaaagacaatgtcataaaaatgtcatttcttccaaaattaatgtatggcatataaagcaaatccagtgtgaatccttcaggaatggttctgagtcaggccaaaagcctagacttgctagtagatactgctgggatttcaaactgtacttcacctaacttcatagaacccactcaggtattcattaaggatgttttgcatgcattactggaagcttaggagcaggaaaggagctggaatcctcaggacataaaaaaggaggccaagatggtataaaatctccaggagaatggcaaaggggccttcaaataaatggtcaaatcctcacttcctccaggcaatattcactcatcacatccttgtgggaaacatgaggggatgtaggaagccacatttctgtctaagactatgctgtgctatctgttgctttttataatcatactctcagcttccacattttgcttttaaagagtccaacttctttaacaggctatgttgaagtctgttattcacaaccttgccccattatgataacctataaatcctaagagtggtattttttaaaatctgaatataataatcataacattcagatggattaacaaatgctaataaaaatactaagaaaaaaatggaaaaatatggatgggacttgcatgatcagatatagaacattctataaagctattgcaccaaatcaatttggtattaacttatgagtaaaaaataaatgagtagactgtaacagaaaattaagaaataaatccatatacagaaataaaatgttcaacttttcatgaaggtggtattttgatatttcaatccaataaaacatagataacttattaaataatcagtggtggcaaaactacctaaacaactggaagaaaataaaattaagccctcagctcacatcatatgctaattaaaaaaacaggtggattaaacattaatcccaaacaagccaggcgcagtggctcacgcctataatcccagcaccttgggaggctgaggcaggtggatcacctgaagtcaggagttcgagaccagcctgaccaacatggtgaaaccctgtctttactaaaaatacaaaaattagccgggccatggtggcacatgcctgtaatcccagctactcaggaggctgaggcaggagaattgcttgaactcaggaggcagatgttgcagtgagctgagatcgcaccattgcgctccagactgggcaacaacagcaaagctccatcaaaaaaaaaaaaaaaaaaaaggctaatgcaaaacaaaacaaacatacccacaaaacccaaaggaaaaccacaacaggaatgaaagaaaagacagaacttggaaaatgtaaatgtaaaatattgctatgtcaattagaaatataagtaatatcaatacactgatagatttgaaaaacaatttacaaataatgattttagataaaggattaacatcttttatagtctaggagctcctataagttgaccaaacaaaataaaaagaaaaatatcccaaaagaaaaatgatcaaagcatactcactaacaattcagagaagggcaaacccaaatgcctaaaaaacatattaaaagttgtccaaactgaatagtagtcaggaaaatacaaattaaagcaattatgaaatatctttttatagccaccagactgtaaaatattaaaaagaatgctaatagctactggaaaccatggagaaaaagggtactctcatgtttggccacaagaggcagtatacggaactggttagaagggcaggctcttaccaagttagtgctcttaaaaatacttcactccagattactcatctgtgaaattaggataaaaatatatctcagaagagctgcaagtactaaagatgattaaaaaactagagccacaaaactatacttagtataggcaatccgtcaatgaaatttgattcgaaatgtgaattgtaatttctttgtaaagttgtttgacaatttttattaaaatctaaaatatgcgtaccatttgacacagcaaacacactcttgggaatttatctcacagaaagaaaagtaccacacagcctatttagcacagtagccaaaactggaaacaaagtgaatgctcattaattgaaaaatgacaaaataagccacagtacacccacaccacagaagagaatgcagtttgtaaagaaaatgatttagggccacaccaactcacttgagggaatttctactaggcattaatgagagaaggatatatagtctaccccaaacctgctttagttttatttatagccctaatcactacatgaattattatatatttaatatctatctcagcccagtggcatataaactccaggaactctaggttcataagggcagaagggattctgttttattcactactgtattatcagggcttggtatatagaaagtatttttttttaagtgtgttgactaaatgattgataccatttttataaaataatgacagaaaaatattctttatgcctttgcacacatatacaagtagaatacattttcatttatgtaaaatgatatacacacacatataacaaatacacttacacatatacgtatatacatgaatacaatatgcatgtatatattatacatgtatgtataaacacataagacacccacatatatctctagtatatctatacttacacacacacaaacattaataataaagggaaaaacttttatctacaaacttatagaatgctttatgatatattgttaagtgtgtgaagaagatggtttgtgaaaccagactgcctagtttcaattcgtagttctccacttactagctatgttaatagaatgttactctttttgggtaacagttaatagtgcataccttataaacttgttgcaaggatgaaatatgttagaagattgcctcaaagtaagtcttatagaagtttttactgttatgttttaagtaatagaagaattgcaaagtaatgtaagtattactgaatacttgagagcaggtcttctcaactttgtccctatttacattttaggccaagaaaaaattctctgttgtcggccttgtcctctacaatgtaggaatttaacagcatctctggcctctaccaactaaataccagtagcaccccattcccaactgtgacaattaaaaatgtctccagacattgctgaatgtccccttagggagcaaaactgctttcagttaagaactgctgctttaggggatgtaaatggatgagagacacaggagtgtgtatgttttttctccatatgcatcttttgatagttatacttgttaaaagcttatactacctttgcaattttaaaaaaatcaaacaaaatttcaaaaaaggaaaatatcaggggtagtcaataaaataagaaaactgtaatcaattgtttctaagccatcagaacaaattcaatacaaaaggaaagagaaagagtcaaagaaaaagggtgatgagcagaaaatacatgatggaagaaatatgttcaaatacaccaatgaccaccataaacaagaaaggattcaattcacctacaaaagagagatactatcaaactggtttaaaaaaaacaaagttcagctatatgctgcttacaagagacaccctaaaacaaaacaacaaaaaaagttgaaatataaagcgatgaaaaaattacatacttgttaaatattcaccaaaagaaagctagtgaaacaatattataattcaaaatagggttaaaggcaaaattcataaagaacatataacaatgaagaaattctatgtacttgataatacgtaactctacaaactattagagttatataaaaaaattagcaaaaacacatccatagtaggagattttaacctgagaaagtgataaatcaagtggacaaaaaattaagtacacacatatacatatggtacatatagacagaaagagacagcagatgataaagcaaacacagcaaaatataaataattggtacaattgggtaaagaatatggaaaagttatttgtactatgtttgtaacttgcctgtgtttgaaatggtaacaaaataaagacaccaaataagtatattgttatacctaaacaagtatattaaaaataaacaaactgccgggcatggtggctcacgcctgtaatcccagcactttgggaggcagaggagggtggatcacgaggtcaggagttcaagaccagcctgaccaacgtggtgaaatcccatctctactaaaaatacaaaaattagctgggcgtggtggtgcatgcctgtaatcccagctactcaggaggctgaggcaggagaatcgcttgaaccagggagggggacgttgcagtgagctgagatcgcacgactgcactccagcctgggcgacagagcaagactctgtctcaaaacaaaacaaaacgaaaataaaatcaataaattaccattctatgtgaaaggctggaaaaaggatgtcagagaaaaatctaaacaaagcagaaggaaataatataaaagcaaaaattagtgaaacagaaaacaaaacacagaggtctttaaatccaaatcatggttctttgaaaacactacgaaaaaataaggataaacttctagctgttctgtctaaaggagaaagaaggaaaagtacaaatgaaaaatattaaggaagaagcagaatgactaaagacacataaagattctgaagtataacagaataacttgaacaagttgaaaataataaactgaaaaatctacatcaaacagttttttggaaaaatatttaccaaaattgacttcagaagaaatagattatccagataaagcaagaagtaacacattggaatagtattcaaaattctccaagagttactacaactgagtgttaccaacctttgagaacaaattcccaccctctacaactacctcaaagaatagaagagagaaagctactcaactaatttttaagcataatcttgctattaatgtcactaacacacactaaataatgttagcaaatcaatttctcagtgcattttaaaagaattatataccagagtcagtgatttatcctggaatatttgatgatctaacgacagaaaaactgatcgataaaatttattacattgatgaggaaaaaatgatcatcttactagatgtaataaaaaaatttacagtaaagtttaatatccattcatagtgtaaattcctagcaaattaggaatagaaagaaataatagtatcaagaaaaaggctacttatacaaattcacagtatatctaatacttgatgaaactttagatacatttgcattaaagtcagaaacatgattaagattccttctattgcccatattattcaacattgttctgaagatctcaacattaagacaaacaatgataatgaacacaagagaagagaaaatctgcagaaaaaactcacaaaaattggcatttggagaagatatgactacacagaaaatagcccagaaaatctacaaaatatgggaactattaggaatttatttgctggatagaagggcaacataacattaaccaacaataattagctaggaaaatgtaatttttttaaaaaggtattatttataatgacaacaaaaattataaagagcctaagaataaaactaggaaaaggtatgtaaatatttatggtaagcattatagaaggttacttctataattacacataaaaggaaaccttaagaaaagttgggaagatataccacagacatagatgagaagagtcaaaattctaaagatgtcaactctctctaatctcaaattcagcataattcctaccaaaatcataatttcaccgaacagggcaaagtgatcctaaaatttttattaaggaataaatggccaaaaatagacattgttggaagcactaacagaaagagacaaatgagtacaatcactgacaacaggaagttgaccatatctagtaaagctgaagatcagcaaagcccataatccaggttttctatttctaggtatattccctaaagtagcattttttaaacagtagtctcaatccattagggattggaaaatcaacctgataggttctaacaatctttttttgtttgttcgtttgtttgtttttgttcgtttttttttgagacggagtctcgctctgtcgcccaggctggagtgcagtggtgcaatctcagctcactgcaagctctgcctcccaggttcatgccattctcctgcctcagcgtcccgagtagctgggactacaggcgcccaccaccacacctggctaatttttttgtatttttagtagagatggggtttcaccgtgttagccaggatggtctcgatctcctgacctcatgatccacccatcttggcctcccaaagtgctaggattacaggtgtgagccaccacgcccagccacaatctttaaaacagaataacaaatatcataatataacacatataacactcaactgtgttaaggtatgtatgtatatatatatattgggttgttatataaaataactgatattgtgaagttttaaaggaacagtcctagagaaactcttctacatatacacaaggatggtcaccatagacagtttataatagcaaaaaattgaaaaaaatccgaattttgttgactaaatctcagcatggataaacattaacagcacatcccaagtgggaaaaaaaaagacaactcgaagaagtatacatatggttcactatcatgtctataaagtgaaaaaactcaaaaaactttgtattatttatgcagacatataccatgcaacattaagaatgatacataccaggtttaggttagttgttaattgatgggaaggaggaatacaaagaggacttcaactatatttgaaatttttgtgttttaaaaaatctctaagaccaacctgtggtaatgacttatcgccatcagcatgcatctttaatttcatcaatgcaacctttgcagctgtttcactatttttggcacctttccatcgtttacttgctgtttctcctgtcttggaatctaagaagtgtaagcatgtaatcacataaaactttcacattacaaatagaattttattataatacacttattaattatggctcagaaacatatataaattacacacaagagagatatacagagaccacattcattgtataggtattgtatttacattgtcaatggaaaaatatcattgagattgatctaggcaatctccacatcaaaaaatccactataatgtgcttcttttcaacttaagcctatttaacctaaagcagtcattaatgcttctacagacaaccttaagatttggttatgcaagattgtaataaaggtactatccttaatatggaataaaaattctgagctaacatactggcaggcagactgatttaagtcacagatacattcattcctggtatctcttattatcagcagcattcacagaacagctgactaggcttagagtttaatctgtagagaaagcagctgactacttcaatctcatgaataccatttctagcccaatggttaactagctaatctaagtggctcagcaaaagagataagtacttacagtggagtacctccaaataatttccaaatttccatcggtcaggtagacctcataagaaatactgtcacaagaatatcatcaaaatacaagttaatacgaataccactggggttattaatgatgcctcccataattggaaagtagatataagaagcaggagctctggaactaggaaagcaacaaaacacgctttctagatacttaccaataatgtctttaacaagtttctgagtggcagccattcgaggctttgggatttccagtttttcacactcatgatctgactgatgacggtgtctatgagcaacagaagagtgacactagttcatgtgtttgtatagcacttaaacagatatacaaagtgtgaacagcctaagtgatcaatcacctcaggcaaaaattcttctcacaataaggacatataactgccacaagttctctctcagcacagtctttgaaagagcatgggtaagatgtatgttgatctgtcttcagtctctcattgattacagtcacctgaaaatgcaaaaaggaggaaatgtattacatttcagacctaaaacaaatcaatgtgtcttattctagaaggcagtattcattttatttttgcttaaacttattagagcaagttacttactctcaaagattataaagaatgttttatgtgacaaatgattactatactgactgttccacactttcataattttcctactgtggtatatttgtcttctaagtcaagttgaaatgactatttaattacgctctataattttaacctgctttgtaacagtctcatacaaaggtgcccctatgatatgctcaggtaattatctcatcaaccctcaaatggcaagtcaacctaatttccacactaattttaggagatgaaacacttaactcagagaataaaacacttaaaaaatatttatttatttgtgagataaaaggttaaagacggttttcataatcatatattattctctatgccctatttcatatttttattaccagcaaatactccactacaggaagaaagattttataagactaaaaaaaaaaaaaaattctaaatcagccaggctattctgagcattaacaaaccaggtttctaaagacgagtaaacgtagggaaataattgcttgaaaactacaaccaaagggaattcctttttataaataatagttacaccttgttggaattaatttaagtatctttttgaacttgttgcaatggcctaatgatgtttcaatatttaattaacgagacctaattatctgagacacattcagaggaatcaaattatatcctaagaaaaaagaaaacacaggatagatttataaactgcaagaaacttcagtaagttttattgtatgactgaatatttcctccaattaatgctgcataaaatcaacatgctaggtaattcaaattttcctcaaatagatcacgtaaacttcaaagggtcagattttgactgatcatttaaactggaaagaatcagatttcaactgaacctcatgtaactttaataactttctataactgagagaacagatgtgaaaatatttggtaaagcacttggtaaatggtgggcaggaataaatgtccactgaaaagtgttagaacacattgaacatggtgggcttagctttctctcttcctcttggaactgtactgccttcagggagaaagcctaacctggtccagtactgctgtgactgctgggcaagtctgcctaattctggatattctttgcaaacccatttgctctatgctgaacttcatcattcaacttatctttaccagtaataagggtaatattttgacttctatttgccagacctttcttaacttatgatttgtgcaaaattagggtaggaattttattaaactataggtttcttcctggttgtcttaagtcgactgagccagaatgatttactaccacagatcctatcagcaggcatcagtgaaaatgaacacaacagtgaaggacacagtgaactggagggaatatataaggaggacattaacttacgtgtatatttataaatatatagccttggctgggcgcggtggctaacacctgtaaccccaacactttggaggccaaggcgggtggatcacctgaggtcaggagtttgagaccagcctggccaacatggtaaaaccccatctctactaaaatacaaaaattagtcgggcgtggtggcacgtgcctataatcccagctattcgggaggctgagccaggagaatcacttgaaccccggaggcggaggttgcagtgagccgagatcgtaccactgcactccagcctgggcaacaagagcaaaactccatctcaaacaaaacaaaacaaaacaaacaaataaataaatatatagccttatactgtaagtgggctacctaaacaaatgttaaggaataaaaattatgaggataaaaatttacaaataccaagtaaaacaatttttctttcaaacaaagaaaaataatataaatgaagcaaaagcctctttacctaatcagtttagtatgccaaactttaatctgtgatactgactgcctttaaatctaatcaaattctgaatgaaagtacataaatacgaatacattttatcagattggaaaaatactaacatacctcaggacaaccatgagactccctgcttctgtgttcaaggcttaaataataatagcaagtgtttatttaaataacatacttaaagataactgcagaaatttgcgatattttaatgttcagtatacttaagatacattatgctcatactacattaataactttgaatatgagaaaaaactgaaatgtcagataaagatggagcatctatagtctcaaaagttttaaaacacaaatgttcaacttcaatatgagtaaaaacaattcaccaccctaaattacgtttacgttgcatgaaaatataaacatatctttcagctctttttatttctaaaagatcatcagtagtaaaatgtgaaaagtgctctaattccaaataatttaaaaatatacattacttttatttacttccaacaaatcattctgaattacattctgaaaaaaattcattctttcagtgctctattttataatttaaatgcttgacattttaaagtttaactgtaaggaaaatccattttccaaaattcttcattaattcccaggttttacttggcatgtaatgtagtcaaatgctgtgattcctattttaaggcatttataggttgggctcttttcattttattaattaaaataaagagcaataattataactggatctttaccatattctttatattgtgaatattattttctccttgtaattaaaagacaaaaatataacttttatataaaattcacatacataaccccacttttggaagtttaaaaatcagtcatatatatggagaagtaatcagagtctataactatactgaatatcaataatcaatggctaaagtaacaattattttaaatcattctacttttcagaaataacctcatattaataaacactaaaattactcccaaatcctgcataaaaacttaacttaccaaaatattcctgaacaatcatcacacacaaatggaagaaaatctaaaattgagagaaaatgtatatactggtcagtatctgattttgatttagttttcttaagcaagaagacaacctctatggaaaaacttcccattttgactaatatcctagtgtagcaagcactatgtaaccactctaacaaaattaatcacaacttcaataactgacagaaagtaattggattaacataaggtattaatagatgttacttgtaactttactaagtcagacaaaaataagttctagtggttttctttttcttttttgttttgtttcccagatttactaggtgttgtttttgatgactgtatactgcaaaaattccgcatttggagtgaaaaacctgggattcaattctgattccactgcttactaatctaacagtgctaggcaagttacttaacagtaaaactttggatatatatatttttatatatatccaataaatatatatatttatatctgtgtactaatatatatgtgtgtgaacaacatatatatatatatatcgccaaagcttgactatattcaaatatatttatatttatatatacacctataagatttatggtatttcaaatatatataatttgatgtaatatatagtacagttagtataaagtatatgtgtgtgtgtttctatatatgtatgtaaataaacatatacaaaaccaaagctcttttattgggtaagaaaaatagaaagatatagacaggtagatacagagacagatataaagatacaagcacatcctttctgtgtatatatgtatatgtgtgtatgcatgtgtatctatatctgtatctatgctgtatgccacaccgacctcacagtgtacttacagaaaccaaatgagatatatatgaaagatcagaatagtaatacagtaactataattaataagaataatacaacaattaacttcttttgagtatactcaactcagaacagtactgcaaggggccaggcacagtggcttaagcctgtaatcccagcactttgggaggccgaggggggcggatcacctgaggtcaagagtttgaaaacagcctggccaacatggcgaaaccccatctctactgaaaacacacacacacacacacacacacacacacacacacacacacacaaattagctgggcgtggtggttcatgcctgtaattccagctactcaagaggctgaggcaggagaatcgcttgaattcaggaggcagaggttgcagagggccgagatcgcgccactgcactccatcctgggtgacagagccagactccatctcaaaacaaaacaaacaaacaaacaaaaaaggacaatactgcagtgactgggtggagatgcttaatattttgcgacttttaataatcaagtattagatgcaaaccagaaggacccaggggaaagagttaagtcaagacaacttcccagcacctgataccatccttcaatccctccagaaggtagataaaatttaggatatacacttgacgtagtctaaatcttaactgctttccactagtcccaaacagataggcctggcctcatctcagttattgacactaaagacatatatagctggaaaggaaaatgaactatgtcatgaatggcatataatgtgtattggactcactagcgaaggatcaggcatagacacacataattcacagtcaaaacccaaatggctaagcttccacatgaaaaaagtcacactggcttgttattacagccagtggtgaaagatagatagatagatggctataagtaacaagaacctagaagggattgtgtcacctgtcctatcacgcattcccacagtagaaatcactaatcaattatggaactccactgaaactgggctaaatctcaagagtctttgacacggtaattcaggcacttgataccaatgactgaagttccaaggggagattaaacctgtttgctaccttatgtagtgtgtgaaacctagtaacaacgactgagcagtctgtgtggttctaatgcttcaaaaacttgccttttcaaggtgtatggcatcctgaagccaatgccacatcaccttggactaggtatatcccaaggtctctcagtgcaatggggagagcccattgccatattattaactaattctctctaaaatgcagcttactagttggaaaggtcttccgtgtaaaagactgtagtttacacccttatgtggtccaagcaccaaaatcaataatctgtaaatgtttgttcaaacaataataatgagaatcagggaatgacagagctgggagagcatgatgaccatttggtggaataatctgaggatcaggatgcctttgagaatttgataaaagctaaggaagggccttcttccggacacacatccacgtgaacactagttgggcgagttgacctcccccaactcctcctgacagctacgtaacagataagtaaaaaaaagtatgggaaagtagctggccgtaggtcgcagtggcaaagccaaaagacaacagtcccagaccaaacctacgcgtccccatacccgcgctcagcagagtaagtgtgagccacgcgatccagcagtgggcttcgtgcactgctcggacacggcacactcgaacaccaaaatgaacactgcaaggtacgttttcaggaattgcatggcttccttccaaggagaccacacgtcatttcaaaagctcacggccaaaaaaaacccgcaccaaccgatctcactgcagccccagaagaaacgctcccaccccgctcctcaggccctgcctcaggaattgcatggcttccttccaaggagaccacacgtcatttcaaaagctcacggccaaaaaaaacccgcaccaaccgatctcactgcagccccagaagaaacgctcccaccccgctcctcaggccctgcccagccttgtggcctcccttcacccgccgccaccatccgcggagccaaagcggagccctggtctcccgcggccggggatgggggctggaagctcccggatcacctcgctgccggcaatgctccacctggcagtgctgcccgatgtccaactccgccatctctccggcgccgtaaggggcggggcaaagcctgaggggcggggcaatgagcgcgcgcggcgcctgacgggagagtggcggacccagaggcggagtctacaggtgggggcggggcctggaaaccagctgtgcgatttgtcctaggtgcattcgccgtgaccaggaaaggccactgttctgtgagtgttcttctcggagcggaaggcctctcgcctagtccttaaagaaatacccacctgcagccgggcgcggtggctcacgcctgtaatcccagcaccctgtgaggccgaggcgggcggatcacctgaggtcaggagttcgagaccagcctgaccagtgtggcgaaacccccgtctctactaaaaatgcaaaattagccgggcgtggtggcacatgcctgtaatcccagctactcgggagactgaggcaggagaaacgcttgaacctgggaggcggaggtcgcagtgagccaaaattggaccattgcactccagcctgggcaagaagagcgaaactccgtctcaaaacataaaaaaagaaaatgaaaaagaaatgcccacctgcctttctggacgactgcttaccgcggttccctgcatacggccacgaaaatcagcaacggcttcacatttatttttttaaaagttagtagaactccaggaaccagaacagtgccgggcacacagtgttgcaataatcaagcaaaagagacagacatgggttattcaattcctgagccatccctcaaccagtgttacttgattatgtagtgtaacatacatgccccttgcaaaacagtcatcaggctttttaaaaagttaatatttctttatctttgtcctttttttttttttttttaaattctggtagggggaaaaaaaaagtcttaactcctgagcccctgaatgtgtactgaaccttacagagttcctcagagaacccagactcatttagcacaactacctgaagaaagcttatgggattccactgggatgtaggggagtatcaggtgcctggtgagccactgcaaaggtactgaaggagaggtacttctgggtggggtacatatgaatgccattccaccaacgtgatgccaggcaccattcagcgtggatgggtgacaatcacctgcactcctgacaggaactagaaaagtattcgatgcctcctatatacctttggagattcccaatcaataatcactgaggaagggcgaagggtgacactaggaaaggggaatcatttcttctgcatttgctcttgagccaatctatttaagatttccgtctcagaattgcttgagtctctggagaaactttataagatgtcatctggctatcccagcctccatagcttttcttttattaagatgagaaaaccagttcatagacattaaatgattggctcacattagtggatgaaccaggacaaaaaatgcaagtactaaagacttttggtattcttggatctagggatcagtggcttacctagattttatgtttaagttgatcagatcaatcaataacaggtttcctggaattttactaggtgtttggaatgttctagataggtggcaaatatatgttttatcagtccaattattatggatatgtttttattttttcagttattggacacctcatagaacatcagatgattagcgtagccaagattgcagttgctacctctgctttctctatttagtctcctttgctgatttcttctctaggtgctgcttaaacacatctatttcactatgtttatgtctttggtccatttatcaatttacatcctcatgcaagtgaaattcccatggcttccatattaaagactctcatacccatattctcagccctgagaacactttaccaaacatgaagtaactatttccaactgtctgatagatctatctatgtgcattcatttgtcatggtgtcttaagcccaaaatgggataatttcctaccatatcatcccctttctaacaaaggcagcctgccacatacttgtttcattcaaccaatcaatcaatcttggatttattctccacctctcctttcttacttctcatggaagtagccattaaacactgtcaattctccctcagaaatgtctcttaggccgggcgcggtggctcacacctgtaatcccagcactttgggaggctgaggcgggtggatcacctgaggtcgggagttcaagatcagcccgaccaacattgagaaaccccgtttctactaaaaatacaaaaattagccaggcgtggtggcacgtgcttgaattcccagctactcaggaggcagaggcacgagaatcgcttgaacctgaggaggttgcaatgagccgaggtaaagccattgcactccagcctgggcaacaagagagaaactccatctcaaaaaaaaaaaaaaaaaaaaaagaacttagtctctgtagttatcctcagtgactgtgaccaccctttaaaaaaaagttatgattgctgaagaataacatttaaaaattaaaattaagaggggaaaaatgcctcatgtgttgtcatacatttgaaaagaaggccgtgatgtttatattaaaattccatattatagtgatcattcactataagttatattattatgtatagattttaaatctctcatatgaaaaatttctgctaaatataatactaataaatgtggataaaatagaacatagttgttaattgaggttattatcccttaatatgaatatttacaaagtgttatgaactagcaggtgtgactttgaattatgggtcagcaaatatctctctttccatcccattgagggcagagtgtactttaccacctccttaattttgagcttggccatgtaactttccttggcctatagaacattggccaatttgacccaggtagaggccttacatgaggtttggcttggcccttgtgctctagtgctccatcatgagaggaacatggggcaagtagctactgctcttcaatctgggccctagaatgaacacatgtggaatacacctgaacccagcccacagactggaagtaaattcagtcaatccagactgaagaagagctaccaagccaagtcttttctagcccagtgagatctcattagacctgcaggtctgtgagcatgaatataaatccttttgttgtatgtcctgaggtttcgggatgttttgttacacagcatcatcatggcaatatctgactaatatacaagcaatgaataaaacaaataaaaagtgagatattccatagttcacatgacagaatcatttttcctttctggatatgagtatatcttgcatatcatattcaaaatcgaatctaaattcaaactttaataataacagctgcaattcttattattacttactatgtaccaggcacttaaaaggattattttatttaatcttcacaacaacacttttagatactattatccccattctatagaatggcttataaaaatgactcagctcctggctccctcccacatctaaaactactctctcctttcatgtccccactgacctcttaattatttggacttaccagttgtccccctgcccaacctcagggaccagtctatagtctagaatgctttcttctttccccacatttgcctggttatctcctcctcatccttcagctctcaaaagaggtatctaggatctgccccaaattggatcaggtcctttgttctatgtactgatttcttattgttgctttaacaaattagcatcaatctagtggcttaaaacaacacaaatttaggctgggtgcagtggctcatgcctgtaatcccagcactttgggaagtagaggcgggcttatcacctgaggtcaggagttcaagaccagcccggccaacatggtgaaaccctgtctctactaaaatacaaaaaaaattagccaggcatgatggcgagtgcctgtaatcccagctactcaggaggctgacatgggagaatcgcttgaacccaggaggtggaggttgcagtgagccgagatcatgacattgcagtccagcctggtctaaagagagagactcaaaacaaaaaacaaacaaaacaaaacaaaacaaaaaccagaaatattatcttaaaattctggaggtcagaagtcctaaaatcaatgtattgatggggctgcatcccttctgagggctctgggcaggatcaaattccttgtcttttccagcttctaaaggttgcccaaattccttggctcatgattcctttctcagtcttcaaaaccagaaagtggcatcctcaaatctcttcctcaccaaacccttaccatttctccttttgccacatctgtctctaacccttctgccttcctctcttaaggaccctcgtgatcacattgggcccacctagacatttcaagataatctcatttgatgagccttaacttaatcacacctacagagtcctttttgccatgtaaggtgacagagtcacaggttcatggattataatgtatataactttgagggccattgttttaactaccacagtatacattctcatatttctcatagtatttccataacatttatcacaatttctgagtttatttttgcatgattattgattaatatctgtctcctctttgtcacttgagaacaaagactgtgtcttattcattatatctccatctcattgctcaatgcttggcacatggtaaaacctcaaaaaatatctgtccactgaatcaatgaatgaacaagtcaacactgatatacaactgcccccaatgttgttatactttcaatcggtattaataaaaatataaaattcagaataaagaacatgaacatggtagtttgttcactatggttggccactcaaaaccactgggaatattttgcttggttctgagaaccatacttcaaatgtgaaagaggcaaattgaggcatatatttaaaagaaggcagcaggatggcgaaggaactaaaaactattatgtaaaactgagagtttataatgtttacggctgaagcagtagagataaataagggtgtcaagcaaaggaaaacctatcatcaaaactataatccctactattatcatggcggcagttgggtgggtgagttttgaaaagcattattttttttaagcaatagtttgccttagcaggtaactttgtaacattttctcaggtaattattctttagagagacaaatttactagtcctgataagcatacataaaattattttgaaatgatggcttaaattgcattttggcactaatgggatattcaagataattaatctaactatagaaaaaaattctgatgttgcaacaacacccactattaacattactccttaaaatcctcagcaatgaaaagaatcaaatattttaaaatatgaactagcttctagagggtatatttccttcttcttctttttttttttttttttgagatagagtcttactgtgtcgtccaagatggagtgcagtggcacgatcttggctcactgcaacctctgcctcccgggttcaggtgattctcttgcctcagcctcccttctcctgcctcagcctcccgagtaactgggactacaggttcgtgccaccacgcccagctaattttttttgtatttttggtagagatggggtttctccatgttggccaggctgctctcaaactcctgacctcaggtgatccacctgcctcggcctcccgaagtgctgggattacaggtgtgagccatctctcccagcctagagagtaaatttcttataagaggaagtgatcacctccttctctaatgctaggtgcaatatctgtccaaagttttttggttttctgtggggtttttgcccaaaataaggtgggccagacactttgtgagagtctttgcatactggttctaagatttgatgcttagaactataggtgtcttttttgtattatcggaataacacagattcttggatctaggaaatgtgtttccaaatattttcatatgctgtacaatcatttggatattttatcacttatgttgtatttctttattcattcatttattcaacaaatattgatagagtgtctacaatgtgccaggctctgttataggaactgggaaaatactggtgaaaataaaacaaataaaaattcctcccctcagggccaggattctaggggtggtggggaagcaatggaaaataaaaatttaaaaatgtgaaacagtgtaagatagttagtggtaagtactatggagaaaaataaagctgagaaagaggattagagttcttttgcggtacagaagtgagacaatagggttgcagtttctgatatggtggtacaaaaatgtgataaagatctaaagaaggtgaagaagtgaatgaaatgggtgtctggtggcaggtttctaggcagaggagcagcctgtgcaatgagagtatgcttggtatactccagccaaagtgaggacaccagtgtggctggagcagagtggatggggatgtatggaaagggagacacaggtgaagtaaacttaggagtcagtattatttcatgtaggggcttgaagacatttgtgaagaccttcgcttataattggagtaaggtgggaagtcactggaggtttttgtctcagtctccatctgtttgctatgtagggagactgtaatagggtcaaggtgtttgtaggatagtcagaagtctagtgggataatctgggtgagagatgacagtggtttgaagcatggtgttagttatattggtggtggctagcagtcaggtttccatcatagttagaacttacgggatctgctgatggatgggatgtgggtcaaggttgactccaaggtttttggcctgagaaaaaggaagcctggagttattaactaagaggtagaggagcaggattggagagattaggtgtatttcttgattaggtacaaatctcatgtgattgtactccggtatagtgaaactctagaggtaaaggaaagtttagaaatcaactttaagtaggtaatgcaataagagtaacattgaggtagggggctatatttcactttagatccattaaatgaaatggtttacatttaagtctgatgaaccttaggatcttttttttttttttttttttgagttggagtcttgctctgccacccaggctggagtgcagtggcacgatcttggttcactgcaacctccaactcccaggtgcaagcaattctcctgcctcagcctcctgagcagctgggattacaggcgcccgccaccatgcctggctaatttttgtatttttagtagagacggggcttcaccatgttgaccaggctggtctcgaattcctgacctcaggtgatctgcccgcctcagcctcccaaagtgctgggattacaggcataagccaccatgcccagctgaacctcaggatctttaacttctttctgatcagggatgaacaaaggtatgaaacacatgaataaagagctatgcaggcaaaacccagtcataggcaccatccatcttcattatgaactagggtaatcaaacttttaattttgcaaaattataattttttaaatcatagctacttttgtactcaagtgtgattgagtattatatacgatggatatttggttctaagaaacagaactgctgataaaaagaatctgtacatgcttgttgagctgcttaataaataactatttgatgatgaattctgcagtatgtttaaagaacaatccttcttctgttgccttagagagttcatttggcattgtaaaagtggacgtaatttcaaggggtggccaaaatgtatcaattagcctgacaactaggtctttttaacagatctataaatttcagtttcctttgccctgttaatcatggtaaattatcctgaacaagatcattcttttgaacaacagcctcttattagctgagatcaattgagatcagaaaatgaaaaatacactagatgctaagaactctttgtgaaaccacatttgtaggatgagaactgaatgaagattaatgtgttatttttggcttctaaatcagtgatttaaaaacttattttctacatcctgctgctggattaaacactaatatatatttggttggtttacttgcttgcaagtattatcttttcctctttgagcttatgtattaatggaaggaaatgatttttaatttaaatgtatcttgctttgcacaccacatgtgtttctgaaagagctacacattaaattggttaaattgattattttttcctatggaattacaaattaatgactagcttctttgttttaatgtctgattgattttcatttgctttttcaataaaatgcggatccttagcacatcatgtggaccttatgtaatctggactctgtctacctttgtagggacctcaccacactctcctactctcctcttctgtctccaagcgccagcgacagtgaccttttctcaacccctagtacttcaaactcaagatttttgcacatattgtttaaaattttaattctccaacattctttgccttgttttttaaaatatagtacacatagtacattgctatcttaattgtccatcttcccttagctagaaagtaggctccaaaaatgaatgtatttttgtctttttattcactgctgaatctctacatctaaaagtgatgaataaatgaataaataaattggtaaatgaataaggaattccttataatggaatacaaatttcccttccctaaaaccaggtagcttctattcatcattcaaattctagcttaaatatcactttttcaggccactctgaccccaagacaaggtcaagttcctctactatttattcttatagatcctgtacttctctatataatttattagaaccccaacttatgaagtttattgtttgtgagataatttgcttaatttctgtgttctcccctaagctgtaagctctgttggaacagacaatgtttcttactcttacctgtatccccaacactagcacaatgcctggatcatagagacacctaataagcatcagttgaatgaaaccatggatgtgtggattaggcaattcctcagttataactttgtctctctgttctactgtccaatgttctcacaacaaaaaaagtaactaacgaaccccaaagaatgccttagtattctggataagttcttatttaaatgcactcctccatgaattcaataatgcttggaggatcccttaaagataatgcctaataattacctcttcaccccatgctatttaattaaacaaatacttaatgagtttttcctctagtccaagttgcacagagggaaataccatcatgtaaatagtgaaaagaccatgcgttttcaaacagaaagatctctttcacttttgctgcctgttaaatttggttaagttatcaactgagccttgggttcttcttctgtctaacagaaacagcaatacctattttgcagggtttatgtaaggattagtgataagcatatatttattgataagcctgacacatagtcagtgctcaaaagatggtagctgttattactgtcactggaaggtaagctcttagagggcagactatacttgcattccctgtaccttacactcaataaaggctagttaaactgaaaagcaacgggaacaatagcagaatatgtgctacttctcaactctcaagggccttaaaaatctaatcaagaaaatacactccaaaacttattcatgaaatatttagataataaagaaaaacaatacttacgacaacttatacatgaaattagagcaaaatgtgtgttatagaccatacatgctttacatggccagccaggaaatgataggaggtggctggctgcagttactgtgaaatgataagttcacatatttgtgtgttagaagatgcttactgtaagcctcctatggaagtgttcaatttctttggcaaaattttatgctatctatgccaatgttggataaatagattaacttgctgctttgtgtttgtatgcttgcagacaaaattgtgttattgatcttgggtatcaaggtgaatttgtcagagtaatgggtgttttttttttttttttttctcttaaacagtggctggctaacaatcaaaaataggttttggtaatgttgggtaacgttgctcaaatacggctatattatgcagagcacatggcaatcgttgaagagtaaaacacagataattccacttctttgtagtgtgcttgacacaggtttgcagcagtattgcatcatctataagcattacatatggctgtcctttcatcttactaaattatttgccagcagatctaatagatgggctgagatagtgagcatgaacaaaagaatgtttctcttctccaggatattctctactttttgttacttaagtatctatgtaatagcatttgacatacagccaaacaccagggcagccccatttaaggtttttgatacactgaggatcattcagaaaacttcggattcctagttatagagttgaatccaaccaccaacacactccagaagtcctgacattaggaaaagagatggccaccatctttcacccacttcaagtcctgtaaggatgatctagaatctacactgtgccaactagcatccaggcacacatcaacctgcccggactaccaaatgcagaaacaagcccagtagcagcagctgctccgagcttgcccacacacctgcatcctagtggcagacaaatatcctggaagcctttgtgtccacacactcatacctacatgacatacacttagaggaaaagatctgaatattcttattcacaagaacagaggcctgaatacaggaacactatgctcacgtacacacaaaagacacgcatggaataaagcattttgcatatccagtcttgcgcacttacactttcaggtcctgcacaagacccctggacatcggtttgcttttctttgagccattcacaaactagttcctcgttcctgggaccgtccctagtgtggataaaagccaacttcccacagtctttgtcggtcttttcaacttttctctgctctcgctcaactcccagagggccgggtggcgccggccagccgacgtcccagcggtggcctccccgcccagccgctgtgcagcggggcggggccgaactggcagccaggaaatgccctggagtgtgtgtcacctgtccaggacgacttgttgattcccaggagggccgcctttccggtctgggtccccgagaggactgccttgctcacctgtcccctcggcgcggccccggggagctcccgagaggcccccgggatcgctggccctccgaactccacagcaatgagcaagttgggcaagttctttaaagggggcggctcttctaagagccgagccgctcccagtccccaggaggccctggtccgacttcgggagactgaggagatgctgggcaagaaacaagagtacctggaaaatcgaatccagagagaaatcgccctggccaagaagcacggcacgcagaataagcgaggtaggctggggtctggcccacaggcgggagcccatctgcctctagcctttcccttggggacaatcggcccacaccactgaggtccccaggtggccaggtttgctcctgcagtcttttctaggaactggtactgactcttagggcactgactagggtgagttgagctagacactggcactgatggcaaaatgtaaggggccgccaaaaatctcagtaatcaagatgaacaatactttaatgcaatacctaaaggactcagaaccaatgccaaaaaagaaatgatgaagaaaatatcaaaattttaaataaagacaagattggtattgatttttttcatttgcctctagctcttatgttgttatgtgcagcacatctttatttaaaattattttttataatgtgatgatttgttcatcgtggattttttaatattaattttgaattttaaaaatattgcattaaaatattatttgtcttgattactgagtgttttcgcacccctgtaaattttgctcctggtccagctttttctaggccagccttgctgactccaacactaaccatgaagttttctgctgtatgtttgtatattaaattacacattttaacttgcacgtaaatcttcagaaaaggatattctagtacgttgtggtctaccttgctcctcagctgtggaaagctttagctggatgttcggcagttgaagtcttaaaaaaaaaaaaggtagaggaattaattattaaatttcctatcactgacttttggcacacacaagagactttgagtcagtaatgattcttggtgttcctgttgcaccttgaacacctgttctttgccagagttaactgatttcttcagtatactgctccttctattggaatacctctaaacagcacctgtggcacagataaaaactcagtgagaagttgaagtgatttgctcttgtaacaccgggttcatggcagacccagaaaaggaagtggcaatatcggactctgcttaccaccaaacccaaacatttgcaccctcaagttgggcttctttagtcataatgaagccttgggaagatttggctcactctacaggatgctgccattgtttaatgcaggaaaggaatgaagtctcaaggagatgaacttgagaactctgcctctttctgtaaaagtgtgccagctacatttatgcccacttaccaccaacaataagaaggctgttttattgcatataacttttgtgcatattatagcctgttttagaggtaagtactgatttctacttttactttgtgtctgaaaatattctgggaagttatgcaatggcaatttctaaagaaagaccatgtcattatggcttgctaaaaatgttgttggtcattttgctccttggcccttcctcttcagtttgatacacactctgacgtttgcttagtgtctgtcaagggttttcttccctttgccatctatttggatctgtgtacagctttgtctaccatggttgctcagcaaatattggtggtggttgttgttgttttgagacagagtttcactcttgttgcccaggctggagtgcaatggcgcgatcttggctcaccgcaacctctgccgcccaggttcaagcgattctcctgcctcagcctcccgagtcgctgggattacaggcatgtgccaccacacccagctaattttatatttttaatagagacagggtttctccatgttggtaagactggtctcgaactcctgacctcaggtgatccacctgccttggcctcccaaagggctaggattacaagtgtgagccaccgcacctggctgatgttggttttaaaaatctaaaaaattgaccatttccttctaggaagtggtaaaaatgtaaatttgttttcaaagacagagtgcaaaataatgtgggttttactgatttttttcagaggtactcttcaattggcaatgcacaaaaattcgatctcaatttgactttatgaataaagacaaaaaatttaaagacagtgctaattaagactaccaatctaacttccttaaatcaagaaagttatagatgcaagtatgaatggcaaataagtttttttttttttgagacaggatcttactctatcgcccaggctggagtacagtggcaggatctcaggtcactgcagcttccaactcctgggttcaagtgattctcctgcctcagcttcccgagtagctgggattacaggcgtgcaccaccatgcccagctaatttttgtatttttagtagatacggggtttcaccatgttggccaagctggtctcaaactctgggcctcaagtgaacctcctgcctgagtctcccaaagtgctgggattacaggtgtgagccactgcgcctagccctaatttttaatagaaaagtcattaactctgtcttcagaagcttcactggtgttagtgtctagaaactcccagagcttctagagtgactctgggagtaagaagaggctggttagcatgaggtcatctgtaatctaagctatggaaagaattcaatcttaggctcctgcgttggtaacacgctcaatatcagaaccttctaaataaaccagataacttcatatacttcataacttcatatacatagttaactgtcttctattagccaccaagtgatataaaatagtaaaataaaacctgatatacttactactaaatggcccctgtgtggcacaatgccattgctagaatggctgtaatttatatgataatcagggtgacataatttatgtgcaattgaagttttattattagagatggttggtcagctaatatattctctgaatggccaggtagcattatatcagaaaaggccacactcctagccatttcagattcttcaaagatcaatttctctacaacaacagaagctttgacagcattctaaatgtcaaaatgagttttactggtaaaatgaaaaacttttaattagcataataaatgttagaaatggggcaggacatggtggctcattcctgtaatctcagcaatctggggggctgaagtgggcagattacttgaggtcaggagtttgagaccaggctggccaacatggtgaaaccccatctctactaaaagtacaaaattagccggatgtggtggagcgtgtctgtaatcccagctacttgggaggctgaggcaaaataattgcttgaacctgggaggtggaggttgcagtgagcagagatcgcgccattgcactccagcctgagcgacagagtcagactatgtctcaataaataaataaataaataaataaataaataaataaataaataaataaataaatgttagaaacgggatctcactggtgaatttttttgagacagggtctcgctttgtcacttaggctggattgcagtggtgtgatcagggctcactgcagccttgacctccgagacccaagtgatccttccacctcagcttcctgagtagctagcaccacaggcacgcactaccacacccagctatttaattttcttttttttttgtataggtgaggtctccctatgttgcccaggctggtctcaaactcctgggcttaagcaattctcttgcctcatcctcccaaagtgctgacaagagccactgggcctggcctaattggtgaaattctacatattctaaatatgtggattgctaaaacagtttagagacacttccaataccctccgcacccaccccatgtatgaacaggatgaatctactaggtgtgtaattaacttaacactagaatggtgcctgaaactagatctcaaatcagtgcagtgtccagtccttagtttaggtgggtttctgatggtgcgcacctctaatagggcacagcacctgccagggaacattgctgtcttcctcagtgagcctttcatgcagggtgaattggagcacctcaaagtacctagagttgggacttcattgagctcatgggacaggttggcaaattattttttgtgcttgctagtgtatgtttgtttaataatgtatatgcagaatttagtctgaaacttgctttcattacaactcattactactcatagtacaggggtagctacttctcctcccttcaaatttatctggcagttaccatcatcatccagcaaaaagaatttgagtaaacatgaacaaattgattttgcaacagttgctatccaagcctctgttgatcaaaagagtaacagttggagcttgagttataatttggttaaaaactttaggaggccagagattcttgaatgcagtttatttagattactatgctataactcttgctttataggtggtaatctactttgtggaaaagctaactttttatatattatttaattttttgttctacttcttctgagcactgcgtcttaaatagtcacctggatgcatggggcccacccccatttattctgatataattgactggagtggggatcaggcatctgttttttttaaagtgcccccacctgattctgacctgtgggccagggttaaggatgggaagcctaaatccataggaatgttaatgagatggaaaaacaagatctgttcctatcccagtgcttccggccttgggagctaaagggtatcaatatctcagcacactgcagaactctcctgccacactgatctggcaatacacaccttacaggtcactattccaactttatttattgatttattttttgcttaaatataatatcccaatccatttttttgcatatttaatagaaagtatcttggtgttgtagttaagagcctgggcttcaaagcagacagccaaataaagtcccacatttgatttccatccctgcctggccacttagtagctcaatgaccctagactaataatttgacttgtctaatcctgtttccttatctgcataatggcaacgatgacataaatcctcggagttgtggggatgaatgacattattgggtaaagcattcagtgcagtgctttataaacattagctcttggtataaactaattacattttaaaaagctgtacttggcccagtttttggccaaatttggtcttctggaataccaccaaataaatctacttcatctgtcctctgaaggcctttcacatattttatgacagcaatcaattcttcaagtctcctgttccttgcctacctttttcaccctcctcagtgactccttactgtgctgaggttttctcactaggggcaggtcaaggatgaggcaggtgagatgcctaggacacagttgtgtgaccctgagagtgagtgcctccttgcagtttgcctctttttccccctcatcctagtcctagctctattgcttgccatatcccaggcttagcagtaactccaaatatgtaaatatgtgaaaatgagtggatctagtctggggtgatttgtaggctgataaggattaagggttgagatggagagaaagcaaatttggccaaaacccctactcaatatcattacacacgattccagtgaaaactgggttcagaagctgttctacctcttcatcaggtgtctgtttggagaagtgagtctccaggacagaagtcctctattgaataagctctctcactttgaagcctgggctgtattggtaaggatgaatttgttttcagaatcatgatgtggacttgatcttctttggagagaaggagtgtgcacaatcccactcttagttcagtgggaagaacctcctcggtctcttaattttgctttttatcatagttgtcatagagctcaattctgcagtcctcagacactgcagatcagaaggacatctgtgtaaagagattcagctagttgaatgtcaaactagtgatagcaaaaccatggctcaggtaaaacgacacagccatggactgcaagagcttgatggaagttcccctgggagatataacttacctagtaacctccattcttaagacaatctctcaaaatgtgatactcagatcacctgcatcacaattccttctgtttatttcactcataagtattcactaaagattctaattttgtaggttaattatagggtccagaaatttggactttgaacaagtaactcaatgactgctccccactttgagaatttatgaagtattattcaataagctgttaaactggaagggattactctctatttattctattttcttcctcacccattcgtactttttctcccttcctctatcatcactcagataattggatgaaatatctatccacctttccctctgcttactctttttttcttttcccttttttttttttttttttgagatggagtcttgctctatcaccaggctggagtacagtggcctgatctcggctcactgcaacctctgcctcccgggttcaagtgattctcctgcctcagcctcctgagtagctgggactacaggtgtgcgccaccaagcccagctattttttttttaatttttagtaaagacggttttcaccctgtgtcagacttatccagtattcaaattagaatcagtcattaaaatacatttctttgtgtgcctttgattttctgattattttgtaccatactcggtattctaaggcctgggggattgtgggggggggtggaaaaaaaaaaagtcttatccctggggcattaacaaccaatacctaggccagatcttactctccagtcaactacccctctcctggaaaagatagatcaatggaaacatgatcctcccctcaaccttcatccctaatttccctcccttaccagaagctccacttgggctttcaccccacagtaggaaaacctgagacatgggcacctagccctgggaaccctcttcacttaagttgttgttttaaactttgagcttccccactatctccctctcttttctgagccattgcaaggatccaatatagactaacactgcacttgcacccttagttactggacagcacagagtggcctgggcttgttatttattttgttctgttaatactgtctcaatttgaatatgatttttcagatacccatttcacttgcctttttcccattggatgtggaaagagctaaaactcccagccaaattattccccacactcccgtggaaatcaatatgttcagctgcatttagtatttgacatttatttctattaaatgtcctcttattttcggttgttttagaattaagattttaattccaattttattgtcttatatgcaagctatttcttttagttaaattagccacaaatttgacctgcagcctctattgttgttgtagaagttgttgttaaaatattgaataagacagaaccaaggacagaaccttggcatgccactagagacttcatttcaggatggcctttgcatgatagcaaccgtgtttcatccgctgaggcggcagtccccaacccttttggcaccagggaccagtttcatggaagacaatttttccatggctgtttggggggtagggggaatggttttgaaattaaactgttccacctcagatcatcaggtactggattatcataagaagtgcacaacctagatcctcgcatgctcagttcacaataggtttctcgctcctatgagaatgtaatgctgctggtgatatgacaggagatggcgctcaggtggtaaggcttaatggcctgccgctcatctcctgctttgcagcccagttcctaacaggacatgaaccggggtttgggaacccccggagctaaggcataatcccagtttgacagatcaacactcaatgaattcagatgttcatctagctataaatacacctgacccacatttctactccttatcatcttatttctccagctttttctcttttattcagcaatgccctcaatattccttctgaataatattcctaaaactgaactgtatttacacacctggggttcacaaatgctggcttctgaactgatagcgtgttaccttcatcagattctctggagagctttttaaaaatgccacaccaggagattctgtttcaagggatctggaataaggttcaggatcttggtactcaaagatggggtgattttgaagtgtgtaatgcttggaggctagtggatgatctacagtttttccttgagtcagtatccagcaaccaaaagaaaagaagcctatgaaattattttggtatttttcatagctatgaactcatattggcttagggtaatcatcatcttctaactcgtcagaaactggagtatttttgttctagaattttgcttttagtgtgtgtgacacagtttgctgatggattgtagcaacttctagaagagcaattgctactgtttcttatgttatataatattacatctagttttttttcatgaatttggagcagtattgtaaatatttgaacatttatcattattcatttaaattccacaaggatgaaaggcaccacatttggggaaatatttacattaagcaaataatataattcccttcatttatactattttacagtttattgagtcaatcaaaataaggtagaataagttagaaaaggtattactaacaccatgattatgccaaagtcataggatttacacagttacaaggaattatggcaagagagtactgtgagcttacctacagatgtgcttagtactactagtttatttctcagtacttaggaccacttatttcaggtgattttttaagataaaagtaccagatactctaaccagtgataaataagacaagggatctaatactcagttaaaaaaattataaggtttggctttgggggtcagctttggaatgggtaagaatgatctattttgacattcgttttttgtactatgcctaagtacatgtgaatctatttgtacttttaaggaataaaattatcacagaacttaagatatacagatgatattgttgatttatttttaaatgccacagtctcatctgctttagtaaacttaactagtttcatacttttcatgcctactggtaattttcgtttctcctaccttttctgcttatcatttgagagaagttttaacaaatacacagttagtttaaaagtttgcagaagaagaaaaaataaaattaaaacaaacaaaagtctgaattaaatatgaaacatacagtatgccactctttgaataattgacttttcctgtactagacattttgattctttacttcaagcaattggtgctgatagggaattgcttgttggaaagatttaggaccctgtccaaagcttctaagatcatggtttaaagcagtaagagctattatacctagaccaatggcttttttaaccactgctaagcctttttgcaggtatttctcatttgtaggaatttccaggtagctagaagcccccactactatcactctgcacaacctccaacatctcttccccaatctaagaatctagtgacttaaaataccaacactgtaatcactacttgcaaaacaaacaagccccaaaaaagcaagcaaacgagaatggtaattttaaaattacaggcaaggaaaataggtcattctctgttaacagttgggaagccttgcattaagagttaaattcttgatttaaaaattaaaattcaatgtcagctatctagcttaaatgaaataaagtttacatgtgtatgtttaacctagatggaaatttagaggagtaaaattatgcaactaaacatttaagaagtactttggacattttattctttatttaaatatgaagtcttagtgaatctttttggctctatcacatggtgttatatgctacgtagtcatactgggtgcgtcttatttgctgcagcagtaacgttgtttaacaggccttgctcacttagcagtgctatttacattatcatttctttccatatatttaatatatataaagtgaaagtaaatataaccttggagtttgaacaaagatattattgtaactcaaaacttctactgtattaactgtagaaaaaaaattatgattatggtcaactaatttgcaagtatttcaaagaccccgtatgtaagagcctatgctttatcattttgtgagcagtttgaaaaggtttatttatgaaaactatattgatttgttggtgttacttgtatttgaaaacattaaagaatagtatagttcatcatcaatttcaaggtaaatctattcttaaagaatttcaaatactaacagttaacttgaggagctatatattttttaagattttttgacgttaggggctcaaaggaatagtcatagaaccacagacagtgagaactgagaggggctaaaggaatacagtttgctggttcttgaacttcacgtgttagagcatctgcaagccacaggcacagtgctatgatatattgctgcataagatgactaaggaatacttttttacaagtagataattgaatcatattaaatatatacataatatattatatataataaattacatctgtaggtacacacatctactttgtaaaattaagcataatcagctatttctgagtttttctgttaaatatataaatatggcttcatacttatacttaaaaaatattctagatgataacaggcccccaaaatttaacaatttgtggggttattaataacactagcagcaaataaaagactcatttattcaattagttatatattctgactggtatcaaacaattaattagatttttacaaagaatataaaatagattttaattagtgtattggtatgttggtcaaatatgttaatttctcttgcccagcaattgacttctgaagcaattaattacaagagatgagaattttagtgagtatttaaaataagtcttttatgcaagcatttcttccttttttgacaactcaaggcacttttagatcatgaacttcccttctcagatttacctttttaaatattctcttgcgtgatatcctggtagcaagaattgcctcatcttcaaaaacaacctcaagctctttagaataaggagcatcatttctgttggaaaataaccttaatttcctttgcccgtttgctgtctctctggagaagagagggcactgatcagccagcctatttttctcctcttttatactttatagtattaatcaatcaccttgtttaaacacaaaattcagtccaaagttactagcttgcttatagcaatattgcacttccaaatgcccttagaatatctcttatttactttctgcaatctcattcctttttactgctttctcaggcatctgctttagcattatataatcctatatatcactgttgtgtgttggtcttcttctagattgctatttaccctccatgtgacatttaatattgatgagacctccaaaaatatggaggttacatataagattcagctgctgtggcaagcaggagtgcaaatctttaaaacgaagatgtgctctatatttgaggcttatagttcccaatttctaatatatctcagacagaaacttttcagtggtatgagatttgtagtaggagaaagggttgggggtggaaggaacccattgtgtaatacctttttcatcattcatgttctttatttatcaatgtgttgagtatacatatagacagtcactggggactttatctacatagaagaaatgtagccatatttctttccatatatgaaaagaaatggtaatgtaaatagaactgctcaccgagtaaggcctgttgaacaaggttactgctacagcgatgtctgtgaagccttcccttaccctccagagagagcctgcaaattactctgggtacccactgcaccttgtacatatctcttcttattctcctctacatcttctctactacttgaggtaaagaatgtaacttacacacgttagtatccctaggaactgtgcctatagcatagtaggtgcttaataaatgcttactgaatgatgaataggtgattgcccatttcatattttgtctctctctgagactggagccttatttctttgtccctccagtgcctaacacagtgccaggcatgtcatagatctttaatacatacttgttaagtgactgaaatgaatgaataaaggtattttttaaaagtaaagacgttcagtgaaattcataatgggatgcctctggccaaatgcgtgttaaaattttctatttccccagttgttttcaatctaacctgtgacattgagcagatatattttgttttttttccatttgggaaatgtctatgatgatgcttattcagattgtgctttttgaaaaccaaaacaatgtgccataaattgaaggtattgtttaattaatgaggtgatttgtatatgagtaagaacagggcttacactaaagttcctcaaataaaacatgaccacgagccttcccagttaaaagcaaaaaatgacataagcaattatgtgtgacatgtctcttaagcattctcatatctgggcttactctttaaagcctcatcttttagcccttctctagagatcattcctgggacagagaaaagctattataatgcagtttcacctttcaaaaacaggtttgtctgtgttcactggatatgatggttcctaaaaggttcttcctgtgtgctgactaatggattaacaatgtgcacatttatccaccccaaaggaacgaagaacaggttgacttttaaaaccaaaatgtcctatacattacatgagcaatgaaattgaaactcttttctgctagtttaaattatttggcataaatgactgaaagccttcgtcccttggcagcatagtggagttgcataggaatagttaaattttggttcaaatggataatttttgcattttagttccaatccccaatgggctgcagtaaggactcttcacgtatcctgctagcaatagtacataaacgacattgttcggcaactccagtgctgaaggaacatcactgttatgcaaggagacaaaacccctggctgtttctctaccacaaaggaatacagtagattcctttgtcttagaaagaatgttgtccaggtctcatcagctgcttaaaagcacatacaggagtttggaagattgaactgcaccttctacacaggttaaatttcacggctctgaaaatgtcctttttggccaaatcagtaacaatgcttgatttgcagcatttgttgcatgcctttgaaaaaatacagctgcttctttcccaagttgtttattagggaacaaggttaaggcctgtccagctcatgatgtatcagtggcatcatcgtttcatataaggaacagctcactgagagactcacatacacttcttggttatttaaaacaaaagcctcctgtcttaatgtttgggagaagcttaacgtgccaggcagaaatcatagtaaatgtcaggtatcctaggacctgatccagccatgcagaagttactggtttcattcacacaggtttttagaaaaatgtaaaatagcatgtaaaaattggggaattttgcatggaaatccagatgtcttgcttcttttgaacacatggtaggctgggactacaggtctgcaaggcagcctggcactgaatcccaacagtgctgcttccattagatcaggtttatgctcccagatcactggggtctccagttcttcctcttgactcccttatactgaggccagtgtctgttgctctgtattgccaccattgcactagtttttatttttatagaagagaaacagttctctctttttctttctttctcacaggagaaaaaacaaagaaggacttttccctgaccttctagctgcttcacttaatttcattatctgcctggctccctctgagtttgggactctggttgggccaacatgtagtgtgtggtatgggaattacagtgtaagttgagatcccaaatgttggtgaattttaaaaaatttcccaaatattttgaaaagcagaaaccatatgctaacataggtgtttaaaattatgtccaaaccagaacttattattactaatgactaacaattgtaaggttcagtgtcataccatgagagtcccaccatgtggttctgacaacctacaaaggaaatgatgatgataaagatccctaatatttagtaatcactcactatgtgccactgaacgaaacattttatgaatgctatttcatttacttctcaacaactaaatgagttatatctccatttttcagtaagcaacttatgtaaagccacatagccttacatgtgaatgagggagcccagatttgaaggtaaacaatcctagagcatgatgttctattgttgtcttctaggtactgttgttcttgtcatgcaggtgagggaacatcacttaaaatgagtacaggtcatgcatcacgattattacacacaggtattaagtggtttaggtagaattaaaacataggtctagagcttcagagctccaccctttataccaaattgcttttctagattttcagaaagttatctaaaattaatttttactaagaaatatgacatatttttaaatggagaacttaaaaaagttgctcaaaaaaaaaaaagagtaaagccttagggtcaatgggtacccgttcggttccaaatatgtataggcactgaaccagcctgacgagatagggaagacatgcactctgaagattccacttccgggtatgttgggtggggatgtatatttagagtttagcttcataggatactctgctgaatagtactgtttgttgtacctattgaaatgtagaaatgttttgtaatattatgtttctgttatgatgaggtatttttgggggacctgccccaaaaatcacataggttcttttctattttcctaagcatcagctggcttgagaaataaagggacagagtacaaaagagagaaattttaaaactggacgtccaggggagacatcacacgttggtaggataggtgtgggtgacagacatcaagtacttaacagggtaatagaatatcacaaggccagtggaggcagggtgagatcacaggaccacagtaccaaggcaaaattaaaattgctaatgaagtttcgggcaccattgtcattgataacatcttatcaggagacagggttttgagatcaaccggtctgaccaaaatttattaggcaggaatttcctcttcctaataagcctgggagcgctatgggagaccggagtctatctcacctctgcaatctcgaccataaaagacaggtacgccccggggcggccagtcccgagacctacccataggtgcgcattctctttctcagggatattccatgctgagaaaaagaattcagcgatatttctcccatttgcttttgaaagaagagaaatatggctctgttctgcccggctcactggcagtcagagtttaaggttatctctcttattccctgaacaattgctgttatcctgttctttttccaaggggctcagatttcatattacacaaacacacatgctgtacaatttgtgcagttaacgcaaatatcacatagtcctgaggcgacatacatcctcctcggctgacaggattaagagattaaaataaagacaggcataggaaatcacaagggtattgattggggaagtgataagtgtccatgaaatctttacaatttacgtttagagattgcagtaaagacaggcataataaattacaaaagtattaatttggggaactaataaatgtccataaaatcttcacaatccatgttcttctgtcatggcttcagccagtccctccatttggggtccctgacttcctgcaacaaggtatggtaaaaacaaataggtaatttgttatgcggtagtctcagaaataagatatgcaagcttagggctgggtgtgatggctcacacctgtaatcccagcaggccgaggcaggcgatcacgaggtcaggagattggaccatcctggccaacatggtgaaaccctatctctaataaaaatacaaaaaattagcttgtcatagtggcgcatgcctgtagtcccagctacttgggaggctgaggcaggagaattgcttgaaccagggagttggaggttgcagtgagccaagatcgcgccactgcactccagcctggtgacagagtgagactctgtgtaaaaaaaaaaaaaaaaaaaatgcaagcttagtaattatgaatgttgtataaattgctactatttatttagttgctacatccctatcattcacagggactatataaggtgttttccataaattatcactaattcttataatcacgcagcctgatataatcactatttccagaacagcaaactaaagcttaaagaagggatgtgacttgcccaagaacacacatctgtgaagtcatggaagagggatttgcactctggtgttgaaaggccacactctttccattatatcatgctgtccttgttctatgtgcaaaattatcaaatttattcactaatatctattcattttatttctgtaaaatgaccaatatctactcttgggattcttgtgagaattaaatgtcataaatcacataatgcacataaagcacttatcaccaattgaacatatggcaaatgctccataaatgttagtttttgttatgtattttgttggccaggtgccaggaaatggacaaggtgctggggaaacaggtaaataagatgctgtctcttttctccaagggcttataattaggcataggagaggtgaggtaggatacattttagacataattctactatagtgtgataaatgcaccagcagatacggaaaagcaatttggtataaagggtggagctctgaagctctagacctacgttttaattctacctaaaccacttaatacctgtgtgtaataatcatgatgcatgacctgtactcattttaagtgatgttccctcacctgcatgacaagaacaacagtacctagaagacaacaatagaacatcatgctctagggttgtttaccttcaaatctgggctccctcattcacatgtaaggctatgtggctttacataagttgagttggtctcagatggagatgaggaacttgttggatattggagtaaaggtcactattgctatgcaaagagactggaggcattttgcccctgccctagagatgtgtggaattttgaacttgagagagatgatttagagtatctggtgaagggaatttctaagtggcaaagtgttcaagaggaagcagagcataaaagtttgggaaatttgcagcctgatgatgcaatagaaaagaaaacctcattttctggggagaaattcaagcttgctgcagagatttgcagggagattaaagaggctattacatctataaaacaagaataggctgccattaaaaaatgagcaactaaagaacaagtttttagaagttagaaacataatcttttaaaaaagggtaaaaaagtagaatgaatatagctgaagactaaattagtgatctgcaaataaagtcaaggaattctcccagaacatagatcaaaaagacaaggagggctgggtgtggtggctcacaccggcaatctcagtactttgggaggccaaggggagtaggattgcttgaggccaggaatttgagaccagcttgggtagtatagcaagactctgtctctacaaaaaaattaaaaaaaaaaaagactccgtacagtgacatgtgcctgtagttgcagttactctgaaagctaaggcaggaggattgcttgagccaggagttcaaggctgcagtgagctgtgattgtaccactgcatccagcccgagtgacagagtgataccctgtgtcaaaacaaaaaaatatataggacaaagccaaagaatacaatgttcatcttatattataggcatttcaaaagagagaaaacagaatgttttcagggtgtgtgtgtaattgtatatataattaaataaaaaaatacaaatttcagaagatagtagacagaaatacagaggagaaaagagtgataaaagaaataataggatacaattttttcaagctgagggaagatttgagccttcagaccgaaaatactcaccgaatgctcagttggaaaaagcaaaaaacaaaagatacatacctagatgcataccagttaaatttcctaactccaaagtgtaaaagaaagtctttaacatttttggagaggaaacaagaaaagagattatttgcaaagggatgaggataattttattatcaaactttttaaaaagttagctattaaaagataatcttttgaaatattttgaacctagcattctgtaaaaatccaaactgccactcaagtttgaggcaaaataaagacatattcagacttataggcattcaaataatttatatcaatgcaccttttctggaaaatataatactgtaaagttttactccagtaaaataaagaagcaatccaagaaagaggacaatatagaatacaagaagcaatagtaagaaatttataaatgattgctagaattgtgtctatgaagcttatgattgttaaaattgtgtctatgaagcttagggcaattgttaagaaagatttccttaaaattggaaagtataataaaaaaactctatgaatcatcaggaactaataaaattgcagatgatttcaatcaaacctttcagggtttggagtgggaagggaatcttatttgggaacaataaattatagatactgattaatttcctttcaacatagaagaaaacttgtttaattatatgtgtcttaagggtatccattaagagaaaaaattcagtatatacaattgcccaacaattaaagggaaaaaatgaacaaagacaatttaatcgatctacataaagacaagaaagcagaaagagaacaaaaagcataacaaacagaaaacacaaaaaagatgacaataaagaaacagtactgatagcatagcagttactacaataaatgagactgagtgaaaatcttacattaagtaacagagactatctaaatgggtcaaaaacaatcataaaaactaaacactcatgtagcgaaatataggtgtctttaatatgtatataaaaatagaataaaacaatgttgaaatagtggtctatgtaaaaatttttagagacaaattgtaataaaaaactggcatattaacttaatataaaacaaaatggaattcaaagcaaaaaagaatgaatgggatagagagtaatacttgattacaataaaatccaccaagaaagtataatggctgagtctttgtgcaccatggaaaaagcactggaatgaatcaatcaaatttgttgcaattacaagaagaaatggacgaaaacagttagaagagagacttctctccaaaatctctgttgtgataacttacctgctttactttgaaaccttaaaaccatttgagttcttttgccaattccatttaattatcacttattttcgtattaacattctgctgctgctcttttcctgctctctccctaaatgcattatcaaaacagatattttagggctttttttggttgccttccaaggtgccacagtcaagagggctctacttgtttggtggttttagagtgaggcaagttaggttatcttgttaaaatgttaatgggaagattatttggttatcatttctctgaaggccctgctcttttctctcaccattgtgccatctaatccttgaatacaactctagcagtgctgaattcatggatgctcacggttagatgtaacctcaatagccatctcaaaatcatttcagaccaagacatacagctcagtattctgagttcttattgcagctaccactaactgtctgcctttaagcaagtcacttcacttctctggtctcaatgaacttgcctttaagaaaatggggctagaatcaaaggccattaaggtctttacgttctctaatggtttacttttctattgtatgatttttactcatatttttatctatccttttctaaaatctgacattgacaaaacatttctttggcatatgttttggaataggaaaactgactttccatctgcttatacttgccagatctttggaagaaaagaataataaaatgttggagacggtactagttggtataggtaattgagaggacaatatgagttgtttatttctcaggtttattttggtatactcgttgtccttagttatcagaaggtctaagtccatagtggtgctgagcaaacatctcttgatttagtgtctctttctctttcctaataaatgtggcttctctcttatttagctgcattacaggcactaaagagaaagaagaggttcgagaaacagctcactcagattgatggcacactttctaccattgagttccagagagaagccctggagaactcacacaccaacactgaggtgttgaggaacatgggctttgcagcaaaagcgatgaaatctgttcatgaaaacatgtgagtgactctggtctccctctgaatcataaattccctcagtgttgggaagaacctttggaaccatatgatggttttggcaggaatgggtttactcatttgaggctctttgacatgttgaataaaatactgtctcagagaaagattaaaggttatagcaacaacaacaaaaaagaccatgaaaaaagaaagggcattcatttttcctgtaatgtttccccattactttatgattgctggaaactgtacctgtaaatattttaattctacagtttaaaaaaggcttcgatttcaacctgtgtgagggtgttggatttataggatagtggctgtcaaactttggagggaatcagaatcacctggagaataaataaagagaacacagatgcccaggctacttgaacttgcaaagtgtttgggtccatgtgattccgatgctaaccaatgtctgagaaccactgacacagaagaatagtcatgagcatggatttgggggtcaaattttctgggctataatcccaggtcaactgctgactatcccttgggcaatttattatactttattcagtttccttatatgtaaattagagattataatagtacttacttacctcgtggttattgtgagattcaatgagatactagatataatgcacttagtatagttcctggcacaaagtgagcactcaataattaatattcacaatttgctttacattcacactgggaaatatgtctgggaccggatcctttcctgatattggatgtgatagtggaacctggggcaaggatgcacaagagcaatgagtgcctaagagatgcagacaaatttctgtagagtgggaaaaggtgaaaaaggtggtggctgggggcagtgaagacaactttgctaacattttcttttctgaataattcattaacaatcagcctccattttgacagcttcaggtagacattagattcattatcagagtcaaaattctctattgcttttggatacaaaaatgtgtcacaaaatcagcctttccctccaggcagcttggcagcatcataccattgtattacatttgagaaaaatttgttcccaggcccaaagttgagccatacattttttcatattccttttaaaaatatatttgttttatattcagtataaatagaataataaggtttaaagataagggatggtcagagggaggtaaaagtattctttttgattattgcatgaaaatatgtcaaaatagctcttacagagtcagggaaactcacaaaaaaattacttccactgggaatcaaacttttggtatttaggctacttaataatgagggacattgtcagttctcttatatccaatcagtttggcctagtttcagagttggaggaattactcagagataagctactatagaaacataccagaacctggcatgtagacaccgacatgcttaggcgggtgtttaggagccagtgaagctcaggtgttggaaaatgtcttcaaagtggctgtccatcctgagcaagtagctacctagatttatttgctgcagttgctaattcttctgagggctgtataggtttaatcctgctctctttagtaacctctcagggcatcaccgctatgcaaaaacccttggggagccaggatttcagagctgctaagtgttacaaaaaatagatctctagacccagtgtttagcttcaacaaagggccgctgtcagataggggctcctaaaagctgccaaagctcatctagttacagtggtcctggtggtctgtggtagtgtttcctgcagagttgatacacagcagcatgtatttaaatttgtcatatgccctatcagacaaaatttcaaaatgggtttacaaatagtgatagttataaaatacttttatttttagtgagttccaaatgtaataggtatttacttaatgtttataatatatggattattaagtttttaaaatataagttatctttaaagtttataaatatcatcaggaatatttatcctactcaaataactaagaatttatattaaatgaactgactttttatataggattatatctaaattcataattataagttaaaattctaaaatgttcaacaaaatatgatttcccagggatctgaacaaaatagatgatttgatgcaagagatcacagagcaacaggatatcgcccaagaaatctcagaagcattttctcaacgggttggctttggtgatgactttgatgaggtacgtaacccaatatgaagaatgcaggattgtggctgctataaagagtagcttcctgtcatatatagtaggcatgttcccttactactgaaagaacaagtgatatttgtaagaaaggtacttctcttaagagaaaaataaagtgttagtacctctgatttaaaggaaagatgaatacagtttggcaaacagtggcctgattaagttttcagctattaaggaaagaacagcatgtgattgtgtaaagttagtgacttttagtggttgaagcctaaacagccccattacgaggaactgagtgcttgcacatctgggcaaaacaaagtagacttcgtcattctgcatgaaacagacgtatcatgctctgtagctgttaaattagaggttaggctgcctctgtttattactcaggctatgaaaccaaataaatgtggagtggcattattaacacacacattccatttagattaatcagtccaataatacagacagactataattataatggtgatgtctgcactgtgaatttcaattgttctgctcaaagcacacacaagtaggactagtacacatttagaaacatttccaaagcttggattagcatggcaaagaatccaacttcctgcatctatgtgatattaaaaataacacatttagcaagtaagacctggttccatggaatccccaaaaatgagaatggggtatcaataccttttaaaaatggtgtagacaaggggtcagcaaaaatatggcttgcaggccaaattcttcccgtgacctgtttgtatatcccaaaagctcaggatgggtttcacaattttaatgttgtagaaaacaataacaacaaaggagactatggggcagaagaaaacatgcagcctgcaaatcctgcaatattactatttgggcctttacagagaaagtttttcaactcctgatgtagactagtaagcatctagtgagtacattatgatatggtggaaaggaatctgggcttatgtggacatctgggctctatcatttgttaaaaactttgtgtaagtctcttttacttttctgactgttagttttcttatctgtgataatgaagatttttggatccctggattatctccaaaacatcttaagttccaaaattctattctcaatggtcaaattagtgtttggtacctaaaggatgaaaatgatggaggagatgattactctgttgttaccatattgctaaagaaaacattaatatgtttctgctgctgttgataacgatgatgcactattggcaattgtgggcatacattcggcataggatagcttgttctgccattactatatttatggtatttgtccctgattgttttgtgagcagaaataggacgccagggtattcattctgttccattttagtcatatagcctgtggagatccatcaagtacacaactatattgactgtgctatttcatacggcccaatgctatacaccttcatattttcttccctttttatgaggcgaatttaatagaggtcagacaatctttagcttgctgcaattctgatacccactgacttaatcaaatgttgtggttggcttaaatatcttctctctttccccacagtgttattactctcactttaatattggataattatttgtttatgtgccttccccccacatttgagtgtaagctccttgaatatagggagtgttgattcaactttgcatcccagcactgagttcaaaatctgcccaggagtgagtgctcaatgaatttgttgaataatgaatgaatgaattctctcattcgttattcatccatgaaagaaaaatctacttggttgaatataaggtgtcccaagtcatttctaatagtgacaacctcataattccatcaatgacaagttcagttgtgactcccaaattctctctgagaggggttggactctacttcaggacttatggagccagtgagatctgaactatctgagtcatctcagaattggcataaggtgacttacatttttaaggtctcaaactagccttgtctctcaaaagtttttgggacagagagtagtttaagattaaaccaggctctctcggactattgctaaaagaaggaaatacagtatacctatcttgaattgaacttttcttaacccaaatgcacagcataatttatattggctttggtgatttgataaaagaaccatagtatctttaattccttttactttctgtacgttatggttttgctatacctgttgttttattttcaatcgcattagcccaaagaaaaacatttatttccaccagttaacattttgtggattctaaacagtagaaaagaacacattggaaagatgacagacaaggtgtaagtttcccagaaactgtggggaggttatatattcagctagcacaaattacttgaatggctgtttactgaagtattagaagattaactacaacaaatttgcacaacccagaatattcattttttaatcattgctcagtgttgcaaaaaagacttagttttaaaataaatattccatttcactgggttctcacatatcaattgggtagcagatgttcttgttattgtgtttgaggaaacccatgtcttgaaacgttaactccataattcttcctttctcctgtgttcaggatgagttgatggcagaacttgaagaattggaacaggaggaattaaataagaagatgacaaatatccgccttccaaatgtgccttcctcttctctcccagcacagccaaatagaaaaccaggcatgtcgtccactgcacgtcgatcccgagcaggtctgttacccagctcaactacatgtggtcagatagttgcctaaaatgatagccaggcccattctttttagcacatgtttttgatttcaaactgaacacatttttatatgtaattcatacctgttttctatgctgaaagtgtgaatgtcaccaattactaatttttatctattttatgttccagcatcttcccagagggcagaagaagaggatgatgatatcaaacaattggcagcttgggctacctaaactaaaacacatttttgatacctaaattaatgagctatagataaaatataaaaaatgtttttaccaagttcagaagttaacaaagactctgctttataattatattgaatgaataattgtgttttaagcctcctaagtaaaagtaaaaaaggagtcatgtgcatacatagaatcagtgatggaggccaggcacggtatctcatgcctataatcccagcactttgggaggctgaggcagttgagaccaggagttcgagtccagcctgaccaacatgaagaaaccctgtctgtactaaaaatacaaaaattagccggacatggtggcaggcacctgtaatcccagctacttgggaggctgagtcaggagaatcgcttgagcccaggagatggaggttgcagtgagccaagatcatgccactgcactccagactgggcaacagagggagactccgtctcaaaaactaaaaaaaaaaaatacatttagtatagcggggggtgggggggagaaataatgttatttcctatgcgaatgacgtgtatccctgtacccatggtaaatgtaaatatactgtgtctcttttgggagagccttttagtagaggagtcttatatgagtctctacataagtagtttcacttgagttttgcagtttgaaatcttaaaggagctttaattgacatttattataccaattaagcttggaatggggcaatggatgcatttcccaaaacgtgtgaaagcactaacagcttatattgctgaatgagaatctcctgggtgtaatttagccacttagggaactgcgtgaacactcccaggccattatgatgctgttacagcttcagtgtataaatgcatgagtattctttctgttctgttttgtgctctcttgtacatttatttaccctttacagaatatttcttgtaaatacataaaaatattggcaattaaaagtacatcttgaataaaatgttggccgttattatttttaaatgaaaataaattacaaaattacgtattacccataatagatcatggaccatcaaatgacaaatatcatttaataagatattttagtattctctacatttgcttaccaacatggtggaatggaaagagcactagacccgatggtaggagtcctgggttttagtccctgctctgacactaacatgagccttagactctctgagcctttgtttcttcactggcaaacttaaggattggactggatgatttctaatgattccttcctgccacaggccttttgcacattctgttctccttggcagtcttcctaccctgcacagtgcaggtaccaatcttatttattccttaaatcttagttaaaaatgtccttgttttcggaaactttgcttgattgcccaaagtcagtttttcccttatatgctgttgcagtgctctaccttctgtcatttcttttcatggtttatattacatatttacttgaacaaatctttaattattgttgctcttccctgctgagctgtgctagccacgagggcagggactgcatttcttttagttcaatagttgattcacagcattctgcactttctcatgagcaggcaatcagtcagtatttattaaatgaatggcaattaacagtttatatcttttgggccatgatagaataacaggacctagatttaccttatactgttaaacaactggaaaactggacaaaatacaggaaacaaaattttttcagacattggacaacaggcagcactggacaatgtttcccgggaagggaaaccagtaatgtgagcacttccatggccccagcccctgcctacacagggaaagggaacccaagtagagcctggtggtcttgctgagttgagaaaatttgtgtggaagagtgctagtaaggaagtttctgcagagattgagagagagagagagattgagagacagagaaagagagccgtaagcaggaaggcatgagctatctgtggtctgaatgtgtccccaccccctaaattcatgcattgaaatccttacccctaaagtgatagtattagatgtggggccttttgggagttgatatcattaatgatcaatgagattagagcttttataaaataggcccaagggagctcattcataaccttcctccatgtgaggacacaataggacacaataaagaaggtgtcattgatgaaccaaagagtgagccctcacaagataccaaatttgctgatgtcttgaccttggacttcccagactccagaaccatgagaaataagctacccagttgatgatgttttgttatggcaatcccagaagacagagaaagagagagggagacaaaaggagagagagagacaaagagagcaaagtggtggtggggggatgggggaagagagagaaggagaggcgagaactctggaactcagcaggagagtactttcaaatcttcctctgagaaccgatctgcatacatgtgtgagaagactactgacaccaagaagaactgctggaaagacaggcggatcaatctccagagcacacacgggtccaggaatagcttatatgcccactagccagagtggaaagacctcctaatacagggggcattaggttcagttctcagaagggtatttatcactagtggggccatattacacctagactaaagggcacatcccacaaagcctaaaagcaaacctcaaaagtatcaaatgattccaattgactaaattgcatcccagaaaaaagcccctaaatacttaaagaaatataaaaactatcaattaacagtaacacaatgaataaaaccttggcatccaatagcataaaattcaccaagtccagcattgagtcaaaaatgttcaagcatgccaagaagcagggaaatacaatctataaccaggagacaaacagtaggaacagactgtgaaatatgtccaagaaaggagaggaaaagcatgattgtgttgaagagaaaagtggaaaatattttaaaagacccaaattgaagttctggagatgagaaatacatgatctgaagtgaaaaatgcggaatatcacggatgacattaacagcagattggacactgcagaagaaaagatgagtgaacttgaagacgtagcaacagaaacaattctaaataaaacacaaatgaagaaaaatactaaaaaaaaaaaaaaaggaaaaaaagaacagagcaagagtgagctctgggaccatatcaatcagcttaacatgcaggtaattggagttctgaaatggtgacggtgggctgggtggatgaggggcgatttggcagaggaaacagaatagaaaaaaacctttgaagaaataatggccaaaaaatttccaaatttgttaaaaattataaaccacagtccaatgaaactcaacatacctcaagcagaaatccctgtatccttcaataacaaaagttattgtagaatgttaaaatgtcgaaatctcatgagtgaagtctgggagatgtctgaatgtctctccttactctaattaaaatacacatacctagccggtttagctagacctgtgagatccaaagagtatccattagccacatgaaatgagcattcaataaatgctagtacaattgagaaactgaacttataattccatttaattttcgttagtttaaatgtaaaaactgacacgattcatttattaaaaaactttaagtatgttcagaactccttgggtatgtgaattgactttttattttctttctttctttctttttatttatttatttatttatttgatatgaggtctcactatattgcccaggctggactcaaactcctgggctcaagcaatcttccagcctcagcctcccaagtagctgagactataggcatgtaccattgaatctactttttttttgagatggagtcttgctctgtcaccaggctggagtgcagtggtgtgatcttggctcactgcaacctctgcttctgggttcaagagaatctcttgcctcagcctcctgagtagctgggactacaggcgcgtccaccacacccagctaatttttgtatttttagtagagatggggtttcaccatgttggccaggatggtctcaatctcttgatttcatgaactgcctgcctcggcctcccaaagtgctgagattacaggcatgagccactgcgcccggctgaatctactttttcaactgtaaaatttatgaagtctttatacaaaccaagcacttcaaatggaaatttgcatctcatttaaaatgcactctaagtgtgaaacatgcattggatttcaaagacttagtattattagaaagaatataaaaatatctcattaataagtgtatattgattacatgttaaaatattattttaaatgcattgggttaaataaaatatattgttaaaatctatttcacctagtttttaaaactttaatgtggctcatgggaaatttaaaattacgtaagtggcttacattatttttctattgagtattcctgggcaagaccaaatcctggctaccagcaagtatacagataatgtataacttgaaatactaagctgctaaagtattaaaaataaatgtttataaaacatggtattttacattgaaatggaataaaaatactttgacataaatcataatgctgctcctctgtcgacagtaaggaagaattgaaacacgagagaacagttgtaaaagtagatcaactttggactgaaagttgttaaaaagaataaagatattaatcagccatctaacagcatttttgttaaagcatccttagaatgggtagacttgtttggaagttataaattctggtatgtttgctaacaatgggtcctacttcttacagggacacctcagtggtagacctcagtttgggcagtgctgggtaactagtctgttggtattctgtctttttaaataaaaggttttctaataaataaggtttttgtttttctttttggttgtagaagtgcattcaagataacttaagagaaaaagttgtatttattggaagggatttggatattccagaaatgaaagcaatgtttaaaatgcaaatctgaggagggtcacaaaccagggagctctggaggtcagggtatctctggagttactccttctgagcattcaactctagggaaagtaagctatcaccattgtgagtaagctattctactcaagagtcaaattccagatgcagaacatttgattggccaagcttggtttatgtaactgcctctgaagtcagccatctgaaccgttataaactgagaagcaggaaggagggtggataaagtatagtgaagatgatcccacttgaagaaaggggaatgcatgttggccacctaaaacctaaaaataccacctacaacaataagtgtccgtgcaataatggagaataattaaatctgtattgcagtgtttcttcattcttggcaaacacagaatctgagcaaagacttctttagcagaaactggggtagcagatagtttatacactgcaattgtatgtgtcctactaaaacaagatggacaatgtattaaagttagcaagcatagcaaaaagaaagaagaaaaaaaggaaaaacccaaagaagctaagactaataaagatatcttagtaccattacattacatccttagggaataagttgataaaatgttagtcaatttctatttcatctctccacttcctttcccccatcttctgaatttaagatggacattaatctttccattggagaaagtgtttgttaaagtagctaaaatcctcttctaacttcaaattcactttgcatcatttgtttatttgtttaccagaagttttattgcactatatacaggatacttgagccattttttcagaagaaaaacgctcagtatacataagaggaatacagacagggcaaagcaatggagttgttatttagaagagagatgaacaaactctgagcaagtaggcaatgcttctgattatgaaccatatttaattatgatatcagaagaattaagtgtttcctttcaaaagtcagaaaacactccagtttaggcttctctgtggtgtgctgaaacagtgacatgtatgtgattgattattttgattatataaatacacacatatacacacatgcataaatatgtgtatatataatctatgcttagatgcaaattttatatactctgtatatattgatacaatatgtatgtgccctgtgatcttttgatagtctactgctctttatcttcaattgttttcttgtattttcttacttcaacacttgcttttctttcatttgcctcataaatgcaaatctttcccacattttccatgatttagttatttgtggtctctcctttctatagtctccgtagatcttattttaaattatagcttcaactatcacttctatgggaatgatttatagtacatatataatttcattcactcaatcaatatttattaaatatctattataccctaagatccaagctaagtatgaggattaaagtttaataaaacatggtccctgtcatcatgtatatttatagccatgacctctatctcaagctccagtaaattagaactcagagatttcttctagttttcctgccatctcttcaatagcagtatctttgtcttaaaatctattttgtctgatattagtatagcttctctagttctctattggttacagttcatggaaacttctttcatatttttactcttaacatatatctgtgttttaatctaaagtatcttgtacacgtcttataatgtatcatgctttttaatctattcatcaatttctttttctttttctttcttttcttttctttttttttttttttttgtgagatggagtttcactctttttgcccaggctggagtgcaatggtgcaacctcggctcactgcaacctctacctcctgggttcaagtgattctcctgcctcagcctcccgagtagctgggattagaggcgcctgccactacacccagctaattttgtatttttagcagagatggggtttcaccatgttggccaggctgatctcgaactcctgacctcaggtgatccatctgcctcagccttccaaagtgctgggattgcaggtgtgagcaccttgcctggacaatttctacctttaattagagagtttaatcaactgatatttaatgaaattactgtatctgctattttctttttgttttccgtatgcttactgtggtttgaatgtttgagttcctccaaaattcatgttgaaacttaacctccattgtggtacgattaagacgtatggtattttggaaagtgattaagtcgtgagggctctgcctttgtgaatgagattaatatccatatagaagaggcttcaaagagctgcctggcttcttcaactcttctgccatgtgaggacacagcatttgtcccagtttcctcttttgttcttctgccatgtgaggacactgtgagaagatgccctccccagacactgaatctgctggtgccatgatcttggacttcctagccttcagaattgtgagaaataaatttctattgtttataaattatccagtctgttattttgttatagcaccataaagggactagagtgatatgtctgttttgtttattaattcctccatttgttccttattttgtgttaaatatattctgaaattacattttaatttttatttaatttagctgaccactaatggaacagagacttcaaggggtacacacaatgaagagtgaagacttacaaaattagtttagaaaagtaactaaataaacaactacaacaagaagcaacaacaaacactatggaatgggttataatattcaagtatatactattcctaatattgctttcagcaaaaaaatatgagacacacaaagaaatccaagaaaatatggccctggcaaagaaaatatattccacaggaaaaagtactatttaatttttttttactacgtatttttggattattttgttagtggttcccttgaagattacaattaacaccttaatttataacaaactagtttagactaatacaaataatttcaatagtatacaaagactttattcctatagaacgccattctttccctcttttatgctgtataagttacatatttatacattatgtgcccatcaactaagatttataattactgcattatgcgtttgttttttaataaaattttaaaaggaggagtaataaaaaatgcattaatactctcttttatagttacttatgtagttacttttgccagtgttcttaattacttcgtatggattcaaattactgtctagggtccatttatttcagggtgaagaactccctttaacatttcctgtaggaaaagtctactagcaataaactccctcagattttgtttatctgggaatgtcttaatttctccttcatttttttgaagaacagttttgctgttttggttgatgagtttgtgatgagtaatctgttcatctttaagtatctcttatacatcatgagtcttttttctcttgctgctttcaagattctctttgtcattggcttttgactgtttgattacaatgtgtcttagtctctttgagttcattttttcacagtttgttgagcatgttagatatttattttcatgtctttcatttggaaggagtgtgatcattatttcttctttctgttcctttctcctctctttttggggttcttattatgtatactttggtaagcttgatggtgttacatggggctcttaggctctatccactttttcttcatttttttctttctgctccttacactagaaaatcttaattgtcctgtcttcaaattcactgattctttctctgctggctcaaattttccattgaatccctctgcaaatttttcatttcacttattatatttttcagctttggaatttctatttagtgctttttaaagaatttctttctcttcattggtattttctgctaggtaagaagtttttctcatgctttcctttagttctttagaaattgttttagctctgaatatatttgaaatcaattacttaaaatctttgtctaatatgtccaacatctggtcttcatcaggagcagtttctattgattgttttttttcatatgtgtggaccatatgctttcttatttcttggtgtggctcatactttttgttgaaaacagggtattttgaatgttatgtgtttgaattttataacctatcccttagtgcttgtttttgttgcttcttttgaagttgttcgttcagcaaattttctgaactaattttatgatatctgtattcttcgttgtatattccccagaactctctgttccattagtgatcagctaataattggacaaagatttccttaaatacttggaactaaaatatattgtataaaactaactttgtataaagtggtgagtaacactctctacaccttttatcagtttccagtgataatctaaatgattccttaacatttcagaaagactcttgttgccttgaatgtgacatgcaaagtctgcactacatgggatataaagcttatatttgatttatgcattcagctgttaatgtatccatcaccaaatactacttgatgacaggtgttgtgaatttaaacaagacacagattctgggaggagccaagatggccgaataggaagagctccggtctacagctcccagagtgagcgacgcagaagacggtgatttctgcatttccatctgaggtaccgggttcatctcactagggagtgccagacagtgagcgcaggtcagtgggtgcgcgcaccatgcaccagccgaagcagggcgaggcattgcctcacttgggaagcacaaggggtcaaggagttccctttccgagtcaaagaaagaggtgacggacggcatctggaaaatcgggtcactcccaccctaatactgcgcttttccgacttaaaaaacggtgcaccacaagattatatcccacacctggctcggagggtcctacacccacagaggctcgctgattgctagcacagcagtctgagatcaaactgcaaggcggcagcgaggctgggggaggggcgcccgccattgcccaggcttgcttaggtaaacaaagcagccgggaagctcgaactgggtggagcccaccacagctcaaggaggcctgcctgcctctgtaggctccacctctgggggcagggcacagacaaacaaaaagacagcagtaacctctgcagacttaaatgtccctgtctgacagctttgaagagagcagtggttctcccagcacgcagctggagatctgagaacgggcagactgcctcctcaagtgggtccctgtcccctgacccccgagcagcctaactgggaggcaccccccagcaggggcacactgacacctcacacggcagggtattccaacagacctgcagctgagggtcctgtctgttagaaggaaaactaacaaacagaaaggacatccacaccaaaaacccatctgtacatcaccatcatcaaagaccaaaagtagataaaaccacaaagatggggaaaaaacagaacagaaaaactggaaactctaaaaagcagagcacctctcctcctccaaaggaacgcagttcctcaccagcaatggaacaaagctggatggagaatgactttgacgagctgagagaagaaggcttcagacgatcaaattactctgagctacgggaggacattcaaaccaaaggcaaagaagttgaaaactttgaaaaaaatttagaagaatgtataactagaataaccaatacagagaagtgcttaaaggagctgatggagctgaaaaccaaggctcgagaactacgtgaagaatgcagaagcctcaggagccgaagcgatcaactggaagaaagggtatcagcgatggaagatgaaatgaatgaaatgaagcgagaagggaagtttagagaaaaaagaataaaaagaaatgagcaaagcctccaagaaatatgagactatgtgaaaagaccaaatctacgtctgattggtgtacctgaaagtgatggggagaatggaaccaagttggaaaacactctgcaggatattatccaggagaacttccccaatctagcaaggcaggccaagattcacattcaggaaatacagagaacaccacaaagatactcctcgagaagagcaactccaagacacataattgtcagattcaccaaagttgaaatgaaggaaaaaatgttaagggcagccagagagaaaggtcgggttacccacaaagggaagcccatcagactaacagcggatctctcggcagaaaccctacaagccagaagagagtgggggccaatattcaacattcttaaagaaaagaattttcaacccagaatttcatatccagccaaactaagcttcataagcaaaggagaaataaaatactttacagacaagcaaatgctgagagattttgtcaccaccaggcctgccctaaaagagctcctgaaggaagcgctaaacatggaaaggaacaaccggtaccagcagctgcaaaatcatgccaaaatgtaaagaccatcaagactaggaagaaactgcatcaactaatgagcaaaataaccagctaacatcataatgacaggatcaaattcacacataacaatattaactttaaatgtaaatggacgaaatgctccaattaaaagatacagactggcaaattggataaagagtcaagacccatcagtgtgctgtattcaggaaatccatctcatgtgcagagacacacataggctcaaaataaaaggatggaggaagatctaccaagcaaatggaaaacaaaaaaaggcaggggttgcaatcctagtctctgatgaaacagactttaaaccaacaaagatcaaaagagacaaagaaggccattacataatggtaaagggatcaattcaacaagaggacctaactatcctaaatatatatgcacccaatacaggagcaccaagattcataaagcaagtcctgagtgacctacaaagagacttagactcacacacattaataatgggagactttaataccccactgtcaacattagacagatcaacgagacagaaagttaacaaggatacccaggaattgaactcagctctgtaccaagcggacctaatagacatatacagaactctccaccccaaatcaacagaatatacatttttttcagcaccacaccacacctattgcaaaattgaccacatacttggaagtaaagctctcctcagcaaatgtaaaagaacagaaattataacaaactatgtctcagaccacagtgcaatcaaactagaactcaggattaagaatctcactcaaaaccgctcaactacatggaaactgaacaacctgctcctgaatgactactgggtacataacgaaatgaaggcagaaataaagatgttctttgaaaccaacgagaacaaagacacaacataccagaatctctgggatgcattcaaagcagtgtgtagagggaaacttatagcactaaatgcccacaagagaaagcaggaaagatccaaaattgacaccctaacatcacaattaaaaagaactagaaaagcaagagcaaacacattcaaaagctagcagaaggcaagaaataactaaaatcagagcagaactgaaggaaatagagacacaaaacacccttcaaaaaattaatgaatccaggagctggttttttgaaaggatcaacaaaattgaaagactgctagcaagactaataaagaaaaaaagagagaagaatcaaatagacgcaataaaaaatgatgaaggggatatcaccactgatcccacagaaatacaaactaccatcagagaatactacaaacacctctacgcaaataaactagaaaatctagaagaaatggatacgttcctcgacacatacactctcccaagactaaaccaggaagaagttgaatctctgaatagaccaataacaggctctgaaattgtggcaataatcaatagcttaccaacaaaaaagagtccaggaccagatggattcacagccgaattctaccagaggtacaaggaggaatgggtaccattccttctgaaactattccaatcaatagaaaaagagggaatcctccctaactctttttatgaggccagcatcattctgataccaaagacaggcagagacacaacaaaaaaagagaattttagaccaatatccttgatgaacattgatgcaaaaatcctcaataaaatactggcaaaacgaatccagcagcacatcaaaaagcttattcaccatgatcaagtgggcttcatccctgggatgcaaggctggttcaatatacacaaatcaataaatgtaatccagcatataaacagagccaaagacaaaaaccacatgattatctcaatagatgcagaaaaagcctttgacaaaattcaacaacccttcatgctaaaaactctcaataaattaggtattgatgggacgtatttcaaaataataagagctatctatgacaaacccacagccaatatcatactgaatgggcaaaaactggaagcattccctttgaaaactggcacaagacagggatgccctctctcaccactcctattcaacatagcgttggaagttctggccagggcaattaggcaggagaaggaaataaagggtattcaattaggaaaagaggaagtcaaattgtccctgtttgcagacgacatgattgtatatctagaaaaccccattgtctcagcccaaaatctccttaagctgataagcaaattcagcaaagtctcaggatacaaaatcaatgtacaaaaatcacaagcattcttatacaccaataacagacaaacagagagccaaatcatgagtgaactcccattcacaattgcttcaaagagaataaaatacctaggaatccaacttacaagggatgtgaaggacctcttcaaggagaactacaaaccaccgctcaaggaaataaaagaggatacaaacaaatggaagaacatcccatgctcatgggtaggaagaatcaatatcatgaaaatggccatactgcccaaggtaatttacagattcaatgccatccccatcaagctaccaatgcctttcttcacagaattggaaaaaactactttaaagttgatatggaaccaaaaaagagcccgcatcaccaagtcaatcctaagccaaaagaacaaagctggaggcatcacgctacctgacttcaaactatactacaaggctacagtaaccaaaacagcatggtactgataccaaaacagagatatagatcaatggaacagaacagagccctcagaaataacgctgcatatctacaactatctgatctttgacaaactggagaaaaacaagcaatggggaaaggattccctatttaataaatggtgctgggaaaactggctagccatatgtagaaagctgaaactggatcccttccttacaccttatacaaaaatcaattcaagatggattaaagacttaaacgttagacctaaaaccataaaaaccctagcagaaaacctaggcattaccattcaggacataggcatgggcaaggacttcatgtctaaaacaccaaaagcaatggcaacaaaagccaaaattgacaaatgggatctaattaaactaaagagcttctgcacagcaaaagaaactaccatcagagtgaacaggcaacctacaaaatgggagaaaatttgcgcaacctactcatctgacaaaggactaatatccagaatctacaatgaactcaaacaaatttacaagaaaaaaacaaacaaccccatcaaaaagtgggcgaaggacatgaacagacacttctcaaaagaagacatttatgcagccaaaaaacacatgaaaaaatgctcaccatcactgcccatcagagaaatgcaaatcaaaaccacaatgagataccatctcacaccagttagaatggcaatcattaaaaagtcaggaaacaacaggtgctggagaggatgtggagaaataggaacccttttacactgttggtgggactgtaaactagttcaaccattgtggaagtcagtgtggcgattcctcagggatctagaactggaaataccatttgacccagccatcccattactgggtatatacccaaaggactataaatcatgctgctataaagacacatgcacacgtatgtttattgcggcattattcacaatagcaaagactgggaaccaacccaaatgtccaacaatgatagactggattaagaaaatgtggcacatatacaccatggaatactatgcagccataaaaaatgatgagttcatgtcctttgtagggacatggatgaaattggaaatcatcattctcagtaaactattgcaagaacaaaaaaccaaacaccgcatattctcactcataggtgggaattgaacaatgagatcacatagacacaggaaggggaatatcatactctggggactgttgtggggtggggggacggggagggatagcattgggagatatacctaatgctagatgacgagttagtgggtgcagcgcaccagcatggcacatgtatatatatgtaactaacctgcacaatgtgcacatgtaccctagaacttaaagtacaataaaaaaaaaaaaaaagacacagattctgctcttagacagatcacaatctagttgtgtgactctgggaaggttccttaatctctctgaggcttcagtccttccacgacatagtaggaatattattatcaatctcactggattgttatgagaattaaatgggaatatgtatgtaaagatagtgctgtatctgatatcaagttaatgcttaataaatgttttctccctgcacttgtctattctcagtgcaacagaggaactttaagtagcaactatcatcatctgtcatgtgctatttatatgccaactgagtgcaaagggtctcattcaatattttattcagtttatttaaaaatgactatgtagtaggtgttaatatagtagttattaattgattaacataagtagtcattaaaagaacagctgaaagtggctcaaagacattaaacaacttcctgatgccatgcaactgccacattaagattaagagtttgaattcaagtctccttgaatccaatatctacattcttaaccacttccctacatttttgttggtacaagtgctttcctcacaaaatgacacaaacataaaattcttaaggaagtaatagttccagagtagtagttccatagaactgatggaaagaccttttcttgcctttctttggttgcagagggcaacagaaagccagaagggtcagcatgagagagatggaatatgaaaagagtgagtacctcatagtgtcagcttaaattctagtctctctactaacatttctccaagaaatttattttaatttggacaatgaaaaattatataggtttaacactgtgcaataagcttctaggaaactgagccagactgacgggctcttgatgttttaattaactaactaatttttctgacagagtttttaaaagcacattcctcaattttgcaaagaccgaaagcaaacctcaaccaaaaaattatgacaataacagttcaaacactggtaaagaatactccctgcagcacctatttgaaaagttagcccttctgtagcttagttcttaatcaaagttgagagttcaagatcagaaatatgtatgtatgtacgtatgtctgtatgtacgtatatataatttttatttgccttccggggtacatgtgaggtttgttacacaggtaaactcgtatcacgggggggttgttgtacagattatttcatcacccaggtattacactcagtatctgatagctatcttttctgatcctttccctcctcctcccctctatccttaagtagactccagtgtctgttgttcccctctgtgtgctcataagttcttatcatttagctctcacttataagtgagaggatgcagtatttgattttctgttcttacattagtttgctaaggataatagcctccaactccatccatgtttacacaaaagacatgatctcattcttttttatggcttcatatgccatggtgtatatgtaccatattttctttatccagtctgtcactgataggcatttaggttgattccatgtctttgctattgtgaatagtgctgcagtgaacatttgcttgcatgtgtctatatggtagaatgatttatattcctctgagtatatatgtagtaatgggattgcagggtcaaatggtagttctgctttcagttctttaagttcttttagttctttactgctttccacaatggttgaattaatttacgcttccaccaacagtgtataagtgttcccttttctccacaaccacactagcatggtattttttttttgactttttaataatagccattctgactggtgtgagatagtatcttaccgtgcttttgatttgcatttctctaattatcattgatattgagctttttttcatatgcttgttggctacatgtatgtcttcttttgaaaagtgtctgttcatgtcctctgatcagtttttagtggggttgtttgttcttatcttgtaaatttgtttaagttccttatagatgccggatattagacctttgtcaggtgcgtagtttgcaaatattttctcctattctacaggctgtctgtttactctgttgatagtttcttttgctgtgcagaagctcttaagtttatttaggtcccatttgtcaatttttgcttttgttgcatttgcttttggtttctttccaagatcatgttttaaaacgaaggtttaaaggtatttgaactgtctttactctggtctgtttcctgaagaggtctgttggcaggatctagagcactctgccatagccaaaggcttcaggtggctataatgcttgaagtcaccagcacagattttaatatccagggaggctaaacttgtggcatggacaagttctgggaagatctacggtcattaggcactcatgagagccttttcttttcttctcttctcttaaaatgtttttctttttaattgctttaaaggtatttagaaaaataacaaataagatgtggatcaggcttgtgtttaagaagaaaaaatatcattgctaaaattttgggtttctaaaagcgttgttaaataaaacaaagcttaaacttagagaacgtttgtgtcctgtttgaagtaattaaacttacatttattgacttgatcttaaaaccatgcactttagaatataattttcctgccccttcatggccaatagactagattgtgaggttcttgagggcaagtaccctaaacaaatggcaccaaccaaataaacaaaaaaacagatgaaacatttgttgttttttttgttgagtgcctgtgctcagtacctatgtttttctagctgtgtgagtgccacaggattccctggggagcagagtctgagatggagagaagagtgcatgaggcttgttaaggagtgcttttgcaattgcaacaacagcaaaaattgacaaattggatctaattaaactaaagagcttctgcacagtaaaagaaactatcaacagagtaaacagaccaacctacaggatgggagaaaattttcacaaactatgcatctgacaaaggtctaatatccagcatctatacggaacttaaatttacaaggaaaaaaaaaaactccataaaaaagtgggaaaaggacatgaacagacacttttcaaaagaagacatacatgtggccaacaatcatatgaaaaagcagctcaacatcactgatcattagagaaatgcaaatcaaaaccacaatgagataccatctcacactagacagaatgactattaaaaagtcaaaaaatagcagatgctggtgaggttgtggagaaaaaagaatgcttattcactgttggtgggagtgtaaattaggtcaacctctgtggaagacagtgtggcaattcctcaaagacctaaagacagaaataccatttgacctagaaatcccattactgggtatatacccaaaggaataaaaatcattctgttataaatatacatgcacgtgtgtgttcattgcaacactattcacaatagcaaagacatagaatcaacctaaatgcccatcaatgatagacatgataaagaaaatgtggtatatatacaatggaaaactatgcagccataaaaaagagtgagattacatcctttgcagggacatggatgaagatggaggccattatccttagcaaactaacacaggaacagaaaactaaatactgcacgttctcatttataagtgtgagctaaatgatgagaacacatgggcacagagaggggaacaacacacaatggaaactattgaagggtggagggttggaggagggagaggattaggaaaaataactaatgggtactaggcttaatacctgggtgatgatataatctgtacgacaaacccctatgacacatgtttacccatgtaacaaacctgcacatgtaccctgaacttaaaataaaagctataaaaaagagtgcttttagcattgatgtcttttaaagaaagagaaggatgagattggatagaggaaaagttgtgtctcaaaggaggcctctgagctgacctcatgagatactctgaattgacaactcagttgaggtaatctctcataggggtcagtcactgaatgtgccccaaaggacatagccttgggtaaagagtaccatggacaacagtccacacagaataggcagtaaggcctttttctctttctttctttctttttttttttttttgagacaaggtcttgctcttgtcgcctaggctggaatgctatggcgtgatcccatgtcactgcaacctccgcctcccaggatcaagcaattttcctgcgtcagcctcccgagtagctaggattacaggtgccccccacacacccagctaattttggtatttttagtagagatggggtttcaccatgttggccaggctggtctcaaactcctgacttcaggtgatccatccgcctcggcctcccaaactactgggattataggcgtgagctactgtgtctgtcctgtcttttcttgaaggaggatttggaaggtacattacagcttccgccatggtgacctcagataatttaactttgttgaccctttgttgactttgttggccctcattttcttcatttataaaacaaacattaaaaatatcttcatagggtcagtatgaagattaaatatagccatacatgtaacacctttgtagtgcttagcagagagtaagaagtgttctccattatcatattttctcaacttctccaacaaatataacaatctgtctgtagggcattaggttttcagaaatgaacatcaacagtttctgccctcaagaagtctagtaggggaagaggcagacacataaagacaatggaatgcaatgtgatccttgttctaatgttgcccacatgccttaagctgacctcctggatgacccgttgcctaagctgaggactgaaggaactagcctgaggaagtggtgagcagtagctaaggcagggaggtgtggaaaggaatgttgatgtctagaatggctggaagattgggtgaaaaatggcgagtaggaagagatgaagctgggaggttctagaagccagatgataaaggtcttgatatcctcatgtaggagtttcgatttaggatgaaagctctggggagtcaacgaaggatttttaggtggtgatcaatttgcattgtacaaagctcaatctatcacaaaaatacagaatttactggaaagggccaacagggagaaccactgagaaactgtagaaatcatcatggcaaaagatgacgaaagggtgaactgagagtgaaaatgggatttgggggaggtcaacggggagggaggaattatagttatcccccagttctgttttgggaggctcagcagatggtagtaccattttctacgagatagaggattttaggaggaggagcagatgtaggtgggaggaagaggatccgtttggttttcaacatcgaagtggagaagtttaatgccagttcattactgtagggctggcactcaggggataatctgtagaagagcctgggtttggaatcagcaaattacttccgtgtagagaagaggatagagtggaagggggctggctaacatccagttagtggaaattgcaactgaggaagagaacttggataagtagtagaaaatccaggaagtttctcagtttctgtgatgtgttttgacattatagaaaaatgtccagttttcagctagtcaagtagcagctttctatatttaaaattctttgagcaaagccacttctttcaatatactcttcctctaaaggaaagtatggagtaaataagatagattttatttttccaaaataaggtgacaaaaagttattaactataaccctttcagaaaactagctgaagtaaaaaaaaatgagctaatgaataaggaaaggtttcagaaaaaataaacagaatgtgagaaaatataaaagggtaatattaggaatagttctggtacagaattattaaaatctttttgaaacaaacatatctcaatggtgtgtagctggattcctagtgaaaaacagataaaacaatagaaatgaataaattgaaagtttattaaaattcaacattctcaataataacctttagtatttcgaatatgaacatttctaaggaaaaggtcaacttcatgtttctgccttatgaaaataaaggggaaaatttaccaaaatattctacagtaaatgaattacacttctatttaggatgtttgagagctagataagatgaatatcctgatggagctaggacgcctttttagatgaggtagtcaccttgggatatagctcatttaggtcaggcaggcccataaaacagcagcccatcaccaggaccttgggactttctatttataacgttcccgatgcctcccttgatagttttttcctctacaaaatgttgtcactgctgccgctcgttgttcccactaggcggcactctaagctcatcgtcaatgcgaggaccgagcacctgctaaaatctgcggcaggcatctccgttgtgcaaaattggtaacagtttggattttattcatcgaaactttagaatggaaaatgattgtttctaaacgaggcaacaaggcaggccatatggtttgactgcgtctgagagtatgtggtctttggaatcctgttactgcgtcgtctccctctagggtgcatcatctcagaccaggaaggcaaagctgccggggacaataatagggttgcggtgacacctgggggtggccctctcctcctcagtgctgatgccttgggactataggacctgggagatactttggtcgcctgggaagtctactattgcttataaaacccaaggatcttgcccagccctgcgcatgcgaatagaggtgacttctctaacccgcaacctcagaaggaacgcttttcattccaggaggacagaggggaggccgcgtaagggactgtaagtggctgtggggctcacatcccagttaattcagagaacagctcccctcacttcggaggttgcaggcactgaattaagctttctgcattcttcattgcatttcatcttcacaggagtctcttaggtagcgtgtattatctctacttttataaatgaggaaatgcaagttcagagagcttccctctagcttgcgagttgctagggtttgggctgtgtatggtttttctattgttgctataaccaattaccacagacatagtggcttaaaacgacaccaatatattatcttatatctctgcagatccgggttcccttggctaaaatcaaggtgcggtagcatgcattccctaggggaggatctgtttcctagggcaggatctgtttcctggccttttccagcttgtggaggacatccgcattccttggctcatggctgcttcctcccatcttcaaagccagcagctctctgacccttcttccatggtcatatcgctccacgatcatagtcaggaaatgttctctgcttttaaagacctatactgtttaatgaggcccacccagttaatccagaataatctctcaatctcaaagtccttaactttatcaaattgtccaagttccttttggcatgtaaggccacacagttacaggttctggggataaggatgtgaacatcttgggggcggggagggggcattattctgtctaccataagcaggaaaggttttttttttaaattttagaacttacttcttaaaacatataggcattaaaattgagtcacagaaagaaaaccgatagggtcaaatctcttaggccaacgatgaagtgtgaacaaataggaaaattacaggatcctataagtaaaatacatgatacgacttgagtacaaatcacaaaaatttgaagtaagaataggatagccaggaaaaactgaatttatttgtgatttaatgcttagtcaaatgtggagcaattgactatgaagacagaaacaattattctcacaatttaaatgtatttaaagacaaggcccatgcagagaacaacacacaatggtctttaatttcctttctttctttctctctctctttcttctttctctttctttcttctttctttctttcttttctttctttccctctctctccttccttccttcctccctccctcccttccttccttcctgcttgctttctctccttccttccttccttcctgcttgctttctctccttccttccttccttctttctttctgacttttattttatgttcagagggtacatgtgcaggcttattatacaggtgagttgtgtgtctcaagggtttggtgtacagagtatttcatcacccaggtaataagcatagtactgactggtagttttttcatcctcacccttctcccaccctccaccttcaagtaggccctggtgtctgttgatcccccctcctccttttttttggtctatgtgtactcaatgtttagctcccatttagaattgagaacatgaggtacttagttttctgttccaagcagtgaagcttaagtagacaatcgtagtttattttcatgagttgtagtcagtttatgagagtaagattctgtttatattttgattttatataaatataagttaagatgtaagacttatttcttgttaacatgaaagcatctgaccaatctgtatagtaccttccgaaaatctagctaaatgtaattatacaagatttatttattaaactcctactgtctctcaggtatattaattaggtggtggtcatgcaatggtaaaaaggtaaggtctcaacctttaatacagttgagaagagggaattatataaacaaataagtgtaatgaagtgatattacaagagaaacctgcactaaagaaatttacattgaaggagagtttaaaactaatattctacaagttctcacccaaccatctactcaccgtgcttagtcaacatctgtctagtagcccctgtgacaaggaggaataaaccttcccaagaatgtgttatatccacattaaactatcataacctttgattactatgtttctgttctaaatgttgaatgtcctgtctgaatttggaaggaatctctgcagattgataagagggtggaaggttcatgttctggtttgtctgcaggaggaaaacaactcttagatgaagattcattcactgagataagtcacgatccactcatcgtgtgcctccctgcattcgtgcctgttgggtctttgttcgtcagctgaggctatgatgtgcccatggggcaaccacgggattggctcattaaccctctcccaagacctcacacagagagggtgaagagcactggctcactcgctgctgctaaacctgaagagcaggggcctcaatccttcttcaggaaacttacctggaagtgaacgtggggtctggggacagaagtggggagttgtgaagagacagacctttttaagagtggctgtgatgtcaagggagggtgctggatattgtcttgccccaccttcttcctatgtctgatggagtttcctctctaagtagccattttattctgctgactcaccctctaactcctggtcttattccatcctgtctcagggtctgtggtgtagtcatagcacctaatgaggtagcatttgtttagtgagatcagggtgactcttcattcaaaagcttttgggctagtgcatgcatgaatggcattggaatgggcagcagtttcactgtagggaggtgggtaggatgcctgcagctacctcaggctgggtggaagttgttgaccctggttgatggtattaaaatatgactcagcaatctccttcatcatcctaggcccaagaggtagaactggaacgtggaatagggacaaggctgagaactctccttccactggctatggtggaagtataattcacagataactgccctgatccatcatccatgaaatgttcacagatataaccaaatacaggagacatttgtatgaaataaagtatcattaggttgggagccaaagagctttgttttccactcactgtgttcatgtcaccttgctggtttgtgatttcatctgtaaaatgagaagtttggagcagaagacttggcaggctcctcaggcatgagcattctagggtttgaatctggcgaggtagatgctgtctcaaactgtcaccctagagccacttcaggagtactttccaaatcacagttgcttctgtgggaatggcaagcttgctatgaaaggaatttttgccctgagggtcagtgttgacatctactttctaaagtactactagttatgagagtccctggatccatgttacttgagagcagattataaagtattaattgactgagatctaagacttccatataccctattttgaaatgttatttcccaggctggtcacaatctgcttgtatgtaacaaatatctattgagcctctgtggtgtacactccagcactgtgatgtgataagcagtgaagggttgctcagagtcagcctgcagtggtaatggactcaagataaatgagttcagcccaaggtggtaagtggtccaccacaggaggaggttacaggtgctacagggctaacttcctggttattatggagtgaatagagcatgcagagctgggatatagcatgtccctagctggggctctgggtggggattggttggcagaggagactggagaagtagcgggttaacaaagggccttgttcatctagcaaatgtgaagcccatgccctaccatgcagtagatggtcagtaatgtttgctgactgaatgcctggatgtatacagattacaaagtgttgagtaattgaaagcaatgcctaaaatgtttctgaggtctttctgtagacagaacccaaggtcagcagacattgtgtttttgttgccatcatttttctagaaactccatgcacataaacagtaatctcaacatgtacaggttgaattgaattcaaccaatattggttgaattgaagggaattcttatttcagtatctttaaattcaattaactttcttagagtgtacccttccacttcaacagaagctagtgaccaagaaaagtggaatcaagtttactccaataatatttacttttaaacattttaaagtttaaaactcctaatgtaattgggtgaggatccaactaatgcagaaaggagcactgtatatttagtcacagtgaccattttgtatcttgaaaataaatttaggaagtgcctttcatatcagctttttatgccttgacaacacacaaaatcaatattatttttctgatatgtttgaaaggtgagactgagccaaaagaaaaatgtttccaagaaaaagcttaagggaatttgtgacctgaccttaaatagatcaacttccttaatttccctatttctttatgtccttaaataccattcttatttgcttgatgcatttacataggaaattgcattttaactttcagtgtttataaaacaattattaagcatcgcttaataaaacaagatttactggaaaggcttcagaaccaggaagttgagatttccctagctaaggtttggctttcttcctctatagaaagaaaatgtacagcaaatgttgtgttcgagggttttgaggtgggaaaatgtttagaacactgattgaactgaaaaagactagtatggccaatgaatcagaaaaagcatgacaggagatgagattgaaaagttgagctccaatgtattgtcaacttgggtgcaatgaaaatgtgtttctgtgaagctaactattcaaacacagagcccatcatcaccaagtaggtctacaagctactataggactatggataattcagcattgcaggtagctttttcttgtttccagaatgtgactgaattgttgtcttttcatagcagcttagcgggcactggatgaggcataaatctctgactggcaaacatttttatgtgggcatggaaaacacgcactgccccacttaacacctccacaacatccacactgacctgcggcgacagtgcggtttcctgagccacagcagatgccaagttctctgttgaacagtttacattctctttacctgttcttctttcaataaaccagattggggggcactattgttgtctccctttaaatgaggactgaggctcagaaatgcaaaggaatttgccccacttgttagaaagcagagtccagactttaagtttgtggaattttaaagtatactccgaactagaattagattaagaggcaggtgagcttggaaagttgtagcctgtaagaactggggaaaattagaaaacattttacagacataaaatgcttaaaaaagtaaactcaatagatttttctttttcctgagacggaatcttgctctgtcacccaggctggagtgcggtggcacaatctcagctcactgcaacctctgcctcccgggttcaagtgattctcctgcctcagcctctcaagtagctgggactacaggcctgcgccaccacgcctgactaatatatgtataattttgtatttttagtagagacagaatttcaccatattggccaggctggtctcgaactcctgacctcaagtgatctgcccaccttggcctcccaaagttctgggattacaggcataagccaccaagcccagcctcaacagattttttaaaaagatgttgagcaaggtagtataaatatatccatgtaagcaacatcaacctttaatgagtaattatcatctagctgaaaaaggaaaggcaactgtcttttattttatttatgttttttagtacatacaagaaaggtcttatttagaacataaagttgttcatatactacaaaagcaatttctctaagactctactaaataaacccctgatgcaccaagttgaagattagagggctggcacataccagattataaaccttccagactgagtgcttttgtgccttcttgcttttgtctggttcagttttatctgccatattctcctggtcatctttctttccctctcagctgcttgagtccatacgatattgtaacttttgtcttcttttaccatgcatacttttattaattcaattggaggcaaaccctcacttcttcctctgtcttctaactcctcttcagccatcacaggaatatttttattccattttaagtaaaagcacagcctttattttgattaacaagcataaaattaaagctagtgattgacagacttatgcaaaacaaaaaattaaaaccctgtgcaatgtttttataagcccctgtgcagcaggccatgatataaaagaagcccttacaaggcactaggtcaaccctttagggttgatacgcttcaccccagcctcattacacaaaaggcagggaaggacgcagtggttgcattgctcctgtgcactgtgggaacgaccaaacctgcagtcagcttccatgaggaaccaggaaggattcgggaagctatctccttgcttacttgtatcctcaaggcctaaatcttttgccttgtttgttgacctattaagttgaggtggacaactctgcacaactgtaaaaactcctcgtgtttgacgtagcttactctgaaatctcccattaaattcttcacaaaagtttccagttaccttttatttctaattaaactgctttttccaagccccatgcatctagataaatatctgtaactgttatttcattattattgtttaattactagttcaaagccgttgtgtcctattgaaaacattacacagacttccagtatttcatagattaaaaaggtattttaagtttagtttgagaaagccctatttactaacgtgtaacttggaaatgaaattagaagaaaagtcatttgtaacctgggtggaccctatttaagccttcaaaatttaagattagggtgaacaactgaaataaaatggttagttaatgaatgacattaggtctgttcaccaatatcagtttaatgaaatatttatgctgtatagtttaggcatacagatggactcttcttctgaatggccaaagataatggtagtcagcacaggctgaatgtcagatactacccattcatgagtgcctactatgagacaggctgggtttagcatatgcacactttatttaggccacagcaatgccatagcttggatggcattatcttccttttataggaaacagacatgttgaggaatttgccataagtcagatagcagatggtggggcaatatacatattagtttttattagtttaaaagtaatatttaaaaattacaaagtaatacatgcttattgtagaaaattgataaaatacagattcatgaaaagaagaaaataaaacttcataatttcatcaagtggagataaccacaggtattatatttattctttctgtatacaaatgcataaatgtatatctttttacttgtaaaactgaaattatagttttgtaacttgcttctttcatttagtggttgtcttagtctgtcttccattgctacaacagaataccacagactgggtaatttataatggacagaaatttatttggcttatagtactgggtactagaggctgggaagtccaagggtgtggcactggcatcttgtgagaaccttcttgctgcatcacaacatagcaaaaggcatcacatggcaagagagagcaaggaattaaattcagcttcaagcccttttatgatcagcattaatccattagtgagggtggagccctcttgacctaaacacttcccattaggccccacctcccaacaccattgcagtggggattaaatgtccagtgcatgctttgtgggggacacattaaaatcatagaagtagtgtatcatgaatatctttaatcttcctttttttattttttaaactcttattttaggttcaggggtacatgtgcaggtttcatgcataagtaaacttgtgtcatgggggtttgttgtacagattattttgtaattcaggtactaagcctagtacccacagttattttttctaatcctccctcctcccaccttccacccacaagtaggatccagtgtctgttgtttttctctttgggtccatgtattttcattgtttaattcccagttaaaactgagaacatgcattatttggttttgtgttcctgtattagcttgctaaggataatggcctccagctccatttgtgttcctgcaaaggatatgatcttgttcttttttatggctgcatagtattccatagtgtatgtggaccacattttctttatccaatctgccactgatggacatttaggttcttcgtctttgctactgtaaatagtgctacagtgaacatacacgtgcatatgtctttatggcagaatgatttgtattcctttaggtatacaacccagtaatgggattgctgagttgaatggtatttctgttttttctctgaggaatttccacactactttccacagtggctgaactaatttacactcccaacaacagtgtataagcattccctttgctctgcaattttgccagcatctgttgttttttgactttttaattatagccattctgactggttgagatggtatctcattgtggttttgatttgcatttctctaatgatcagtgatattgagctttttttcatctgtttgttggctatatgtaagtcttcattttatcgggtacaaaagagttcgcaattttatatgccatacagtatgtaacaaatcctctaaatacttaaaacttttagttgaagtatttgtgataaatgtaatgcacatcctttgaattaaatctttacacatcacatatgtgtcattattttaagttcatagaaatgtaattgctgtgttaaggctatgaatgtttttaatggtttcgctgcatattcctaaatcagctccacaaatattcttaaagaaatttgcactcccatcaggaatgcacagagttcatttccatatactctagggagaacactgttttcacaacacattcttgccaatgtagtgtcttcttgtagttgcaattatatttctttgattgctagtgagatcagtttttttttcattctttaaatttcctcttaaaatttgctttatttctttattgatacattgcagttatacatattcatggagtaaaatttgatgttttggtacctatatgttatataataatcaaaacagggtatttagcatattcattattatccgatacatttatcatttctttgtggtgagaacattcaaaagcctttcttttagctattttataatatacaaagacttactcttaactattgtcatcccactttgcaataaaacaccacaacatattccttctatgtaattgtaactttcttcctgttgaccaacagttttctgtcttccctagcttcctctcctccccagtctctgcttctaggatatcaactcctttttttttcagattccatatataagtgaaataatattatatggcatttgtctttctgtgtctggcttatttcatttaatatgctgtctttcaggttcatccatgttgccacaaatggcaggaatcctttcttttttatggctggagagcattccattgtgtgtgtatgtgtgcatataatattttctttatccattcatctgttgttgaacgcttaggttgattccatatcttggctattgcaaatagtgctgcaataaacatgagagtgcagatatctcttcaacatactgattttatttcctttggctgtattaccagtagtgggattgctggatcatataatagttttatttttaatttgctgaggaatcttcatactgttttctacagtggctgtactaatttacaatcccaacaacagtgtataagtgttcccctttctccacatcctcacaaacacgtgttttcttttgtctttttggtaaaagccattttaactggagtaagatggtacctcgttgtgattttgatttgcacttccctgatgattactgatgttgagcatttttaatgtagctattgaccatttgtatatcttctcttgagaaatgtttactaaagttttttgcccatttttagatttttagttatttgttttattgttgttgagttgtggaaattatatatatatatatatatatatatactggatattaatctcttgtcaaatgtatagtttgcaaacagtttctctcattctataggttgctttttcactgtgttgtttcctttgctgtcaaaagcttttcaggttgaggtgatcctgtgaccccatttgtctatatttttgcttttgttgtctgtgcttctgaggtcttatttttaaaatccttgcccagtctaatgttgcaaagcatttgccttatgttttcctctagtagtttcatagttttggtttacatgtaagtcttttttttttttttttttgagacggagtctcgctctgtcgcccaggctggagtccagtggtgcaatctcggctcagtgtaagctctgcctcctgggttcacgccattctcctgcctcagcctcccaagtagctgggactacaggcgtctgccaccacgcctggctaatttttttgtatttttagtagagacggggtttcaccgtgttagccaggatggtctcgatctcctgacctcatgatccgcccgccttggcctcccaaagtgctgggattacaggcatgagccacctcgcccggcccacatgtaagtctttaattaatgaattttgaattgatttttgtctatggtgagatgtaggagcctaatctcattctcttgcatgtgactatccaattttcccagcatcatttattaaagggactgtcctttcccaattgtgcattcttacacctttgctgaaaatcagttggccgtagatctgtaaatttaattctgagctctctattctgatccatggtgtatgtgtctgtttttatgccagtaccatggtgttttggttaatatagccgtgtagtatattttgaagtcaggtagtgtgatgcctctagctttgttctttttgctcaagattgcttttgctatttggggtcttgtggttctatacaaatttcaggattgttttttctatttctgtgaaaaatgtcagtggtattttgagagggattgcatgaatctgtagatcattttgggaagtctagccattttaacaatattaattcttccaactcatgaacatagaacattttaaaatttatttgtatcttcttcaatttttaaagtcaatgttttgtagctttcagtgtacagttttttaacctccttggttaaatttattcctaagtattttttttgtagctactgtgagtgggattgttttcttgatttttttttgatatcttgttgttaatacatagaaacactgctgatttttgaatgttgattctgtaccctgcaactttactgaattcagttattagttccaacagttttttggtggaatctttaggaggttttctctatataagatcatgtcatctgcacacagggacaatttgacttcttcttttctagtttggataccttttctttctcttgcctaagtgccctggccaggacttccagtattatgttgaataggaatggtgaaagtgggcatccttgcttccggtcttagaggaaaagctttcaggttttccccatttggtatgatactagctgtgggtttgtcatagatgaactttttaaactattaaatattattaaaataagcaaagaacaaagacaaaattttgtgatattgtgctattattgtatctcccttgagggaaaaaaataccatcttctatgataacaaattaattatggaatgaaaagaaattatctggatgaaacacctgggtccatcaggtatatttccatggcgcttgtcaccatactacacatggagccatgtgtttctggtcttcatttaagtgctgctaacatatgagtccctaatatgttttaggccattacactatggccaagggatgtgaagaacaagagaagaaatatctcctaattaatctgactcaaattctgtaagacatgcctctcgcctgaattttggactattgtatccaactgcctgatggagagctccagattgcctgccatatttcaaaagcagcatgtcccaaactgcatctaccctctgccgctctaaatctactcctccctctgtaagtgtctccatcagttagtagcacaacaatctcctgagagtgtcagtccccaagacttacagtttctgtccaaatattttttgccattgacttctattttttaaattattagtatactttaagttctgggatacatgtgcagaacgtgcaggtttgttacataggtatacacgtgccatagtggtttgctgcacccatcaacccatcatctacattaggtatttctcctaatgctctccctcacctagccccccaccccctgacaggccccagtgtgtgataggccctggtgtgtgatattcccctccctgtgtccatgtgttctcattgttcaactcccacttatgagtgagaacatgtgtggtgtttggttttctgttcctgagttagtttgctgagaattatggtttccagcttcatccatgtccctgcaaaggacatgaacttatccttttttatggctgcatagtatgccatggtgtatatatgccatattttctttatccagaccattgacctcttttatctactactgcctgaattcaggcttttagaatcctaattattcaataaatatttttgaacactgtgttccagatcctcttctaagtgggtggggggggcaggaagggaggagaaaagagaaaacagataataagaaagtaaataataattttattttattttttgagacggagtttcactcttgatgctcagcctggcatgcaatggcacggtcttggctcactgcaacctccgcctcccaggttcaagcgattctcttgcctcagcctcccacgtagctgggattacaggcacccacgacatgcccagctaatttttgtatttttagtagagacggggtttcaccatgttgaccaggctggtctcaaactcctgacctcaggtgatccacctatctcagcctcccaaagtgctgggattacaggcgtgagccactgcatctggccagtaaacaataattttaagattaaatttggtaactgttttgagggctcttttaagttgcccaaagaggaaaaatttaagacttgaagaggaagagccagacaaatagcattcccagacaaaaagttaggagtcaagagagcttgggactcaaaaaatgaaaaggtagccatgtgggctggcattagaaaacagtttgtagaggtgaaaccatgtttgaatgccaaaaaaaaaaagaagtgtgaattttataataagtgcaaggggcaatctttgaaagtttttaggtagaaaaaattgatgtgatttagatttttctaaaagaacactgtggctcctgtaagaggatggattatagttggggctgaagtggaagtagagagatcagttaagattattgtggccgggcgcggtggcttacgcctgtaatcccagcactttgggaggctgaggcaggtggatcacgaggtcaggagatggagaccgtcctggccaacatggtgaaaccctgtgtcttgtaaaaatacaaaaattagctgggcatggtggcgcgtgcatgtagtcccagctagttgagaggctgagacaggtgaatagcctgaaccagggagttggaggttgctgtgagctgagatcacgctacagcactccagcctggtgacagagcaagactctgtctcaaaaaaaaaaaaaaaaagaaagaaagaaagaaaaagaaaaagactattgtaattgttcatttgagatagttttgacagtggagatgaaaagaagtggatagatttaaggtataagggaaataatccccacactctccaaccctggaatacatacataataggcctgccacagttctcccttttctctataaaatgtgctgctcacattcatggcaccctgaatgcttgtgactagtagcttcctttttaggacacctgggtatttctcttcctccccaagagagatggatgattaccaagaattagttttgtttctaaatttgtgcatatcagctgtattttaaaaaatttaaatgtttattaatagtatatgaacaatactacttgagtagactggagccaaactttctgctgggtgtggtcttctatcttttaagaaagcaactaaaatgtgctagaattctgttttttgacaatctttgtcctcctttttggccctcacatctctatagtttaccaagcttacgtctatgaatttaccatgaatatctgtgccacattaaccacagtgatgcacagtcatatatgtagtttgctggaaagactttcagaagttaaggcacctttgattagtctaacagatgtttctctctcctttggctttcaaaagagaaacaacttttctccttcactaacaaaatgtaaaatattttcccagatagatgtttcttgtttcacgcagattatcctgtgtaaagagccatatcactctgaactccttgaagggatcgtgtgtttcataataatttttactaagttgtgcaaaaacatgtttgtcaaatgaacaaataaaagaataaactaatcttctgaaccgagaaacatctttgtaaacatttaatgatgctatatgcataccatactgttacggactgtttatgtctccttcccaattttatgttaaagcactaacccccagtgtggctgtattggagatagggccactaaggagataaataattaaggttaaatgaagtaataagggagggtccctgatctgataggaaccatctaattatgagacacaaaaatgtttgttcaaagctcacgcacacaaagaatagattatttgaatgcacagtgagatggtggtggcctacaagctaggagaagatagtttagaaggaaacctaccttgccatcaccttgatcttggatgtcccagtctttagaactatgaggaaatagatttctgttgtataatccacccagaatgtggcattttgttatagccgtctgagcagactaatacacacacacacacacacacacacacacacacacacacacacacacacacgcagaatatacaatagactgctttctgtttcatacatattttgtttaccaaaaggaacctcagaggtaagggactttgaatgtcagatattctctcccctttagctttcaagaaaaccattttttttctcctgttgtctttgctaacaaaatgtcatagacatttgtcatagacatttttcatagacaagatagacttttcttgaaaaccttttttttctgaagttttaatcaaaaatacaattttaagatagtctttatcttggtacaattaacacaaaacctacaacttacagctgcttggcaagtggccagagtctttgtgattctcttacccttccctcaggcttgtcacagtcatgtttgcagatggttgccatgggagctctgaacatcatctgagatcaaaatgagaggaagggggaacggccgtattagcagcattcttgccttataggaaaagacttcccagaagctaccagcagacttctatttatctcattggttgtaactgtgacaggctcaaagctagctgcaagtgcagctgtaaaaacaagtatttagtttttatcattcctatctaagaggtggcaaaacagaagaggaatataagtatctgtagtgttagccagtgaacagtctgctctccaaaggaactattatagaagcgtggactagcagatcagctaattctagagtcctccagagttataggtttaataaccgcaatgtggggctttacatttcacaccttagccactatttgactgctgctaatgtctttgattacagttagctaggctgcaaacattatttaaggtctatacttactctcagcatatctattataataaaacattattgagtatacattggttgctttgcttattattttgtgtggagatgacactgatctaatattctgtaaattatttacaagtgacaagtgaggtctgttctaatttgaggctgaaaaccatgatcatgacttcatactgtgctctagtcaaaaatccacctatagcttaccattagctagcatttctaagtgcattccacattcagtgatcttctttcaaggctttttttttgttttttgtttttaaatagtatctcactctgatgcctgggctggagggcaatggtgcagtcacagctcactgcagcctcacctctggtgctcaggcgattcttccacctcaggagctgggactacaggcacaggccacaacatctggctagttttttgtagggacggggtttctccatgcatgctacccaagctggtctcctgagctcaagcaatccacccagctcggcctcccaaagtgttgggattacaggcatgagccaccgcacctggctcccaaaatacgtatgttctaatagaacgacttaaataggaaaaaaaattgaagaagataaaaaataaagtcatgattacaacagaaaagcataaccatacaagtgaactacaatttggcctagagctgcccaaaagacaaagaggagcaacaaagagagcattagactctttaagatgaaaacgaatcccaaatgcccatcaaggatagactggataaagaaaacgtggcacatatacaccatggaatactatgcagccataaaaaagggatgagttcatgttctttgcagggacatggatgaagctggaaaccataattctcagcaaactaacacaggaacagaaaaccaaacactgcatgttctcactcataagtgggagttgaacaatgagaacacatggacacagggagtggaacatgacacactggggcctgtcagggggtgggaggctagcggagggatagcattaggagaaatacctaatgtagatgacgggttgatgggtgcagcaaaccaccatggcacgtgtatacctatgtaacaaacctggatgttctgcacgtgtatcccagatcttaaagtataataaaaataaaattagggaaaaccactaaatagaaaaaagagagaaaaacaaattaggctggtcacaatggctcacacctgtaatcccagcactttaggaggctgaggcgggtggatcacctgaggtcaggagtttaagactagcctgaccaatatggtgaaagcctgtctctattaaaaatacaaaaattagcctggtgtggtgatgtgcacctgtagtcccagcgactcgggaggctgagacagaattgcttgaacccgggaggcggaggctgcagtgagccgaaattgcgccactgcactccagcctgggtgacagagcgactttgtcccaaaacaaacaaacaaacaaaacaaaaaccacacaaccctcccctgaaactcaactgtttaggagaagcacatgttttgctgagatcaagacccaagagaagtttctcctatgggtcttcataaaaggtacactatgtgatatatttaatagtagccattagccttaaaaacacatgtattgaaaatatatgttttgatgactgtgtttgctattaggagccaacagcatagaaacaaagcataatgcagtaacagtaattctatgaagagccaaaatgtggatcaaatatgtagctctctgaagatttcctagaggataaaatttagattcttctgctagttgggaaaacagacttgttttatcataatccccaaactcatgtgttcctataagtaataaaatccatttcaaaaccaaattatttttatatctaaagccactgttcccttttaatatcacagactgaactagactacatagataatttatctaagcatggttttctaaataaatgtgctgtaaatggctaatctcgatgtagtagatacattttaaaatgctgttttatggttgtactaactatatgtaaacttatttctaaaaggttaaaagattatccacaaaaatgttatttcagttacattcaatttttagaattattagtataggttatgttaaagtgcattgcacctattcacaaagactttcaaaaaatgatcagcaatataaagtgtaaacctaaaaagaaaatcagactcattctacatctgtgaaattcagcacttaaatataattcaatttacaataattgtaaaagatagggagaatatagaaaatggagggggaaaatggtattcaacatatgaacaacacagctactgttgtagtgaaaaaataatttattaaatgaacataatactgggagtaaaatgcattataaaagtaaaaaaaagtaaattataaatataaataatagtggtttacctaattaacagatttttttcttcatccttgaagaactttaaatacaatcttccaaaaagccagattgaaaaagtggctggttcgctttagaacagacaggcaacactataatatctagaatttggcaaagatctgttatataagatacagaatggtactgattaaatgattgttctttttaagccttttgtaagtctagaataataattttaataaataagcagatcaatttattatattcatttctgtctctaaggatagcaaacatatttctgatacacattgtgaaaaatgttctgagaacatacctgtgcactttgacagactaaaaatttttggttatttggtaaaaagtgatctcctttttacttcaaaggttaacaacagccattgaatgtgttgatatatgtcattagaattttaaacagccacaccttaatatatatatacatcaagataccgataaacttttagatagtaaagaaaaaaatggagattgttattctatttccccagtaagtttccctcagtttttagaaagcataccgactgggattgcaaaatgccagcatgattacaatgcttattaacagcaatatgcaaaacagtgaaaatagaaaataaataacttcatcctataaaaatgaaacaaggcacttttaatgactgtacacaaagctgaaataaacaaacattttttcataaagctgactcaaagaccctaggagacttttgtagaaagtgaaatagtaaaggcactacataattctttctcctaactctacttactaaaaaaatccaccaattaaacttggcacaaaagagtttaattatcataaagtgcatcacttggctaaatatattaaaaagaaaatcagccataatacagtataacaacatcttcacacaaatagaaataaaaatgcaatgtcaggagtcaagccagttaggaactttgcagtatatatggctttttattttcttttttgtataagcccctatttatttagaatctatattttcgaaagaatatgccttaacaaaaggaggtagtattctgaaagaggcaaactcactaaatctaggtagagataaagattacgtggaaactaaacaaatgtaacatattaataactgtgacacttattaaagtattttgatattaatgaatcagcttttaaaatcaaggctatcttatcactttagctatatgattacagctctttcaagtagttttcctttggtactagaaagtcatttttctaaagagcattaacatttcaaataagcaaattttatttagagatgtaaacatgtaaacattaaaaactcaactaaattttatctttattatgatggtcactgatttaaactattaatgaaaatatgtcatgtcagagatataaagaagaatatatcacccagatagtaacatgcaattaatttccatttgattaatataattggtgatttaacacacatacatatatacacagtagtttggagcaatatataggcaaaacaccataataatttatgcacagtatttaagaatgtgggccttgataacagaattccaacaagattttttttagtgtattaaatgtaattggataaaatacaattaaaagcagcagtgaatatatttcctatctcaataacttaaaaaaacttctttatgtaaactttatacatgtgcattcttgctcttttctatatgttttacagttcttggttcttcttttaaaatagtatttgccactcttctaaatttttgaatagtctaaatggagggaactgcttgtgatacattagtcttcttcagcatcatatgccacttctgctacttctatctctgatacagcattttcaggttcactaaaacttaagcatggtttattatcagctctgcaaaaaaaaaaaaaaaaggaacatatcaatgatgggactggatgcatgctattatttcattttcactattacctttaaaaatcttctaccttatagaaaatttacatacttagtgtaaaagtatttaatgtaagagtatttaaacattcaatcagaaatttgatatatttaagttgtcattgccaagtaagacctttggagataggtttttaaactcagctctccaaactaccatttaccaataaaaatctacttggtaattacctttatcaacataaaatttttctcagaattatagttgaccattaccactaaactattaacaattaccttggatttgtatgcaataaaaattctatgtgcttttaaattcattaccttttcatcattcctattaggtaagaagggtggtttgctattatattatagtagcctactttttcaatggaaaaagggtgatattgagggagattaaggtaatctgtcaatatttaaaaaattagttaattacctgagtcagaggccagttaatgcagacacagctctaaagtaagtaatgagaaaacttacatcctgatgtcaaagacactttttatttttaaagtgtttttatttttaaatattttaggaaaagcctaaaatatttccaattcattctctgtttgcttagcagattcgtgatacagtaacactgagttcataaaaaaatactctatagagtattagaatcactttcctccaattattcaagaattaagctatcataaatgaaatattatatacctagattcttcatccaggacatcttgatcaacctcaagtgcagaggactccacctttaggatctgttcaccttctgtttctgacacatccagtgattcttcaggttctaaagacaatgttctaaaagtatgttatagcaacaagttattttctatgaacaaaacaggcatatgtttaatgttgtgaatacaggtagctatagcagtctttagctgttaagccttaatgtagttacatagctaataaatagctcactttggaagtcaacagagaaaatcagtagctatgattaatttaaaatgactttagtatcaattcaagatatgctgatgagatggcaaaccagagctttcatatgtgaaaagctggcataaatgcctagaaactaagatgtcacttaaataaaataatggtattccatttaataatgattatttatttaataatgatttaacaatgattaaaatgaataatgtttaccttgttgaacagttagtggcttattttcctgatgtttcccatccttcaatgttcaaaatttatttagcaaaattatgctaaataaagcataattttcccaatgaagtatgccaaaagcctacaactttcagaatcagaaaattcctaaatcatattaaaatataaagggcagttagcccagagtattaagggttgaattagtcagagtagaaatgcaagtatcacaacacacctgattctgttctctaaagtgtctatatgaagttgcttctcactgagcagtttctttagtgattccatctccttttgtttttcaagtagttctttctgtaagcggtagtttgtctcttctaaagtttcacagaatgccttaaaaaaaacaacaaacaaaactaaacacatgcagaaaaagaatacaattaattacaaatgcagtatctttctcaagagcattattgaagagtcaaagaacacagataatcaaaataatagtatgaaactccaaatgatttgttctctaccctcatctttttaggtcactggtatcttaactttagttcccatccaccagggggacataactacaagttctttttcttaagacttacagtagtaagctagtgtgcctgaagtgagtatgtgatatccctctagtgtagaactgggataaaaaataattggcaactactgctttagtttttactctctttaatctacttttgcctagtcatacatgattacacttaaaaaatatcaactgtggttgatgccatttgtattagctcagtagacatactactgtaacagcattttggtaatcttgacacttgggttgcagtaccaggatggtacaagaaatgaggagtcaggtacattttgggaagtaagtgacaaaaagtgatagattcaggaataaagcaaagaccctaaagagcctattaataaaagtcactcaacaacacagaaaaacatcaagaaagattgtttgtctcaatctggtttctaggtgggcgaggtaaagtctcacctgaagaatctaatctaaaaagcctcatatggattttgggaaaaacaatgtatcataaggaagacaaataaaaacaaatatatatatataaatacaagatactgaagttgcaaatatcaaaatcaaatagatctctaaaacaccaggaagacaaatcagtttactataaaattgtaagacagtaggggactgggagtagatgtcataaaacagtctatgtcaaaggcagtggaaaacactttaaagcactgagaaaaataactatcaaggtagaattctacactcagttaaatcatacttcaagaatgaaacaaaattaaaagacatttgaacatcaaagatctaagcattaccaatacacattcactgaaagaactattaaattatgtactttaagaagtagttaactgaatcccaaaagaaagagtaggatgaaagtaggaatggagaggaatgaaagtgacaaagacttaggtaaatcaaaagaaacattgactgtgtgaaataataatgatggccaactttgaggagggctgtaaacaatcggtttccaatatatgagaacatatgaccattaaataaaagacaatgactacagaagttaaaaaccaagagcagagaacaaagagaaaaactcattaaataacatgaaaagaaagaaaggagtaaaaaagcattttataaagcagaatcaaaagcacaaaataaaataatagaaataaatacaaatatattggtcattaccatatataaaataaactcaaaacttaacagatttttcagactgtattaaaaagaactatgatgtttaaaacagccatatttaaaatacaaaagtagaaacatacttaaaggcaacagacaaatgttagccttttctcccctaccaaaagttgtagttttcttaatatctgacagaatgcagttcaaggtgataaacattattaggcacaaagagtctctacctaataataaaagtaataattcaccaggaatattttaaatgcataattacaagaagaaattgaacaaatccacaccataaggggtaaatttgacataactcttggcaattaacggattaaacaaaaaaatgagttaagattaaaaaaattttaacaatacaaattagtaagtttgatatgatgaacatatattgaactgtgagtctaacaattaagaaatacatattcttttcaagcacacatggaaaatttagaaaatttatcacatatgtgcagatcccaaagactgcagaacactgtcaacaataaccaagaattggtgtcagacagaacataatctctgaaaaaaatgcaaatagactaaaaaacagtcaataatattagaaaaaagtgcttgaaaaattaaagagaattctaaatttatggagcaaacaagataataggaacaatataaaatatgaacgagaatgaaaatattaagacttgtgagatgcaatttgactgttatataaaagaactgtataatactagaaacaactgagaaagcatccaattaaagaagtcaaagaacatactaaaaccaagtataagaaaggaattaagagacaggaaaagaatttaatcaagagaatcaaaaaggcaaaaagtggttctttgagaagactattaaaatacaccaaatccaaggagaaaagactagtggaaaaaacagtgagattcaaagtggatatataactaaagatatgttaagagattttcaaaagtcatgtgatactactaagaacaacagttttgcggtggctcacgcctataatcccagcactttgggaggctgaggcgggcagatcacgaggtcaggagaccaagaccatcctggctagcacagtgaaaccccgtctctactaaaaaatacaaaaaaattagctgggcgtggtggcgagggcctgtagtcccagatactcgggaggctgaggcaggagaatggcgtgaacctgggaggcggagcttgcagcaagccgaaatagcgccactgcactccagcctgggccacagagcaagactcttatctcaaaaaaaagaaaaaaaaatgtattttaaaatctatacaaaatggtcaagttctagaaaaatacagattctcaaaactgaaacctccccaaataatctgaataaactacagacatcaaagaaacagaatcagttgttaaaaatctactataagacaagctaaagaaaatatcaaatccagattgttttacaggtgaattctaacaaacatttagggaacaaccaatatgcatttattcaaatggttctggataacagaaaaagagggactattccttattttataaaactggtataattttgatgccagacccaacaaagggcagtaacagaaacaaatgttacatatgccaaaattctaaataaaatcattacaattcaaatccagtaattaaaaaaatacgctgaatttgcgttaatctcataatcaatgttttatcaactgaaaatctatgaatgtaatttaccacaccaatagattaaaaaaaacccatatgatcatctatacagatgcaagtgaaagcattcacacacacacacatccctacaacctcttagcaaactagaaatagaacttctttaatctaaaaacaacaacgaaaacaataaacaaatcaacataactcacaactaccaccagcctatagaaaactccatatccaacagcaaaatacaggatcattttcattaaagttaggatgaaaggaaaaggatgcccaccataatggcttcaattaacctccaaagaatctatctagcaaaataatacagaaaaatgaaatgaaagatattacgtattaggaaaaaacacattgttaatattgcaggggatatgattaccgatatggaaaatccaaacagatctataaactaacaagagaatgtgacatacaaaatagatatataaaaatcaataataaaactagtaacttagaatgtaataaaaataccaattatttcatcaacaaaaatgatgaggaatcctatggctttccctagatgaaaaaaatgtaaacttttattgaagaacttaaaaaaaaaccctccatatgcaaagatctattaataggaagattcaatactataaagatactcttcaaaattaataaataaatgtattaaaattccaaacaaaatggcaataggattttttcatggaactcacaaagttgttctaaaattcatatggaaaagtgaatagccaacttggaagaataagggcacccttgttctgccagttaataagattatttaattatagtaattaacacaatatagtaccagcagagggatgagactactaaaaatgaactgagtggccaggcatggtggctcatgcctgtaatcccagcactttgggaggctgaggtgggcagatcacctgaggtcaggagttcaagaccagtctggccaacatgaagaaactccgtctctactaaaaatacaaaaattagctggatgtggtggtgcgtgcctgtaatcccagctactcaggaggctgaggcaggagaattgctggaatcccggaggcagacgttgcagtgagccaagatggcgccactgcactccagcctgggtgacagtttgagactctgtctcaaaaaaaaaaaaaaaaaaaaaaaaaaaaagaactgaatgaccataaacagacccgttcacactcaactatttagcatagaagaattactaattagtgcagtagggatgaacttttaaataaatgaggttgggatcactggtcatccatacagaaaaagttaaatcaattaaaagatctgaggtcagcttgctcctttctgcccgtggatgccgccgaagaagcattgttaaagtctctcttctccctgctgtcatgtctaagtcagagtctcctaaagagcccaaacagctgaggaagcttttcactggaaggttgagttttgaaacaattgatgagagcctgaggagccattttgagcaatggggaaccctcacgaactgtgcggtaatgagaaatccaaacaccaggtgctccaggggctttgggtttgtcacatatgccactgtgggggaggtggatgcagccgtgaatgcaaggccacagaaggtggatggaagagttgtggaaccaaagagagctgtctcaagggaagattctcaaagaccagttgcctacttaactgtgaaaaagatatttattggtggcattaaagaagacactgaagaacatcacctaagagattattttgaacagtgtggaaaaatggaagtgattgaaatcatgactgaccaaggcagtggcaagaaaaggggctttgcctttgtaacctttcacgaccatgactccatggataagacggtcattcagaaacactataccatgaatggccacaactgtgaagttaggaagacctgtcaaagcaagagatggctagtgcttcatccaggcaaagaggtcgaagtggttctggaaactttggtggtggttgtggaggtgttttcggtgggaatgacaactttggttgtggaggaaacttcaggggtcatggtggctttgctgacagctgtggtggtgggggatatggtggcagtggggatggctataagggatttggtaatgatggaagcaactttggaggtggtggaagctacaatgattttggcagttacaacaatcagtcttcaaattttggacccatgaagatgggaaactttggaggcagaagctctggcccccatggtggtggaggccaatactttgccaaaccacgaaaccaaggtggctatggcggttccaggagcagccgtagctatggcagtggcagaagattttaattaggaaacaaagctcagcaggagaggagagccagagaagtaacagggaagctacaggtaacaacagatttgtgaagtcagccaagcacagtggtggcagggcctagctgctacaaagaagacatgttttagacaaatactcatgtgcataggcaaaaaactcgaggactgtatttctgactaattgtataacaggttattttagtttctgttctgtggcaaatgtaaagcattccaacgaagggttttaatgtagtttttttttttttgcacccaggctgttgattgctaaatgtaatagtctgattgtgatactgaataaatgtcttttttttaatgtgctgtgtaaagttagtctactctgaagccatcttggtaaatttccccaacagtgtgaagttagaattccttcagagtgatgccaggtactatttggaatttacatacaacctgcttgggtggggaagtcattgtcttcagaaaccttggtgtagttgaactgatagttactgttgtgacctgaagttcaccattaaaagggattacccaagcaaaatcatggaattattggttataaaaatgattgttggcacatcttatgcaatatatttaaattgagtaatggtaccagataaaattatagatgggaatgaagcttgtgtatcatccattattaggtgtaatcaataaacaatttaattctcttaaaaaaaaaaagacctgagtgtgaaaagcaaaagtttacacttattagaaggaaatttaggagaaatatttttatgtgctggtgtgtagggaagaacaagagccatagaaaatgtgacaaagaatgtgcagctactatggaagatgccagacctggctggtaatcaagaaaattaggctaaaataacagtaagatattattttatacccatcagactgacaaaaattaaaagattgacaatacttgtattagtggtgatatagagcaaaaggaaaacatattgttggtaaaagtacaaactgatataacaaatttggggtgtaattttagcatatgcagtgaagttgaagaggagaatatctaacaatgaaacaattgtattcctaggaaagtacctttaaaaccttgggtttcttccaagattaacatccaccccagtgagggaggtaccttaggaaaaatgtatataggaatggagactgtccttagaatagtcattggaaggctatattgatataaatttccttctgggatagagatcaaacagttccatcaggacaggaaaatctgctagcaagtgattctaagaaaacagcttcattacatattacaatttaggtagagaatagatggcttaagaattctgctttaattgtttgtacttataattcatataaaatattaaaaattataatttatttctaataagctattcattaatgttaatacagtaagacctcatttcttccaattatattatctccatacaagtaatagatttgaattttcccaaaaaaaggtagactaatttatatccctaatcttaattccctcttttagtacaagtatatgaggggtagaaatgactaccttaaatagggaacagagaaaagtaggttaaagatttgccgaactgagtatcctttgaataagtttaattttacactccaagaaatgtgggttaataagtcattttgggatttttcttaaaatgagaggctgcttaagtaagtctgcagacaaaagagatatatatctcattaggttactgtagattttaccttgaaggagaggagcaaacacagaatttcttcattcactgttcaaataaacatatattttcaaatacaactgtaggaaaatgcatttattttagagaaagagtctaggagatacattccatattactctgttgagtgtataaacttaatattgccttggtgacttatttaaatcagtggttctacatcaggagcgattttaaactcagaagacacttggtaatgtctggagacatttttacttgtcatgagtgggtatgctattggtgtctaatatgtagaggcctaggatgctgctaaatattttcaatgcacacgtcaggctgtgctctagcctcggccaccaaaaagttatccagccctaaatgccgatagagtgtatgagaaatcctaactcaaatcagcttccactcttcccctgccaagttatgatacttgacaatactaactagcatatattttgaactaagaacactaaaaagatattcaaattattatttttttgtaaaagggctaatttaaaaattaaaaaatgaactaaaggctgtcttgcaagaagaaagaatactatactttaaaggaataaaaatcctggaatccttgagctggaaaaggagtgataaacacttagcttctttagcccaatgttcacttaaaatagaacttaattttctaaacagattctaaatcaaagagacaaaatggtagccgaaaggctgaatgaaacccagaagcaatgatctagccaggatttaatagggagttctgggaaacgatatatctatggggccttgataagctttccacatatcctgggacccaagccacacaggacaacagagcccatatgcgtgtatagaataggagatgggaaaggattcagcagaaactaaaatctacagcatacttgaaaatgaccttaactttaaatacactccttagactatatacagatccattaccagagtgtaaaaatcttactagtttgaggtatataagcaaaatttatgaccaactgttgactgaacattaagctatgcagaaatacaagaaagccaggcttaaaaataaaatgaggaaaaaaacactgagaaaagacatcagtgaccacacattgctgaggagacaaacttcacagatttagtccaggcaagttactaaacagacagacaaaataataataaccactataggagacagagattaagaatcaagagttgctacagtgtatcacctaaaatatcttgtattcaaataaatgtacaaaacactcaaagaaacaaggtcaatctaagcatactcaggaaaaaaggcagtcaattgaagctatctctaaacggccccaaatgttaggcatatcaggcagtgatttttaatgcaaccattacgtacatgaaataaactagaaaaaattgaattaatgataaggataatgataatgagtcaacaaatagaaaaatctcaataaagagaaagaacagttaaaaaataagcaattgagaattttggagttgaaaagcacagtaactgaaaaattaacaagaggggctcaacaggagatttaatatgaccgaaatataaatctgtgaatctgaagatcaatagaaattttcaatctgaagatcagagaaaaaagcaattgaagaaaaatgaacagcacttcagagacattttgcacaacacagggtatacaaatatacaagtaatgacagtccaagaaggagaagggagagaaaaagggagtgaaaaagtatttgaagaaataatggctaacaaattccaaagtttgatataaaacattaatctgtcaagtcaacaaagctcaatgaagccaaagcatgagaaacagaaagagatctacaccccaatacatcataatcaaactgctgaaagtcaaacaaacagaatatcttgaaagcagcaagggcaaaatggctcatcatgcacatggaaacaatataaaggttgattttttttttatcagaaataataggggccagaaggcagtggaatgacacattcagagtgctggaagaaaaaaatctgtcagtaaaactatctttcaaaaatgaccatttccagctaaacaaagactgtgagaatttgttgctagcagacccgtcttacaagaaaaactaaacgaagattatgagactgaaaggaagtgataccagatgatcacatcaacctccaggaagaaatgaagagggccagaaatagtaaacacgtggattaaataaaataatctatgaaatatattttcccatttcttaagttctttagagcacaaaagactgtataaagaaataattattgcactgtattgttaggtttataagatatatgtaaaatagataacaatagcaacacaaagaaagagggaggaaacggagagatattggagccaagtttatatttcactgaaatataatacctttagcagtcactgaaaaataagaaaaagtaaaaaattctacagaagaatcaaaatggcatactaaaaattattttacacaagataaaaggaggaatgggatggagacagatgagagaaacagaaaacaaattgcaaaatggcagatgtaaaagacagatgtcggaaagaataacagatcaagacccaattacacgctatgtagaagggatggatcttgggttgaaagatacaaacagattgaaagtaaaaggatgggaaaagatatgctatgcaaacagtaatgataatagagctgcagtaaacaagacagtatcatactggcacaaggacaggaaaatagatcaacagactagaattaagagtccagaaacaaacccttcttttcatggtcatttgatttctgacagaagtgtcaacataattaaacaaaacgaactaaaaaaaaattaagataggtataggaacttaagacccttacctaataccttaaaaaaaattaacccaaaatagaccataaacctaactgtaagagctaaaatataaaattaaaaatatatatatgagaaaatatttgtaatgttgggttaggcaaagagtttttataatacaatagtaaaagcataagccattaaaaaagtgataaaataaattcattaaaattaaaaacttttgcacttcaaagaatgccattaagaggatgaaaagacacctacagactgcaagaaaatatctacaaattgtatctctgataaaggattaatatctaaagtaaagattttataactgaataagataaacagcccaggttttttaaaaaatgggcaagacgtgaacagacatttcattgaagaaaacatgaatggctaaaaagcatgtggcatgatatcaatatcaaaaaatcattagaaacatgaaaattaaagctataatgaaatatcactacctatccaagagaatggctataatccaaaagagagataatatcaaatgtttgtgaggacatagagaaactaaaactctcgtacagtacaagtgagaatagaatacagcaactttcaaaaactttattggtttctttaaaaagttaaacttgttacatgatcaaacacttctactcttagggaagtagaatttctcagtccatgagaaataaagccatatgttcacacaaaacattatatgaaattgttcatagcattactcataatatcacaaaactggaaacaatccaagtatccctcaatgggtgactggataaacaaaatgtggtatatgcaaacaatgaaaaaccatttagtaatgaaataattatagaggataacatggaataccctcaaaagcatgctaagtgaaataaatcaggtgtaaaagattataatactgtatattatatattaggcagactgtatatataaaagttatgtatatggtaaactaatacacacaaacacacactgtatgattttatttatatgaaatatccagaaagggcaaatgtgtagagaatgagagcagatcagtggttgccttgggctggaagtgcagactgactgcaaaatggcttataggaattctttttgaggtgatgaaaatattctaaaattgggttacagtgatgatggtaactgctctataaatttccaaaaaagtattaaattgtacattttcagtagaatagcaaacaacaaattggtgaatattatggatgaaaatattactccaataaagctgttttaaaaaggccagggcattcaatctaacacaaagaactgactcagcttgaatgaaaacattacaaacctaccaattaaatctgttccatttaaatgccattaaacatttggggaaaaaacttgcataaaatcctagctaatctactattaccaaatctgttttgtgaatctaggctattgcttcaagaaacaggacactttaacacgtcaattaatgtaatttgagaagcatcaggcacaagctaaaccgataacaagataatcactcctacccctgaagttttaaatttgattttagctgtacattccttattttgacactcaaatggaagaaaactcagtttacacatagtattattaaatataaaaaggtcccccaaatcattttttttgaaacagtaaaaataatgcaggatttaattttagagctttattgactataagacatatatgaatttttactttttcactgagctaagtctatgtatttcactgaaagcaacctttgactcaaacatgaaagctttctgtgcaaaactaccatagcctgaaattataatattttgctgtttgctattccatccaagaaacaatgtagttattgtactgcattaattgttcctcttttcatgtgctatataatacagcacttaccctgctttcttctaggctatcaaatggacccggtggatcatccaaacaaagaaattctctcactgcaaggcttttcaaaggaaaaaaaaaatgatctgaagtacaaataagtttgcaaaagatagcaaaaagcaaaagttactttgaagctgtacagtgttttaaacaagttggttatgtgttttcatacaagtaactaaatataaatataaaactatagaagatgcaaagatcttaaggtgttttctaagatcttagaacataaatatcacaaatttattgttacatacaaactatggggcataaaacatacttcacaataatggttcaagagaccaacatagtgaatagcctctttatgattttcaaagaaatattagtctgaactagtctaacagtcattatccttttatgaataaatgcaatttctaatttatacctcacttgtttttgtttcagtagattcttctaaagtgaccgaaaagcatttactctcaaacaagttaaagactgaccttgcaatcatgtttattatattaatttacttaaatattttccctagatagttcgagagaaaaaattctaaccatcctatctctaaatgaccacaaattttaaaatagttattaaaaaatgatattgttatgcttatactttgctattatcagagaaacaggttaaggaggtagataaccaaacttccttataataaaaatgcctccctgcctttctaaaaagcaagtttggactgttgaactgagagacaactctatgtacacatcaaaatataaatgtggatccttattttagatttgcaaaataaaatctttacaaatttccttttacaaaggattttctttttttttttttttaagacgagtctcgctcttgttaacagcccaggctgaagtctggagtgcagtgatgtgatctcggctcactgcaacctccgcctcctgggttccagcgattctcctgcgtcagcctcccgagtagcagggattagaggcttccaccaccacacccagctaatttttgtatttttagtagagatagtgtttctccatgttggccaggctggtctcccactcctgacctcaggtgatccgcccgcctcagccttccaaagtgctgggattacaggcacgaaccaccgcgaccgcacccagccaggatttcttgatacactacaaaaaggggatgtcaacttatgctaaaagggaatggggcttttggtttcagattaggccagacaggttgatgatgtcaggaggtgtccatgaagagttaaatggaattttacatatcttattgtatttaatatgctcacatattctattgtatttaattttcacgacaatcaggtaagattaggataagtattggatcttcattcacaaatgataccgaatttcagagaggtgaaattacttgcctattgtcagaaagtgcaggtggtagagctgtactttcaatctgttccctgagtgtgaatatgtgtccttttctacctttaaattcttctgtcttatgctttggttcatttggattctccttgctggacacttctctctgaaaacatctgatttatctgcaaccctctctagtcatggcctctagtagaaaactgcagttggctgatagcacagaatagaacaaggtcttctgatgtagatattatgcttctatccacccattatttatactggggcacctgctattacatacaaatgactcctaggaaatcaattgatctgggattgagaggtcaagtttgtatgaaaccctgaggaaatagcacttaagactgaaagcaaactgctaagaaacatatggaagggtcctgtttaatactttcagtatatgacaaatgtgagacattattttcttacagttttatattcaaatttcctcatactttaatgttgcttttatgtttacaaattactctactggactgctactgctaggaaagaaaaaggggtaaaggagtacacatatatccctttttatatctttggtttacagtagaaatttagccaagatggacagtgaatgttgacagtgtatccagctggaggaatcattttggagtggttattctgtttcattcaccttccctaaaaatctttatgatctatggctcactagagttctacttacatgaaatccaatggattctttaagtttttatccatatagttccaaggttatactctatgctttactttctttaatcagtagcagaataaaatttgaaactggctttacaatgttaatttacataaaaccttttcagtggctcattacatttcctctgcttcaacaagactcagtcagtaaagaaagcagtcaataccctcaaactctattttctttctaaggagaggacacacaagaatctctggaagatggtagtaattgagaaaacaattcctttcttagaaattctgatacatttttccccctaggaaaggaaaccctcacccttgcttgagaatcactgactacataactttatttagatccagtgaatatttattgactgtctatgtgtgccattattccttttattatctggaatacatttttactgtgtttgggaaacctattttaaaattggggtcaggtgttgacttaatttactaaaggcagataaggaaatcacctatggtatccctcagcattgttttaattatcagagcaaatctgtactataaattcacctgtttctttgattctcttgaattttgtttaaagagttttaccgtattttcaaactatgctcttaagaacaacatatttgactttattgcaaattttataactatctgtaatttaatttctaccaaaataacattttgtagcaaaaaccatccaaccaaccttagtaatgtgttgattctcatgagatagcattatatgaactactgtgtaaataactgaattcttctttcattttatataaatactaagattaacttctctgaatatcttaaattttcttttttaaattaaaaaaataaaaacaacttagagacattaatgatcacatttcctgtgaaaagatagttcaggttgcaaatgtacaaaagttatctttaagtattcttgttcaagtagagaattattgaattttttttaactagaagaaacctaacttgtcatctaatcaaacatatcccatttaataattccctctttgataccactgatagttatctactctcttcaaatagttaagatgaagagaaatctactttttcaaaaggcagaacatttttatattggacagcttgaaatgacaagtaactttttaaaatctgagctgatagtaccttcctctaacttcttgttgttattcctattttatatgttagccttgctattcaaaatgaggttattagaccagccagtatcagcatcacctagaaacctgttagaaatgcaaaatcttcccctcacgcttgctgaatcagggtcagcattaacaaatcccaggtgattcacagacacattacagttggagaagcactactcttaaatatacatgatcaatccttccttccaaaaacaatctttcaaatctttcaagtatgtaaagatggctatcatatctcccaagtagttttttaaaagaatattctcatttatttcaattgttctgtcatattaatgtttggatactattttcttttctttaaagccatgaactgctattaatccagatccatcctgaactttaaaaaaatagatgtagaattaaaaatactgaattttcgtactgaatcccttacagataaatgatagtgtgaagacaaatacataactttaacttttgaatttcgaaaaattaaaaagaaaaaaatggcatgtaagatacatgtgaagtacttctaaaaatggagaatggtaaagtatttgctgtgctgattaatgacataataatttaaaagtagttcaagacactgtaaaacaaatagctatattttaactaagactgtgcaatgtaagactatattcaccttgataaactgacttgcatgttgttcctggtacaagacctgtaccttcttgcttctgcatttcgattatgatatttcctatcatttgcaaagtccttcttcatctttccttgctgggccaatgatcactaattctttaaagtgcagttcaactatcaccctctgcgaaaccttttctaattttcctagtcaaaagttctcttttccacctttaaaagagatctaactatccattatgatttctgggggtatgtcttctttctattcagtttttttaaataggatgagtatctaactcatttttatatagtcaaagcatcttttaaatagtaagctctaaataaatatttattgaacagataaaatctctaataaatctgtttattatgtaaatattaatgtttttatctgcatccttactttgaactttctaaataaatctgaaaacaacattcttttaaaatattcaaatcaatagtccttaacatccattcaattcgtattttcttccatttctgctttgttaagagttggagaatatgtagcattaagggctgcccattgtgtaatggtaagggcttagccaagaggaaggttaagaactagccttgttgtaaggtgctaaggatacaaaaagtgaaagaacaattaataaacaattaatatgaatgtataaacaatatcaaataattatttggccagctaaagatacta
